United States Patent Application Publication US 2014/0057251 A1 - sequence listing, part 41

SEQ ID NO: 44457 - DNA, 3425 bp, Cannabis sativa
  modified_base (3365)..(3368): a, c, t, g, unknown or other
ttttttttttaatattttcctaaaattttcccataaaatgactttgatgagaaaaagccatattttttcaaaattataacttttttttttagaataaatacttgttattataaattaaagtggtaagtcatttacaataacagaataaatagatggagggacagactccactcaatagcaagtttcatctaatcttaaaggatatctaaccaaaccatgagcggtcatattcgtcgttcatttgacatgtacaatcgatacacccgggagaaaggaaagaaaacaagaaatgtcaacaataagatcattaaaagtgccgatagaattggagcaagcatataaggccttagtaatcatgagagcatcagtttccacttgagaaatttgtagtcccaactatatttcccaaaccaactgtggaagattgctttggctttcattttatgagatacaaagttcccagtgaaaggctttgagaggactgcaattacttgaccaccattatcacgaaccacggcactgactccaattatatttcgttgagtatccaaagctgcatcaatattcatttttagttttcccaagtcaagtggcagccacaatgtagaaatggctggggagtttgaagtctttgaggcagaagaaagatgtgtacgatactttatttgagctgatctataatttgacaaataattatctgcaaaagatgctaaatggctggcaggtttggcattttgtctttgaactacccgattccattcggtccaaatacactaaagtgtacaaaaaatatactccatctctcgctaatcaaatgcaacgttgataggcgaattagataatcgactttgtacattgaagaagaagcattccagccaaaatgaagattcaatgaacgccatacctcctgggcgtatttgcaaccaaagagtgcacgaccaaccgattcccaaacttgacgacaaatcgagcagatcgaatctataataatttttctatgaactagggatgttgcaaccggaatagcatcatggataactcaccacgcaaaaatttaattttttgtggcagctgtagagaccaaaagaatttctacaaggaagaagatgaagttgatgccgaagatagatcagtttctttcaaggaaacaacaaaatggtatcccgattgcacagtgtatatatcgaaagcatggtgaggccaaatgagtttgtcactgatagagaaataactgaggggtatagttaaaatccgatccacatccaaagctgagaagtaatcacgaagtgtgttgatatcctattggcgctcttcagtgatgaggttggcactactgtatcatcagggcccctataatttgtaggaacaaagacactatggccgggaatctagggttcagcaccacacttaatgtttcttccctcaccaactttccaccgcagaccagcagcaagaagttcttttccaaagagaatcccttaccaagttaaagaaggggagtgaccatgaggtgcttcaagaaaaaaaattgctggggaagtaacgactctttatcattctactcaaaaaagaagatgggttatccaataatcgccaggattacttagccacagtgcttagttgaaatgcacgaaagagcagaatcccataccaccatcagatttagttttgcataagagtttccaattgcgccaatgaattttagatccatttttattagatccccactaaaagtttgacatcatggtctcaaggtgattacaaaccgtaatttgtaattgaaaataactcattgtgtatgtaggaatagattatacatcaactttgaggaggatttctttgccacctattgagaagattttatcattccaagtgcgcatgagcctccaaattttttcttttacattactgaacatttgttgcttatcccagtctgaaaacgctggtaaaccaagatatttctcatggcagccacagatgggcatagataatagtctatggaagaagacttgggatgccaatgtcgtatttggtgaaaaatatataacgaatttattggtgtttgggacttgtcctgaggtacgatggtaagtatccaaagagtgcttaatagtaaggcatgaactctcattagcataacaaaagagtaagctgtcatctgtaaaaaaaaaaaacaaatgagaaaaggggggagcccgcctagtgagagaatagccatgaagttgtcccaagttctcttcatgctgtagcagtcttgaaagtccttcagaacaaataaaaaacaagcacagtgacaacaggcaaccctcccaaagccctctagttggtataactgaacctgttgtctcaccatttaagaggaaggtggagcgatttgttgtcaaacaattcatgatgagagatgtccaaccatctgcaaaactcattcgctccataacaaccttgataaaggtccattccacacggtcaaatgccttactcatgtcaagtttcatagaagccacacctttacgacctgatgttttgtgttttaattctatgtattaactcaaaagcaaccaagatattgtttgtaataagcctatttgggacaaatgcactttgagttttcgagatcacatggggaaggacatgcttcaaccgagccactagcacttttatgataagtttggagaaaatattgcataggctaattggtctaaagtccttcatgtattgcggcttcttggtttttggaatgatggtgatgatagttgagttaagaggagtaggatcatcacctttatttaggacgcttaacactactgaagtgaccatatttccaacaacttcccaattatttttgttgaacatcgcagacataccgtcaatccctaggcttttttccggtcccatggtttgtaaggcaagtttacatcaatttttgtgaacggtttgtgtaacaccctacgagaaggcgtgttagtgtgatttttaacttaactgtgaagctcgttgctaatcaatgagtttattgaaaattgtgattaattaaaattttactttactaattataaacaaccaaatattaatactttatattaagccgggatcccgtttataaaagtatttacagaagtgttactgtgcatatacaaaagtttgtcgcctagtgtatatacaaaataagccctgatgtcccaaagaccatactctctcggcctaactgtcctgacatgtacaatctccctctgctcgctctcacggctgctcaaccttagtcttgcccttacctacacatacaaacaataactatgagtcgacaaagtcagtaaaaaaatcataaataataatattacaataacccggattataatcaggcgccnnnncacctaaccataaccctaactgaggtaggaacgttcttgataaagtatgactaactg

SEQ ID NO: 44458 - DNA, 960 bp, Cannabis sativa
  modified_base (94)..(113): a, c, t, g, unknown or other
aacataaaattgggttgaaccaagatgagataaacatttttaagtgtattaccttttaatataataaaaaatacctagcataaaatttagtatnnnnnnnnnnnnnnnnnnnntttactagtatatatatatacatacataatcaaccgcaccaagctacaagggttttcttctctactcacagttgggtttctaaagatccttatcttcttcttcttaggggttctagcttttcaatcattcttctcacagttgggtttcaaatataaagatccttttcttcttcctaggttttcaaaaactttcttacgatctgatcatacacggttagggtttcagttatcttctcaacctatagaaagagacaatgaatcctctaaccctagttaaacgaattcaaaacattaatgcgaaagagattagtttaaagatttctgaagaagcctcatggcacgccaactacaaagattccgcctatgtcttcgtcggaaacattcccttcgatcttaccgaaggcgatcttcttgcagtgtttgctcagtaagtacaaccgttggtgtcttttcattttgttttcaaatttttgtattttattaatagatttttgttgtataggtatggagaaattgtggacgtaaatcttgttagagacaagagtagtggaaaatcaaaagggtttggttttgttgcttacgaggaccagagaagtacaaagcttgctgttggttcgttgtctctcaccatttgttttttttttttttttttgaaaatttgtatgcattttgtgtgttctttgtttgtgtttggtggtgtctataataatggttttgaattttcagataatttaaatggagcaaagattttaggtcgaactattagggttgatcatgttactaagtactaaaagaaagaagaagagactcatgagcaaaagaagaggaaaatgtacacgaggagcgg

SEQ ID NO: 44459 - DNA, 1383 bp, Cannabis sativa
tatatgtttgattaattccgcactttatacttaaacatatatatttcagtttatacatataaatgtctaacagctttgagattgattagtgatactctctaaaaattattatattaaactatatgagactcaatactaagttagactaatagcaatattaacacataaaaataagtactaaataccactaatacttattaacatttctcattctaaccattactaaagactagatcaccattaattattaacactaagcaagtttaatattgactactgaccaagcaggtttttctttaattaaaaccacgcactttggaaattccaaactatacatatggatcataataattatttaaggtttattaaaatccaatctaattatatattggatgttaaattttcttatctgattcaatctaattaatttccgtcatccaacatctatcagttttatttattggatgtattttatttttatctattggtttaatttaggtttatctaatattttagacctaattttttttttgatctgatcggatccatctaacattttagatctagtatgtattggagtggattggatccatccaatccgaaaaagataaagtaaaatttcaacgttaattttcatatatacatatacattttacatatataacaatataaaatctaattattcatccaaactaaataaaaatactaattagttcgattggatgttggatgtaggagtgcacatcaaatgggttttgacgagtttcgagttttcgagttcatgtgtgtagaataccaaacttgcgtctgtttgtgtatgaccgcattttgggtgcaggtgggttgagcggcagttggatcgagtctgagtgggttttgactaggtttgggttgggttggcctgttttttttttttttttttttatgaaaaatatcatttttttttataaatttttttatttaaataaatgaaaagaaagaaaataaaagaagaaaaaaataaaaataatatatcattatttagaattaagtattttttaactgaatagaaaatgcataaaaaataaaaaataatagactgttaggtttcatacaggttctggtgtaacccaattttttcgggtgttaaatcaataaaattcaaaacccggcctataattttttaaacctgctttttttgggggggttttgggtttcaggtcgggtgggttttgtgacaatcagtagtcccgtgatccgtaaggggaaataccaggtaacctatacaatcccacatcgcttggggaaggtcaagtgggaagattctgaatctgtgtgggtatgggactacacagttgaagagagtttaaatggattgattggtactacctatatcaacaaggt

SEQ ID NO: 44460 - DNA, 1482 bp, Cannabis sativa
agaaactttaattttttttctttattaataaatcactatgtcttttcaattctcatttatgtttgagaattaaaaattattatcactcattctatcttattaattaggagacctcaaagtacatatttatttatttatttatataatcacgatagtgagtagtactgagtgtattatattgtttgatgagagagaagtgagttgatataattctggaggcctggaaggcgatgatgatcatcatagtcatacatcactggaaccatcctagcagcattaagacaaccctttctgaagcacatgggaaaatgttttgacgagaaacactccttattgaggcgttcccactcatttttaatcatacgaatcacttgctcccttgcttcgcccattgaacactctttgtgtcttttcatgtagcactcaacgtaagacccatcatgcccattttgattctcatcctgaaattattattattattggttggccattatttggactaaaatagtactacgtacccacttcaattaattaatcatttcattttggcgctatgtataattataatatactaaattattatgtaccttggcacttcctaagtcatcccaaagacgaagaattgctgctgtagaagacacaaggcctggaatgttgtccagtaagtttacagcttccatggatataccttcacctaagagaaagaacatatgaactagcaccacgtgtacaccagaactcacaatcgcgttcttcaaatactcctcttcatttggcaacttcccacaaccaaaccactctgcttctaacaagaacgcattgcacagttttccccactatcaaatcaaagtaaccaaaaaaatttaagtaagtttagttggaagaacgaaaacataaagataggaataaaatgggaataagaacgtaatacaatttaaaatatataaaaaaaaattgataaaaaaattattaaattttttaatggtttctcccatttcaaaaagaaataatcattaatttcattaaaactgtaaaaaagctattttaatactttattatgcaactaaacaaaaaaaaaaaaagaaatggagataaacattacttaattaaaccacaagaactacttattaatcaaatacatccaatcaaaatcagattaactacttattaattagatccaatcaaaatcacgttaatcacgttaatatatatataaatatatacctggtccatattattaaatgtaatatataagcctaacaaagaagcaaagataggataggacctatatagacataatatgcgggtcgggttttataacccggttcaattatattgggtcaggtctaactcaccaagctaaataaagtagtcgggtcggatcgggccaggtccgaccaaagtaatattgggtcgggtctgaaggattgacatatttctataagtattgtttcttttccattctattctatttcattacat

SEQ ID NO: 44461 - DNA, 3102 bp, Cannabis sativa
gtctttcttagtatgacattctttttgtctattccatgaaagcataatcaatacttatttttttagattttgtattgaaatcatgacatataattggtgatcaaacaattctaaacattaattactccaatggagaaagattcacaaatgaaattgaggaaaactagaatttcactaaaccataagctattctcaaataatattcataaaaaacccctccaaataagtttagatcacagtcatcatcttaaacataaaaatttaaaaaagaagaaaataattctccgaagatcaattgatgaagctccatggtgtccggccttttgctcttaaaaattgcctccccaaaagttatggctttcctttttagaataggtctaaacacctattttttctttcaataagggagcaagccacaacattgggaaaactaatatacctaaaatttttgggaaaaaaattgtcacgacatagctaaagatacatgtttgactatacatatatagattttcacaaaaaaccgcctaagactaattattgttaattttttttataataattataatccatgtaattgtccatgtgtgttagccttcaaagaaacatctacccttttgggccactatagtgctttttcaccatgccacatggctgaacttcaattaatctttgaaaaattttcatttttggtttcaaaaatctccaagactagctaattcacaaaactttcaagggctccacttttagcatacctacattaaaatttataattttttatctgttttcaaccatttttctctattggctctaattctactttatttactaaatcctgaaaacacaaacaaattaactcaaggataaaatagtactaaataaaatatacctacaacacgatcacaaacataatgtaaactaatgcctaacaatcaaaaatgtagcctttagtgtggtgacatagcgacgaaggagggggttttccaagcaaaataaatataaaaatactttttttatttattttttatcactcattaatgtaattgataatttttatattttatttatatatttaataagagttttacataatgtcaataaaaatttgatatttttccattgaagatggtgtaaatattctggtgatggctcatatcttataagaatatatttaaatttatttattcacatattatcagtaaagggcttaagatttaatttgaggggggcaaattcttttttctaagtaatacttcgtattttccattttaaatgttaaaatttgtagttatatatagtattaaatactaattaaaattaaaaattaacaataaaattgtaggttagatgagtaagttaaattgtctaatactctaatgggagttgaaattcccattacaaaaacacattaatatattgttttgaaataaaattgcttatatttgaaaagaaaaatgtcacaatgaggcttgaactcttgcctgcatggagatgaaaatatgttaaccactaaatcaaacattatattgttattagttttgtttaatttaaaatatacatatttttatttccttttcatgggtgcccattgcctctatgtgggtctgtgttaataggcatatatttaaagatggactgaatgttttggaatacttaaaagatgcctttgtacaatatatacaatccggaccacatgcattattacctctatactaaataatataatatataaatatagtgtttaattaaagccaacactttcttcttatatagttatatacaataatgagtgttaattattttggtttggtgggaaaaatgatgtaattcaatactagttatgaggttagggattataacaagttgtggtacaaaaatgagaaatattataaagagcaatgtatagtgactaaggataagattaagggattaattatgttattttccactgaaataaacatgatacaattcgatctgtcttcatgcactgattatatatatatgttgtccacgtgtgtaattgttaggtcatgaggtcagcccccaaagtaatgcattaacattattactgttgttgatacagacttagagtcgagtgagtagtgcccatatataactttaattaaatcgttaaacaaatgaaaaagaagatcatctttcagagacgatgacaattaatgctttcggcatatctcatttttatttgggtcaactgtttttttatatgaattagtccactttcaaattcaaaagcatgcataaaatacttatccaattatataatatattataattaaataattaacctaatttttgttcttccaattaataaaaaattatttcaaactacttgcaattaataagcttaatttctattctgcatttaaatattaaaaatagaattattaataagggaaaaaaaaaaaatacaattcacaacaaaaactgtaacttcgtgatttcagagcgccaaaaactgtaacaaaaattatcaaattatatccccaagaaatgggtgcttaagaatgaagaatgtctaaagtaaacgattatttgaactttgtttatgtgctattattttctgtgagccaatgtattattttttagtacatcaaactgaatttaatcattacaatttgaataatgcttaattaatgggataatgcatgttaattgtaaatataattcttttattactgttttgcgatcatcatctcagcaacttgatcatcaaacgcctgcaataatttttttaataaaaatagaaactttttattaaaaatagcaatcattcagaacaacaatgagagctcaatgtataactttgaatcagcttgtgaggtggatcgaaagagctaagctgtccaagttcaggaaaaaagcttgatttacaatatttggagagctaaagatgatcaaatttggaacttgaagacggctaaagcagaagaaattatacagagaactaaggaggctgttaaaactagagtaacaagatctctgccaaaaaagataagtagtgaagacactaattgattctcaagattgtaaagagatatagaggaaaaaatgaatgtaaattgagatgtatataatttttgtaaa

SEQ ID NO: 44462 - DNA, 8061 bp, Cannabis sativa
cttataaattaaattgatacgcactctcatttttgttctctcttattcagagtagaccctgacgtttagctaattttcgaccatagttttggtctgtattccaccaaacgaataaaaatcccacgtcgcaattagaggatggatcaattatgggttttgtcacaatggtgaaggacaacaatatctccacatcagataaccacaaagtcccaaaataatatttgaatatttttccacgcaaattagaataataatatattatcttcttaaccattctaataataccaatattgataattctttttttctctttgtgaaaataaaatataaaacgttggcatgtgcttatccagaatccctcagtttcctcactcgtcagatttcagaactatcaagtgttaaaagtcggaaactgctaaaatacgagagagtgagtgagagagagagatgggtaagggaggacagtctcatggtgaaatcaaagatggagaagaaaacatggctgcctggcttcttggtgtaaacaatctcaagattcaaccgttcactctcccacctcttggtatcttttcattattttctctttacatgttcctactttatacaatctctttcaataaacactcattttcctgttctttctcgtttttaattttttttatgcaggacctaatgatgttagagtaaggatgaaagctgttggcatatgtggtagtgatgttcactttctcaaggtgaatcattttatataattttctaaatagtttttctgggtagccaagttgagttgggtagcaaattctgttataccatttctcacatttaacagaactttggatagtataaataatacccacataccattttatacaataatgtttattgatcatcatctgtttgaaatgttttgttttttttctctcaggccatgagattagcagatttcattgttaaagagcccatggtgctcggccatgagtgcgccgggatcatagaagaagttgggagtggagtgagtacacttgtgcccggtgaccgtgttgcacttgagcctggaatcagttgctggaggtgtaacctttgcatagaaggtcgatacaatctatgcccagagatgaagttttttgcaaccccacctgttcatggttctcttgccaatcaggtcaaacaaaattgcatctttggagagtcaatttcttggtttgtaaatgtttatgttctgtggagcatacaagattaattttgtttactgggcaccatttgagacattgttattataatttttggcagttttcaacaagaaaataagctttagcagtgaacatagttgaagtgatctcttagtttcctgtcttatgcctaagagttgtgtgtgctgtgcttatttcaagtgttttaaattttgtttttcattgacaggtagttcatccagcagacctatgctttaagctgccagagaatgtcagcttggaagaaggggcaatgtgtgaacccttaagtgtgggtgtccatgcttgtcgccgagccaatatcggtccagagacaaatgttttgatcatgggagctggaccaattggcctagtcacaatgctcgctgcccgtgctttcgggactcccagaattgttattgtcgatgtggatgaccatcgtttatcagttgccaagaatcttggtgcagatgaaactgtcaaagtttcaacaaatgttcaggtctctttgattcaaatcatcatttgaagctaatgaataccgcatcataaccattaagctcttattacatgttaactgatgtgcattcaatttcactaaatcgtatggattcatgactcatgactcatgaatcatatcatataggtttggtagtaggtgctttaactcttattaagaagcatggtatttttatgtttgacaattatttatcttcatccatggttttggttcttactttttacaggatataggtgaagaagtggctcagatacataaagccatgatcggtggagtggatgtttcttttgattgtgtaggctttagcaaaaccatgtcaacagccatgagggccactcgtgcaggcggcaaagtgtgccttgtgggaatgggccacactgagatgactgttccactcactccagctgctgcaaggtaaataaatgagactgcaaactagcttagcttaactctttacaaagagtttataataatgacatttttcctttttatgaaaaacattgacaatacttgagcacccaattggactatacaatgaaatgacttgtgagctacacagaaaatactaagaaactctggacagaaatgaagtataactaagaaaatttgagtagtaatgtgagttaaatgtttcaagtaaaaactttaatatgtataatttcttttcttcatggttataaacagggaagttgatattattggtatttttcggtacaagaacacatggccactatgcctggagtttttaaggagtggtaagattgatgtgaagccccttataactcaccggtttggattttctcagagagaggtggaagaagcttttgaaactagtgctcgtggtggtactgccattaaagtcatgtttaatctgtagttgttatatacttgaataagcagtaatatttcttgcatatttcaaccaagtaggctgctcttaatctagtgatccttctcacttgtgtctactactgatacaaataataaaattgcctacttttttgtttttatttttctattttagaattgcttctcagaaagtgagaagaataattttagcttacttcgtagtagtggtaatagatttttctaatcagaaaccttctatcaaaattacataacacaagaacaaataagccaccacaatttagagctattcgagatgctccaatcttattttcaccacaagaataatctcttctataattctctagctgcctttacataaagactctcacccctagacattgactactcagacaaagaacaacagctactcttctctaccttattaattataattgagattgaataattcattataaattgttattttgggaatatatattgttttctaaaattggagaaagaaaatgaaataaaaggaattaattatttttttgagtaggagaaaataaataaaagaaaattaaaattagtttgatttatttatttaaatgtaatgataataaagatatcaatttaattttaattttaattttaaatttaaatattagttattgataccatattttataggagggatttaatttaaaaaaaataaagaaaaaaaataagtgaatgtttgtcatcataactaaaaagctgttttttgtttttaaaaacagaaaattattttttgaaaacaatttggcttgtttgacttgttttttgaaaacaggaaaataaagttacaaaaaataaaaattttgaaaacaataaaatgttgttttccgttttaaaaattaattcatttttggtcaatattgtttttaaaaaacactaaccaaacatgacttgtttttaaaaacttcaaacaataccaaatatgctctaagattttcaggaggaatttgactgtgtaggtaaatgttacatgtgggttttttatttaatttaattagttgtttaaatgagttattttttttaatataaaaataaagggctatttaaatgcgttaagttaggataattcaaattaatttttttttttaaatctatttcataaattaatttaaatcatctttattattaaacattattttcttattatatgaataataaaatggcctagcctacacgtaaaaaaaaaattgatctagcctatatatactatatgatgaaatagaaattagaaaataaggttaagcaattcattcatcattaacatattcaagaattggaatagtagactattattttctagaataatattcaagaaaccatctcttcaagaaacaactaaaatatttctctttcgttataaataaagttctcatgtgttgagaaatactttgattaaaaaaaaaagtaatttgcgttataacgaattttaagattatttaaaagctaattaatcaatttcaagttttcaactaaagtataaaaattataaatgtaaatcaatgaacatagaaatcacaaacttcccctaacattagaaactcattcaaaccgagtatttcttgagtttccaaaaaccgagtaaaataaccttcactataacaacgtcaattgaaatgttttcatacaaaagttacaaatatacttgattacaatcaataacaaaaatctaagtccccttagatcagaaaagacaagatctccttacttccaacgagctgaactccctttagtaattctctgaatttccttcaaacattgcagatcaacattccttcaagccttgaaaatccaataaattacaacctacaaacacacagaatacacagaaaaggatttttttcaaggcaagaatctcaagatgattctattaaagatgaagttagttagaaaaaactagattagctttttatacccaacactttagaataaccaacttaaccaacaaataatctagcttagccacgctaacaaaaagctgaacaataaataaaacgaactaaaacctagcctaacaaaagaaaaataaaagtagattaaacatatgcaccacagtcttagatgcacaactaataaagctacaaaaaatgcaactaaacagccaacagacaaaccagtaataaacataattttccataaaaaaacatgacacttataaatacttaagtataatttggggtcagcctgacccataatgcatggtgttttataaataagacttatcatgcaagaggttcaaatttttagcatttatatagcacaaatcatgtccaaagagtttaaaacataattgttataagtatctaatatagtgattcgtggactaaaattaattaacatcccaaccatgttataaatctcttgttcatttcctttcatctttctttagcttctattctcttattataatcagtttctaaaaatcgcgataaataataacctaaaacaactcaattattcactacatgtcacccttattcacctaaaataattatattacatttgatatatgggatcacctctttaggttaagataaaaggatgcatataataattttatccttgtttacctaaattttaacgatggggacgtggtaagaataacgacacgtgacacggggataccgagactggattgatgaagaatatgtaaattcatgatcgttggtgtggatcgttagtcacaaccaattgtcatgaccgttggaagagaagtttgacggtcatctttccccctagcttgagcaaggtggctgcctccaggggaacagtggactaacaccctcatagataggataaacgatcatcacacacctacggagtcaaagtagtctaggggttagataccactacccttaccttaaatataatgatatactcaaagggtggtgaagttattgtagaggtgtactcctaaacccctacatcctcatggtctaagaaattcattctcttacataagacatgacagatatagcacaccttcatgatgctaaggctatccacaacattgaagatcaagtggaaggggtctcgggggtaacgccttaagatggcgactgtcacccccttcacgatgggtcttgggggtgtcactcccaagtattggctactacctccagaggaggttaacgatcataccacactcttggggggaccctcatcgtcagtgactaattcaaatattcaaatcctgaaagaagctcaaagatggttacaaacccccgaaaatagcgggatgttatcataagaattggactttaacaacctccaaaaaccaaagaaagagttgagatatctctgcactggtcgcgtctcctaaagcaagaagcatcgaccttttctcctatatgagaggtcatccatgacttgagaaaaggaaaatttgagtacttagagaaaaaagaactcttccattgtaatcctttgcattcaagagtctattcctaattttgcaactttgattaataaaatacaaagggagtaggctaactgacatctgagtctgaagttctttaaattctggtgtcataatttacatttattgttcattttttttgtttaaatctcatttattacgactccacattggttggctaaaaatccagtcaatattttagtgctttcattgagagcttgttagtgttatggtctagtcacttagtcttgtacacttaacatcacttcatttgttagatagatttagttagttaagtttgtttttgttggttagtctacaaatgtccaacccgagcaattgtattaaaaaaactctcccatccattgttcaatttttctttagcttagagtcttagacagttggtataatcttgagcattgtccattggtttttactgccattatcgtcttgttgtaaagctcttaagctaattgatcaagaagtgaaataaaggctgagccattcttatgcaactctttctcctcatctatttttcttattttattttttttggtttagattcaaattgattcttgctactattgtattgtttatacttgatgttttatgttcttgatcctccattgtgttattgtttatcacaacaaatggtatctgagcaaggttgaaattggagtaatcaagaactgattgtttgaagaactgggcactaagaactcgatcatgaaatggcaacagcaaagtatgaagttgacaagttcacaggtgccaatgacttcagcctttggagaatcaagatgagagctctgttactgcatcaaggaatctcataagccattaatggtgatgcactcaaagtaattgaagatgagaagaaaaagatggagatcgaagccaaggcacactctgcaattctcctcagctttggagatgaagttctcataaaagttgcagatgaagaaaaagctcttggcctatgggacaaacttgggacaatttacttgaagaaattccttgcaaataaattatatctgaagaagagattatacaccttgaagatggaagacagcaaagaactcagaagacacttagatgatttcaacaagactgttcttgatctgaacaatataggtgtggaagtggaagaggaaaatcaggctatcatcctactaagttcctttcctaaagtgtataaacactttgttgatacaatactttatggtaaggacacccttaccatgtcagaagttaaggcagccttgaactcaaaggagatgcataagagatcagatgaaaagccagaaattggaggagagggactgtttgtcaaaggcagacatgaaaagaagggtttcaagggatcaaagcactccaatgagaaagggaactagaagacaaagtccaattctagaaacaacactgacaagaagtgcttctcttgcaaaaaggaaggccatttcagagatgaatgcattgctttgaaaaacaagttgaagagggaaaaagagaaggaaagaggtcaagctgatgtggctgcagatggctatgattctgcagatgtcttggttgtgtccaatgcagactctggccaagaatggactcttgactcaggatgctctttccacatgtgccctacagaagaattgttcagcaatcttgagaagaaaactggtggaactgttttactaggagacaacaaggcttgtactatacaagggattggctgtgtgatgctatagatggatgatggatcataaaagaccattacagaagtaaggtatgtcccttaccttaaaataaatctcttgtcaattggtacattagcatctaaagggtgttcaattaaaattgataaaaaatatgcttagaattactaagagcactaaaaatgtaatggaaggaagatataaaaatagccaatatttctaaatgggaaaatagttactggtttagtgtcaaatgtctcaaatgcatatgatggtgatttaaccaagctatggcatttgagg

SEQ ID NO: 44463 - DNA, 2565 bp, Cannabis sativa
ttcaaataattatactattttaattattaattaaaataaaaaactaaaatattaaataaaactaacactacgtggcttggcacgtaacaatcacctagtatattttttaaaagaaccaaagttcattagcaaagggaaagatagttggcaatcacacggagatttccctccccttgaaaacagcttgccacaagactagaaattctaacgctctttgccaaaccatccacggtagaattaaaataacgtttaataaaaaaaaaaacttacaacccaaaatatatttgaccaaatctaaaatagtgagagctataggtaaacaaccctaatctgggagacaaacattctcagttaaggaattaaccacttccaagcaatctgaaagcacatgaacattactcaatgaatatattgcgaggtttggattttcattagatattcgggacacattttttgtaaattttttccttttatttttggttggtttggaaaaaatttcaacccccaaagtaagagttggctaaaattatgtgtcacgaaaaaaacctttattgatgtgtgaaattactaacgagctcttaaagaaattgtacccaaggggtaacaaatggtcatatttaaaataaaataattcaaataattaagctcaaatatgcatgttttcccattatttgggagtaagtgtgtatataaagtcaaaacaaacgaagaaagtgcagtgtaggaagtataagtaggcttattgagagaagaatggtaaggtagccaaaaaaaaagaagaaaatatacaataaatgcagaatatccacacttatttttatgccttctatacaaggctgagaaggctacaatcataataataagaatcaccctcccgaatctatggctctgtatctagatgaacaatgcttcataagtgaatcccttaacccaatatctttcctaataattgagtgttgcagtgtcaccttcttgcggcagtgacgagtgcagcttgttgcaccgtctttatttgttctctcgagtcattctataatagcagagtgtagaaaacactgcaaaaccccgtgctttctcgacagccaatgattaggttgctgtattgtatatatacacagatgcaaaaccgtctgtcatgttctttttggtctcaaggatgctatcttgaacactcgtctggtggaacattggggagctttctatctcaggcagataaatgaaaggaatacaaacagaacagctgttcattcgaggatgacgagaacttggactagtaaaaagaataacactccatgttttgcagctggcctagactagttgaagaaatagggagattccagtacctctctaagatcaaagtcaccccgatccggtaaaggaggaaaagtcagtgatggaaaagatgtctgaaagctttccagcaactataaaaagcaaacgaaatgatcagtaagttctatatgcaaacatgttcatccacagaacatttttacttcatctggtcctactgtcatgttttcaacaaacaagatagttgtttcttaactatatcaaataagagaatgcatagctgaatacagcagagatcttctctcagatgaaataaaacatgtctagagaacaagatgaaatcttgcggtaaatgaagctcattaccaaataaaaataagctgtttaacaaatcattacttcatagtttaaagaagtaaaacttgaggactgaagctactttcctaaattagctgtctcaaaagaaagcaagttcaaccgtaacattactaaatgggggctacaataatataattttctcgaactcttgaaaatgatgaaagcaaatgaaagcataattatgaagaaatatactcacattctctaaaactggggcctcatagagttcaacaaatttctctctcagtatcctattcatttcgtcaacatcacaggcatgggtccaatatgaatcatggactcctgaaatcaaccatagataataaatgatatagcatgaatatttacatctttgtgggtttataagatagaagagtcagaaaaatgcttcaattaggatgagaagcatagtacaaacctgcaaagtttaaccctgcttttttgcaggcaacagcagtcatcatcatatgggaaccatcaagagagtgaacaaaatttgggggaaaggctgtcctttgccgtttagccattacctataaaattcacagaaggttgtgatttaaaagattaaacaattacataactagtctaaagtggtctacatgactgaagtaattattcagttgcttcctataaaactaaactatagagaactttttttccagtgaatgaaatgtacccacaacaaagttcctacattattaaaaaagaatactgcagaaagtcgagaccaataaacatgttcataaagtttgatatagagcactaaaagcgtagcatagcatcagatctcagtaagtttaaatccacatcaaactccaaatccaaatttaatccaccccctctaattatgtacatatatttttgtaaaggaacaacaaaaaacaatgacaaata

SEQ ID NO: 44464 - DNA, 1938 bp, Cannabis sativa
agacctaaaaatgaaaaaaaatactatataaattggtcaaatttaaatgtgtcatatttatatttatagtataattttttctctaaaaaatttcaatgatatttatcttaaatttgagtaatattttaaagtggttatatctgtaaagatgtttaaaaattgcataagcttgtaaatataacctaaaatactgtgctcatattttctctcactttccctctcctcggtggttcgggctccggtcagtctctctctttagtttgatcttcgctgtcgctgttattgaggttggtagattgaattttgtttgatgatgatgattttaatctgttagataataatcatttgaatatgtttgaaagaattgttagaaatttctgatgaaatgattgaatactctgtttggctgtgggatttgtttgataattaatttcatgtttaatgctccatggacattctaagggtgtagccgtgtatgaagctgaggttgatcatcttcaaataatgtgtgggtattgaatttattgcattatcggcttgacttttgaatttgaatgggttcgttcttctttgttgtatcttgttaagatgttaagctcttaatattgattttttaaaatatttataaacttttttgaaagtgtttgggtatgtaagaatgtgagtcattgttgatttttgaaaaattatcttattaaaaaagaaattttttctctaaaattcaaagctctggatgatttttcagaatattctggtggttacttgttgggagaattagcctttgcccccaaagtatgcatgttattgtctcagcgcagacggtgttttacaatgaattttcattgcttccagaagagtttctcttttgcctcatcccctttggtgccattacagcttccatctccaatgtaagaaacagtattcattatgagtcctctgaacaacattgtcaagttctagttttggttgaatgtgtttgagtcttggtgttgtgcagggaaacccatttttggtatgttttacctgatgaagtacggagtcaaagccttatggataaatacttggagcttttatcaccatgtgagaaagataatgttgtgactatgagtggggatcaactcaggaaaacggctgtgcttgctcgagctttggttcgcactaccattgctagatatgtaggttttctcatactgctgataactttcttatatgcattgaatggaggttagtgtgtatatctgagaaattttgtttcttcctagatcagaccaatgctcatgttagtccagaatccttgaagttcaggaagaacagttatgggaagcctgaggtgggtttctttttcttgctatcaatgttgtatggtggaaattgttttgctgtcttctcatttatcttactaatcttttcctgttcagtgtatttgttttgtactcttttaatattttcctatagcttgagtaggtagactggcaaattgctgattggcagccaccaccactgcatttcaatatctcgcacacttcttgtttaatagcttgtggtgtatctgcagagatgcctgtaagtgtttttttttatgttattaactgtttgaatttccttttaactttctaaattttttgtatgttgttattgtgaaagactagctttgagcaatctaatttaatgatctaaatgtagattggtattgatgttgaagagaagaaacggaaattaaagaataatgttttagcttttgctcggaggtacttttcttctcatgaattggaccatttggctgctattacagatcctgaaatccagcgtcaggagtttttaaagctttggactctaaaggttggtaagctggtataataatgcattaaatatattttattaaaatatgttgtctttattctttctgttgacatactttagaagtgctgagattgcatt

SEQ ID NO: 44465 - DNA, 1856 bp, Cannabis sativa
taagaattatggggttccatctcaaaatcaattgggaatgagtagagtagcctatgttcttatatatagctcaattattgtacaaaaacattattgttaagattattaatttgtaaactaaaacgcaataacatctcaattacataaaaattttttgtttatttatttgtgatcttttttttaactctaaatttttattattattgatttctgaaaaatctgagtaaataacattatatatacttgtaattataagcggatagatatatgcatccttttcaaatcaaagttagcatcaaagtttttaagtgtttccatattggctagctactgtatagttgatcatctatccatgaaatataagttaaatgaaaatgactatatatagttaaatgctaaatttaattatatatgtgtgtgtttttcccaagaaaacaaatctatgtatgtgaaatatatgattttagttataattttatctatatatatatataactacctaacatcgatccaacttgtatatacatagtatctgtaaactttttttaatatgaagagaacgaacaaacaagcattcaatataaatataccatccaatatatctccctgaattccccaaattaattccccctaattatctagaataataatgaagatctgctgccgactatgacccaacccccttaattagttagtatataattatatttatatacaaacgaagtaactttccagccaatcagagctaaccacgtgcacttctgtacaaacattctcacttatcgtggggtaggtcaccaccatatcttaccctatgtgtatctaatctaacccacacatatatgtctcaacacagcatatacaacataacataaccaatcgatcgagagagttgatttaaaaggctgcatttttgtgtcctaatttgatgttaccatttttcgacattaggcagattctttatagctatagaaacaaatatacagagaatataatgcatgcaatgtacagttatatgagtcatgtatatagtcaatgactttgttgacatgacacgtaggcacatttcaacgcgtgggtcccaccttccactaaatacatattcacaccccattgatgatcttccactctttatataaagctattctttcccattagtctcatgcaccattaacatctcttttatttctctctcaaaaaagcatgcaagccatagcttaagtaaagatatatttagcctctcataactcttaaaaaaacatttatatatatataatcatcattttcatttattatatataatggggggtaataataagggagaaaactacgaatatgggcctcataaggtggcaataccaccggcgaagccgtttttgaaaggactaaaatcgagtttaaaagagacattcttccctgacgacccttttcgacacttcagtaacgagaagtcatgggtgagacgagtagtgttgggtcttcagtattttgttcccatactagaatgggctccacgctacactttctccttcttcaaagctgacctcgtctctggcatcaccatcgccagcctagctgttcctcagggaatcagctatgctaatttggccaacttacctcctattcttggcttatgtaagtatatatatatatactcaatataaaattactagcaacagatcttgttaaatattattaggcactttaaaaataaagtgtcataattaagacgctatggaacatcgtaaaaaaagtggctaacttaacataataaaatatggcggattctatatattttaagcttaatagctaaataggtacaaagttatactgtactggttatttaagtattgtat

SEQ ID NO: 44466 - DNA, 1710 bp, Cannabis sativa
agattctttcaaactaaaataaaaagcatccaatctgacctaggcaaagaatttgaactttgtatgccctgtttaggactctaggcattgttcaaagaaactcttgccctcatactcatcaacaacaaggaagagtagagagaaagcatagacatgtagttgaggtaggtttaacacttcttgcacaggcttatatgcccttaaatttttggtgggaagcctttgcttctgcctcttacttaattaacaggcttcctacccttatactctccattacatcgctccctatggaaagctttttcaccaaacacctgattactacatgctcaaggtgtttggatgctcttgctttcctccacttaggccttatgaaccccacaaagttacctttaggtcctccaaactcattttcatagggtacaacatctcctctaaagtgtcatcttcaatgaggaagaatttccatacgaacacttattttgtgtttccacttccaatgtcacatctcctcctcaaatagttgacttgaatgccttccaagttctaacatcaagacatgttcaagcaccaccacttgatcctccaaactctctcagtccatcccctcccccacctcactccccaaatgtgtctatcccacactcagtctcaaccagtagtacttattcctcttcgtttgcacaaaataacaatgtctcttccaacaccaattccagtaccatacctgctcaaaataacaatcaacatcccatggaccaaaacatggtatcttcaaacccaaaacctttactgcttatactaatcaagatcaagaacctacaacacttaaggatgctcttgccaatcctaaatgaaatgttgtaatggatcatgaagttcttgcattaaagaaaaagaaaacatggacattggttcctagaataagtgacatggttgtggtacagaacaagtgggtgtacagaataaaataaatgtagatggctatgtagagagttttatggaaaggttggttgccaaagggtttcaacatacaccaggcattgatttccttgaaacttgcaaccctgttgtcaaggcttgtacaataagaatcatgttcgctatgtttgtcacccatggttgaggaattcaacaaatcccacatcaataacttcaagaggatatttgtgtacatggcccaaccacaaggatttgttaacactgaacatcgaaatcatgtttgtaaattgcacaaacaaatctatgatctaaaacaagccccaagagcttggtttgacactctcaaaggcacattagtttagtgggatacaaaaatagcaaagctgatacaagcctgtactttaataacatcaatgtaaagttaacactaattctagtctatgttgatgatatggtcatcacacgagctgattcatctcacattcaacatttaattattgatcttcaaaaagcctttgctattaaagttcttggacatgttcagtatttccttggctttcaggttaaaagaatagcttctgctcttcacttaatgcaacaaaaatacattagagatcttttatccagaactcggctccttgattcaaaaccacaatcaatcccaatgtgctccacaaccaaactcattgctaaatcaggtgttcctatacaaaatccagccatgtacagaagtgttataggtgctctgtagtgttggattttgtgccctaa

SEQ ID NO: 44467 - DNA, 1721 bp, Cannabis sativa
gatgccacgtgccacgtcagagtgccaaatttgggataacacatagtaagtgtaatttcctcttaatttaattgggaaatttcatttattatgtctaaagaatatctctattacaaaacataaacccctaataaatttatactgttttattctaataattaagggtgttcataaaatagttgatccaatctaattcgcacaatccaatcaaagtgaggatattcacacttgtgcagatttaattagattgaaaaatttaaaatccgcacttgtacagattggatgttgtttgatatgtaaaagtaaccgatccaatccaatccacacatatttataaaaaaattatatatacaataatattttaatgtaagaaaatagtaatttaaaagtctaacacatataatacaattatattttaaaacttttttttgagaaaattatattttaaaacttaatagatcaaatgtatactctattcttatatataattttttttttctaaatacaatttaaaaataaattaaatatttctttatacatacaatatttttttcttctttgaatttattatttgttattttatttattttaattttatctgggcgagaaaataaccctctcataacaatcagtctctgttgaagaaaaaaaataaaaaaaatgttagaatcctatcgaaaacatatcgacaaccaattaaaaaccttttaacaaataatcataacacaacagagggaaaaaaactcaacttatcaatgatatcacaaaagttaaacaatacaataataacagaaataaaatataaatgtgaaacaaaaaatacaatactaaatcctatcgaaaacctgctgagaataatcaagcgagaataactaacataacgacaacaaaaagaattggtttcgttagtgtgtttatatttttaaaggaaaattttcatggctaagttttaaagaatcttcttaaggaagtttcagagtgtcttggtgaccaagtcgtcttagtgtccaaatttattttcctataaatatgtgttcttacgtgtgtttggaggaaaaaaaaatgaattgtgaaaagaaaagtgagtgtaagtttgttgtgtggtgagagtgatgaaaaagaaaaatgtatattggggtttgggtggagagattgagatagagagtatatataattttaaagtgataagtacaatatgtctctcttataggtttagtaattctatcaaaccgaataaattgatttgtttcgtttcttcattattttgttgcgattgaagtttattattttttctaagatgtaaaaacaaaaagtttatatatataatgataatgactcaagcaggtttaattggtatatagattatagtcatagaattcatgatgtcactactataaaaactccctttagaggcagttttttagccctttcagcgttggttttggcaaaattcactactaatgttgatcagggcgacgctaaagggttataaacaaccaacaccatatatacctctatggcatcggttattagctaagaaccgatgccataggggtatatatggcgtcggttcctagctaataactgacaccatatatggcgaaggaacttacgccatatatgaacgtttttcagtttttttaattttatttaatttatttaaattacatatttattaatttatatattattttatttgatttaaatttaaattacatatt

SEQ ID NO: 44468 - DNA, 3524 bp, Cannabis sativa
ttataaacgtgtcacgtgtacaaaagtgcacacataagcagtccatgttgacacttaactgtgaaaaataatttatgttttcaattttttttttaatcttccaccctctctagcttttcttatttattttttctttatttgttttcacatatttaacattacatagttatattaaaatttatttttattattgttttttttttttttttacagttgcttaattgtaattgagggtgcatttgtacttattctagagatccactcatcatcagagcttcatcctccaatattagtaactagttatctaaaatataaataattgattacttaagatactatagttacccaaaatataagtatcttattagccaacatataattacctatttacctaaaatataagtatctaattacctgaaatataagtattttgttaccaaaagtataagcattcaaagtataagtatctgattactcaaaatataaataatttgttatctaagatagtacctagtcacacaaaataaagtacttgattacccaaaatataagtatataataagccaaaatatgagtacctgattacccaaaatataagtgattggttacccacgatagtacttggttacccacaatataatataagtagatggttacctaaacttaagataatatctggttactcaaaatataagtagattgttacccgagagtatatagttatccaaaatataaggagatggttacccaagttaatatctggttacccaaaatataagtccttaataatccaaaatataagttcttaactacccaaaatataagtatctggctacccaaaatatatgttactggttacccatgattgtacctagttactcacaatataagtagacggttacccaagataatttttggttactcaaaatataagtagattgttaccaagagtactcagttatccaaaatataagtagatggttacccaagttaatatatagttacccaaaatataaatatcttgtcactcaaaatataagtacatggttacccaaaatatatgtaattagttacttaagatatataaataactggttaccaaaaatataagtatcaagttacttaaaatgacggtaactagttactcaagatagcaatttgttagcaaaaatataaaagaattcatagtcataattggttaccggtggtaatatattattttgtgtgtcgagaatatcacacacacacactcaaaaaaaaaaaaataataataatactttacttcaaaaaattgatgtagtgtaatttggaacctaactttaaatactctattagaaaaattataaaaagatatatataactgagtactcacaaaatcgtaatggttggcatcaagatttttttttttttaaaaaaaattatatgaaaactcaaaataaatagttacttttttacaaaataaataaatagttgcttaatataagtgtagaaaaaaaataattcaaagaaatcaattcattcagttaaattaaaaacaaatagacttttttacacatattagaaaaaactatggagaaataattaattaatgaaattacacatgtaaacaaataaaattacacatgtcccaagttcgaatttctgtcttccaatataaaaaaaaaaattaaagtttactttaaaatattaaaaatataattgtgtaaaataagaaattaatgttcaaaattaaagtctcttctccaatttatcaacacaaatgagagttaatttgaggttttgtcgagcagcactcttgaaatcataggtacaagcatgtgtttcgggcaatcgatgacagccacagtagagattaccacaacggcatgaaaaccctgtcaatccaacttttttattgcaatccttacatctattttttgtaattttcaaatcgttgaattgatcacaaagagaattagtaatagcatcattctcatcagtagtattaaaagtcggagtagtaatactagtaatattattactcaagtgaatattagataaagatttacatattatttcctccataataaagtctttatagcacttagagcacatgtttcgattctcaacccttccataaaatccacaccctttaacacaaagattaaatgcatcatccatatccatggtatcacctttgatttaatctccttcttctttaatgattgattaatctcttcactaagcttacttaatttacgttcttggataagtttaattttgttctatgtaatatgtatatttatagaggttttgcgctaaagatctaatttgactaggactataaatacgtgtgaaacaatcttacatcgattagaattataagatattgctaattataagatattttattaaattatatgtataatattgttaatagtatatatttatttaaagtaatttttttaaatttatgtcacatctaatatcaaaacacttgatattttaagaaagaattaaagtaactatcttcgctttttttaaggttgggacttatctgtgaatattttattttgggactaaaagaagatatattaaacgcgcgttttgatttcttcttctttgtctccgatactgagtctcatgaagggtggtggttcggcaactgagttcgcaactcggataagtcgagctctaatcgccgcttccaactacacaaagccaactcgttcatggagtccttccctcgagcacacattgcaccgactcggttgtcggaactcactcaccccatcactcgttgcccgagtcatcgaccccttccttctccctcaccactcacttgcacttggattcttcaactgggcagcccagcaaccaggtttcggtcacacttccataacttaccaatcaatcctcaaatctctttcttgttcccgccaattcaacgctattgatactctcctcaggcaagtgaaaaaccagaaagttactctccattattctgtttatggctctgtcattgcctcgtttatatcaggaaagaaacctaaagacgctttttttattctaagagaggttagttctattattcaagatataggacccgaaatatgtaactctttattagctgctttagtttctgatggttattttgagcatgctcagaaggtgttcgatgaaatgtctaaaaaaggtgtcccttttacgactctaggatttggtgtgtttatatggagaatatgtgagaaagctgaattgggtgttgttttaagtgtgttagatgaggttaaacgatgtgagtcaatgattaatgggtcggttatagctcttttgaccgttcatggcctatgcaagggttcaagagtgtcggaggcattgttccttttggatgagctaagaagtaggaactgtaaacctgatttcatggcgtataggattgtgtccgaagcatttcgatcaacagggaatgtgtttgagacagagaaggttttaaagaaaaagagaaagcttggggtagctccaaggactaatgactatagaga

SEQ ID NO: 44469 - DNA, 3328 bp, Cannabis sativa
taaacttttggtgcaaaaaaaaaattatttcattttcttagattctattttctctactatatcaaaaatttaccaatttgaaattaataaaaaaaattaaaataaaatgaaaattatacattggttacaatacgagaacttctacaaaagagagaaagaagttcggatgcattattatattcaactattctaaaaaaacatattattcagttaactaatttaatagattcatattatatatttcaagattttcttgttgtgttgtttttataaaaattaaacgaaaaagaataattttttttctaaaaacagtactttatctaaatttcaaattaataacaaacaactaagagaagcatccttaacacaaacgaagtcaaaggtacaaaatacagaacccaaaacaagatatccctaacttaatacaagtaaacaaacgatgaaacacaaattataggccaaactaaaaactgcgtaacaaactccaaatccacatgtcattacacaatgccatatagttccctaaactttggctcagcaagagcagagcacagccattcaacctctaacatatttcctttctgggctaccataaggtgacctcgaccggtccctccttgatggtcttcccccgtaaggaggaggagaagaatgtcggggagaataatactcacgaccccctcgatatggtgagcgtcttggagacctaccacgatatccatagtcatcacgacccccacctccacctccacctcgatacctaccgcgatcaccaccacgatccctgtcacggtcactaccaccaccaccgccaccacggtaacctgttcaccaataaaaattaagataacaaaactccaatgtagtaggttgatcaattgttgataatgaaatagaatattgaacttaccgtgatctctggtgcttttcaacccgagatagtggccaggcgttggagtccttgcacgtttccttcgagactgaaattcatgaaagaaaaacttgatgagctgaaaactcacaagtggattaaataaaaggaaccgagacaaccatggtacatgcagactatgtcttaggagatcgatcattaactctaggaaaaattctataaatcattaaaaaaaaatggggctaactggcatcgaacacaagtaaaaacattcaggcacatattactagtgaccatgaaatgaattccaggtacaagataccataaagcctgattagaaagttgttgctaatgtccgttgattagttgagttgaaagttgaaagttgaaagttgaaagtgaaatgctgaggttgtatagtgttgttggacaatatagttgatatgtttagttgatcacacgcattggtaaagctgtttaagcttggcatttgatcaaagctgtttcactaaagttgatatggatgaactcatcatctttgattgctgccaacatagctgacgcaatgtattctgaatataaccagaaaaccttcaagtcaagaagaatgaaaactactcgatatgttggaacccctttagccactaaaggtggaaaatcacattaccctttctaccgttatgtatcggccttctagaactgattgattgagatacttgatgcaccgctcagcatcgtcgacgttgtccattgtaacaaaggcaaaaccacgggaaacacgtgaccgaggctccaccactagaaaacatgaagcaacctgaaaatgaagcataagttaaagaatgtcaaaccgagatcattatcgagtgtataattaagaaaaaaatgccttaaaaaaattgaagacataaaaaaaccaacctttccttctttggagaagtggtcttcgagctccctttctgtaacccttgttgaaagaccagtcacatatagtgtatttccaggatttatagcttcaggtctgacacatgaagataaacacaaaaacttgtcaaacacaataaagttgtacaagaccctcttagtatcaagaatacaaagtactaaaatttacctgccaggacttctggaccttgatctgcggcgtaaggcaccaaaaattcagcatcatgagaaaacatgacacaaaacattactacaatatttacatcatcccattcatgacagagacataaatagtaaaaataatgtactaaaacccacctgccacggcttcgagattgggatacaggcctcggccttgaccaggatcgagatcttgatctagatacaggccttgaccaagacctagaccttgatctggacctggatggagctctccgtggtggggaaggagaaggtgagatcctgctttatcaaaagagtagaagatataagatacaaaattaagctgaaaagataaaatcaagataaataatcgtttccaaaaactgatttgggctaaaactaagaagaatgaaaaaataatttgctaaaagaaaactcattttctccaaattcaagtttcatttctcttctaaagttcagaattttccttagttcatatacataatctttaaagaaacagcgacaagtatcaaactttaaattccaagcttcaaactttcaattgttcaaaacaaaagaacctgtttttcatattgcccactttaataaaatgcatgatctaatactccacagcacaccaaattgaacccaacataaaagggaaaaaaacaataaacggcatgaaattcaaaaaaatgatgaaatttaaaataaaactggttgaaatattaccttttgcgaggaggagagtcagcctgaaaaaaaaaaaaaacaaacaaagatcgcattgaataaataagatcaagcttaagccctgattaacattataagaaagaaaaacaaaagagtgaagagtagaagaacaaagaaagattcgatcttaccatgttccgaaaggggagaatcagaaatggaagaattagggttttggatgaaagaagcttcgaaagagtaaacgaagaagttttcgaaagcggaattgggtatttatatggtcagacattagctatgtcgtttcccaaaaatagatttaaacgacagttaaaataatgtcgtttattttataaagatgtacagaacggcatgtagttttaaaatggatatctggtttatttgtttgtttgttgtttgtttatctggatttttgccgcttgaactatcgtgaattttttagcctgttaaaaatagtctttgaactgtttacacggttgtaaatttatttttctattgagttttaccccacgtggaaaataaaagaatgagatagttacttaaccaattatcgtcagtgacatatcaatggcttttatctttctttttactgataat

SEQ ID NO: 44470 - DNA, 1514 bp, Cannabis sativa
aactctgcatgtgaagatggaaaatcttgagggagcttacctcagtttacgggaacaaaattccaaggttctagaagagaatagatctttgcttaagaaacttttggaccttaaggaggaaaaggacttccttgcagaggaaagtgatgttattcttcacgaagcaatatctctgaacactctctcattggttttggagagctttacagttgaaaaagccacagaactaaaggagctttctgagaatttgaactcactctgtaaggttaacagtgatatcagggaggaaagtagaatgctgaggcagaaattggagaataaagaagcagaaaatgcacatttaagtgagtcggttgaaatgctgggcaaggagttgcatgaaggaagagacttgaatgatcaactaagccttcaacttttgactgaaaaggatttcctagaacagaagacagcagagctctcagaaacagaacagaatctaaaggttactgaggacctgaatgtgaaattatccaagactgttgaggaactgaagatggaatgtgaagagttaaaattcaacagagatattcttgcagaaaagattcttgaagtaactgaagacagttgtaatcagaaaaaggaaatcgagaaccttcgtggagtgaatgaaactttagaagttaagatgggaatgttatgtaaagaaattgaagaatgcaggatcaaagaagaaaatttaaattcagagttgcaagagaaaagcaatgattttgaactttgggaagcagaggctgcatccttttattttgatctccagatttctgctgttcgtgaagttttgcttgaaaataaggtacatgagcttattgaagtttgtgacaatcttgaaaatgaaagttctgccaaaagcttggagattgatcaaattaaaaacaaagtaaacttcctggaaagccaagttggatgtctggaggccaagttgactgcatatgttccagccatagcttctttgagggagaatgtaacatctcttgagcacagtgctcagctcaaaacgaagcttctagccgtaggcaatcatgcacaaaaggtaacaatatttcctctcaaaacaatacagaaaaatagaatattctctcatcttgggtttgatctgtttttccttttatgggctttgctaattatgtacatacatagtagtcttccattttgtactgctaagttattgatggtaagcttgttttttatgctgatatttattatgaatgcatctccagggtgtgaaaacaaatcatctttgtgaagagagctgtgaagagatcaaagaagacaagactgttgagatcccggatgggcttctggatctgcaagaaatgcaggattctattaaagcagttgagagggcaatggtagaagaaatggaaaagctttcagctgaatcaattgaaaaggccatggaagaggaagtggaaagacttgccgtgcaggactccctgaacaaccacatcagggcagcagcggaaagtgaagaa

SEQ ID NO: 44471 - DNA, 2619 bp, Cannabis sativa
agtggcactgccaactctagtttatagaaacaatccctgcgagtaatttgaagtgcagcaagtaagaactatctggagtcttctcaatattcatattaatattaagaaaagtaaattattattgaaaagaagcgttggaattatctattttacaatttgcgaacaaaatttatttgttccacaggttgcaggtgatctgttgaagcaatacaaggagaagttccaaggtgggactttcacagttacgtggaactacctgaaagaatccatgaacacatacttatctcagccaaatcctgtaactgctcggtgggaaagttcagaccatttgcgagatcctaagtttcaattagatgccttcagagtgagtattatattacattatattatctaagtattgtaatcaggtataaaataacttttgtctaatttatattgttccagtatcgaacatcacggttgcttcaaagtgttgctgtgcgactgcgtaagcactctaaaactctagggggttttggtgcttggaatagatgcttaaatcatcttttaacattggcggagtcccatatagaatctgtcatccttgctaagtttattgatgcggtggaaaggtacttcattaactcaatgtaggaatttttctgatgttctagctagttggcttcaatatttttacaaattttccatcgctgtatcagctgtcctgatccaagctctcgggctgctttgaaacttgtctgtgatctgtatgccttggaccgaatctggaaggacataggaacctaccgaaatgttgactatgtagctcccaacaaagctaaggtacgtctaaattaatactccaattgcagaacttaaagatcgagaattgttgaaattaataaatcattctcgtaatcaacagttctgttttagttaatactagaagtttgaatgttaaaaatatttcattatatcggtctgtggaagctttgtaacttgtacttcagaattttgacccttaaaaacatgaatgtgtattcaggcaattcacaaactatcagagtacctgagcttccaagtgagaaatattgcaaaggaacttgtagacgcgtttgatcttccggatgaggtgacaagggccccaatagcaatgaaatcagacgcttatgctcattacacccaatatgtggggttctgaaccccaaaatacaagcatcaaagtagatgtttgaaacaatcaaaaggtggtgagaacttgcaacatgggagataatgttatttctctttctcccaacaaagatatggacattccccaaaaaaaaaaaaaaaaaatccacttgtgtttattacatagaagagttttaatagttatgttttcataataattatacttgtgttttgtaccattatttgtttggaccctatgttaaaaaaaaattaataacaaaaatagatcttatgtgaaaggatttgattttgatgacaaaatttcagcatacttttgataacatttgacaaataattttttataaaccaattaaaaggattaaatgaaaaacaaattatgatagttaccaattaaattgtaacacatattaattgaattatcattaactatttatttttgagatttttacataaatattgtatttttttcaaagtttatatttatttatattgtgctaagacatttttatgtactttattttttatttttactatttttatatttatttaaacttcttagtttcttttttttctctcttcttttcacttttttttttctcttctatctctcttatcttttttttttctcactattcttttttatttttatatataataaataccattagcttaaaatttccactctttattgtaattataaaaataaactactttcttattttatttcttgtagattaaggaaaactattttttttttatgtaattactcctataattagtaatttaatctcgctattgaaggaaacaaaagaattcaaagagaaaacactcaagagtgaaaactcgatctaagagtaaattgcttagagatcattgtaagaactttcgagagagatcaaagcattcttgctcattcttttcacaagtcaatacaacaaaaaagaaagtaggctattatcaactataaggggttaaacatctataagttggtattttctttacttattactctttgaaaactgttatttaattattctcatcactttaatttagacttaccgtcgttggctaaaggcgaggttaacaacaccttttcttaaaactttttaacactctctcttatatgattaataaaagtagttatcttttttttaaaaaaaatattttgtggtttattcaaagttaatttatgaatgatttgcatgttgcaacgaggttgatgtcttatcattttttttttttttgtcgctgctttttttttttttatatagttgtttttatgttattattaggtgttctatagttgtttttatgtgtttttttattgtacaattatttttcagtttatgtgcacttattatggtgtatatttttagtatattccaaataaaaacttattgtatctttatatattaaaagggcctatctaacggcatttcttggtttaac

SEQ ID NO: 44472 - DNA, 1677 bp, Cannabis sativa
  modified_base (570)..(590): a, c, t, g, unknown or other
ataaatatatatttatatatctcactttcattcacaccccaattttcttggactaatctttttaggcacaatttcagccaatgctaaacattttagataagaaaaggttaaatttaactaactttttgtgatatagcattaagcacaaactttagtcaaatcaatatattatattatatatatataaatatttatatgtgcatacacctagtgtaagtatgtaagtatactatgtatattcgattcaatctacacaatgacatcataattcaaataaaaagtttgattaaaattttaaatatgaatacaagaaaaatgaaattgatcgaagtcattaatttcttttcctttttattaattattatttctttgtttttttttcttatattcttttttgaatggttattatctcttcatctaattgggccctacaaaaggactaagattattatttttttttcttttttaaatgagattattcttttcaccatatatataagggtaaataaactctcaattattattattattattattattataacaaaataataataaaaataataatannnnnnnnnnnnnnnnnnnnnataatgataataataataataattgaagaattaggttggaagtcactattatcgttaggtaatttattaatggttaaatttctcgggtaaattttattttctaaagtttaatatcattatttttaccatacaaaaaaaatcattatttttaggattgtcagtggttaaatcattattgttattcctttaaaaaaatatgtatagacttattcttttagaaaaataaactattgttgagttagaactcaacatattaaataaaaattatattataattatatgtttttgagaaattatatatgctgtacttctaaaatgagtgtacatatatgtgtactttagtgttttttcaatgtccaaattattttaattttaattttttttatatgaatacattgtaattaattatttaaaaatttattataattttttaataaatttaaaataatttaacgtgttaaaatttaaatttaaataatttattacacgcatgtaaaataaactatttcaatatgaatataatagttagaataagaaatattgtaatatattttatcttaatttttaggattttttttcttatttttatacttcaagtagtttttttttttatatatgtatatatttatgaaaatttacatagcaactaataaaataacttcaattacaatttaaatttatatagcaattcacgtagaaattattaaaataactaaaaccgtaaaaatgaaagaaatgacatatgggtaattctttttttgaagagaaaaaagaagaaagtgttagaataagaagttttggttgatgtgaaaaaaataaacacttatgtggagtggtccacactatatgaaagtaatgattttgtagcctttaacagtatgacacgtgtgagttgagtttagctaaatgagttagaatttgtttttggaaattaataagaagagagtatgactattatgattgatgatgatcgagccttattggtgtggattggtgttgcctcctttgagacacttgacagtgcaacctttctaattctctaactaccaccacccaatgaggtgcctacccagcccaaaacaataac

SEQ ID NO: 44473 - DNA, 3740 bp, Cannabis sativa
aaaaaaagtggcttccttacgaaaacatcaaattttatttatgaaaatgatgaattgaagagtggtagtagagcacatttactaatcaagctcgtcttccttgtgagtctgaatgacaacatcagagagaggcaaagcaacacatgtgagaacccaaccctcagcaatttgatcatcatcaaggaagctattgtctgactggtccactttaccttcaaccacctttccaacgcatgaggagcaagccccggcccggcatgagtatggcaagtctaatccctcttcttcggctctgtccaacacgtacgtgtcttccgggcacttgatttccttatccccatctggtgtaatcagcttcactttgtatgtagccatggctgtcacacgccctcctcggctagcctttaggccgccgaaaagggattgtcccacgttcggaaccgcccttagggaggttgccgttggctgtctccttacaaaggaggtgttcatcatggtagctgctgctgctgttgttgaggccatctttttggttgatagtcttctctctttggtgttttggtggccaaaaatagaatgtgtcaaagtttttgagtgaggcttgtggatgttgtgtggcaatgataggagagagtgtgcactggcatggattctatctgccacgtggcagcatgctagtggtttttatctttatctagtatcgattatcatccactgaataatggatatcacatgtatcaatcgtttattacattatcaactcaacaagatgtttttatcaacttgggtaataataacagttatttcagatagatgactgaatctcaattgcttggacaaataaaaacccaaccaaatattttaggaaaaagggacaaaaattactcatcttcattttcttttttctttaccagtaatgttatgaaaacaacaaataaaaattactctccccaattgacatgccaatttaaaagatgttatagagaaacagagaacctcccaacgagatgaggtatcacattatttatctcctaaaatcttagaaagtgcaaaaataaccaaccatatatcctagcacaactaaattaaattaaaaatgaacaaaattgtctaaagatgaggttttaaatgggtgcaaagaatttagaagaggtacaaaagaataataattgcacaaagtaacttacattgacacagaagcacaaaaattcatttggatgtcattctctcccccttttaagttcatacattcctaagaaaagcatatagcaaaacaagagtatcgggtagagagactagagagagacacagtagcagtgtgcttacatggagaacctatatgtaaaagggtccaaatataaagaagtaaaaagatgacagtctaatttgctaattttcttaagagtatagaataatctcataattctaaattaaggctttcacttacagccggggaaaaagaactgaagttaaaaaaaaatgaaacaaaaaaaaggaggaaaatctcaaggcttccccaaaaccagagaaagaagaatacatcctcatcctaatataacaccatcctttcaacctgatgatactctgtggcttcttcatataagaccgataatcgttcctctccaactgtattttatcaacaatgcaattcaggaagctctatcaggctgttcctcttcaagaaatcttaatcacacttgatgtttctgtagatcctcctcacaaacaaatttgagccgagatagccaacagcacctataaagtaaataatcagcataaatataaaaccaaatttatatcatgcattgcctctcatctaaagcaaacaagcttagacattggtaccaagtgtctgtacatctatcttatgaataaggacaaaaatgtgggggctgattttaccatgcatacaaaacattcgataaaattaattaaaagattcatatgcactaattagtattaacccactaaatgtgccaagtttacttgagttactagtaatgccaaagataatagcacggaacctaaatagggactaacaaaaataggcaccatccactgaaatcaatgggaagtaaagtgcattaatacaatcaaatgcaaaaaggaaatgtgacacaaaatttgatgacaatttaaagaactcaccgcagaggattcccaatccgagacaaaacatcatagtgtatccaaaatagaagctggtctggaagaagccagacatttttgtctttacgtagtagtaatagattgaatacaagtacacatacacggctgttgaagcagccgaaaagaaagaagtccattgccagtgatagttctcagcattcagcaagaaatatgtgcccacaattgtcacacaaacagtgacaataacgagaatcagaaaaacgagcagcataaaaccataaacatagtacacctgttgaccatacagcataaagacaaaatattaggctcaaggatgcattaaatgaaatttagaaagtggaaaacaatgaatatataaagccctaatgataataaagttcatgcacagttgtgttcattcttcatttcatatacaggttcttcagaatatttagtttattagttagcaactaatatctgcccctcagaacaccgctgcactatgtataaatgactctttccaacgagaatggagcaatgattttgtagatagagatcaaatacttgtaagtaaaccatcttaactaaataccccccagtactttttctgacaaccccaacttcaacatgtaataaataaaaataaaaaggtacatcaatctctgaagaatatatcccaaaccttactcgctgtacaaatcttactcttaccagccagccaatcattggaagtccacaaattttgcacaaggaaactctattgaaaactaaaattttgcatttgaatattactttatctaatgatactttaaatgagaatatttaattaactatgcaacaattctggggcgcaccttgtaattccagaatgatgtgaagacgaagtacatctcaataaatatgctgccaaatggtagaagtcctcccatcaatgagactacagatggtgtcaagtaccacttcttctcaggaataggtcgaggaatggtcttaactctacaaggattgttaggggcaccactccaatttcttccaacaactgtaccaagaagtgccaaaggaaaagagatgaaagcccaaatgacaaagacaaccaccattgtgccaaatgggatagctgctaaagacccgtagaaaatggcaattgtgttcaagataaatccaatcccaaagcacataaatggaaatagggatgctgtcagaatcattgactttatccagcttttacctgtcaatttttcagaagttaaataacaagaaaaggccaaaacagattcacagaatcagaacaaccatacaaaacatgctacagaagcattaatagaaatttttaacatcattacatagctagaaaaaactggttaaaaatcaaatataaaagtggaccaattactaaatcttaccaccatgtctcgagtacatcccaccacttacataaccagaaatgaatgacgtaagagcatagcatactatgaacgttgtaacaattgctcctctcctgaaagaccaaaaatgagtaagacatacaagactaggcaaatgctcctgtcatagttaaaccaaaaggtcataatataataatgagattgatagaaaacatatcaagatgt

SEQ ID NO: 44474 - DNA, 1362 bp, Cannabis sativa
tagttgtgcaaatgaagatattgagttcttttgtaaatcaatgtaccactatagggttaggctgacaaagttggacccaaaccctttacacatgcaagcttcatgcaagtcacgaggaattgccgtcgtgaacattctttatttatattgtgcgatgtgatcgttaggattagtcgttccatcaaattgtttcatggttggaaaattgaactttcgcgacatctctactagggcaattacatccaagaagggagagttagcaaagttgttgggtaaactctttttgattggtgttggcactctggggatgcgatggatcagggcctccatctccgccatcctacgtgctaaccctaagtcaaaagtgttctcatgtggcattgttttccctgcaattattgaagtagttagaaatgaatcagttgcaattgatataggacatactccccccgtagactggtgaggttgacccagaatgttgaacatatcagcaaagtttgtgtcaattgacatcgggagagtgacaccttcttgttgtcgactggtgtaccactctgcataaaaccagacgtcatatttgttgtagctagaggtacaggtgggttaactccattggtttgagatggaatgtcgaatggagtgctactgttggtcataggaactctagtcgacgcatgatgttctccaattggttaacttcctctgtgctgactcattgagcctaccattatcgattatgggaatacggttgtttgggtcacattcattggagtcaattccaatgattgcgttgggttgattggaactctgaactgtgactttggtcgagtggagtggccatgttcgttgacattgactccaacttctctttcaacatcttgtttttcttacggaaggtttgattatcctcttcaagtgcttagactcgttcagcattctctcgcatttgagtcatgagttgagcagcttgagtgttgatgtcgatctcccattcctctatattttccattgttaaatgcctaactttgttgttagattgattgtcagggccccacggtgggcgcaagattgtagacatatggatctataattgaattaatcgaaagtgggcaccaacaacctgcacacaacaaaagggaagtagaccgtaaagtctttgggacaccgggatggtgccagctaaagggactccgatggtcaagtcagtaatgcagttcttaacaagtagactggaaataaattctaaaatattgtaagttgttaatgaagattctattataataatgataatgctataatatagttcattataatcacaaatatatataaaaaattatattatataaaacttttattttctat

SEQ ID NO: 44475 - DNA, 3878 bp, Cannabis sativa
ttccatcttctacccgtggaagtcagcgacaatgttgttgaccgagctattttgttttggagaccacatggtggtgtttagtctgctcgcgaacgtcttaaaggtaataatgacctataattcaagattcaactcaaaattatttggtaaactcctttccttttattttcttcaacaacaacaacggcgaaataaatctctcaaggttgtgacccatgatcgacaagtgtgcttgactatttgccatagaagttcgtaatgcgtcgataaaaatataactactataatggcaactgcgacaaagatataatgtatgctctttgaatgtttgtctcgtacagaatcacaagggctgcacaaaaagttacagtcattgttgcaatagaaaggaaaaggaagataaggcctgccattagttttgtgggcaaggatatgagaacttctttgtgtctgcagcgagacgtgagaatggataagaacattattaccgaacatgtggcggagaagagtgatatagcatcgaatgcgacaaagattgtgaacaatctgttgtgtaagagtatgggactgccggcccttatgaggccctcgtccttgtctaggctaccgccaggaacaattaatgccattccaaacattatggtaatgatgaaggaacccaccaaactacaagcagtagctgtatccttcatccatttttctcctgcgctcttcaattccttgtgttccttggtaaacaactcctctgcttccactacatgatgaggaaacactgtagacttttgtatcacctcctacattaattaattttattactaaacatggattatttactaacacaaaaaactttaaaattcaaataatatctaaacaagagatgcatatatacctcgaaccattctagttcacttttcatttgtaaagctggtccagggattttactcaggtgattagcaggggccaatactgctgcatgttgtaatatgctatacttttctccaattttagtcacactgattgtatttgtaatcgcatttctattaggaatcctttgtaaaagagaaaatatattacgatgacgatatttaactgccacattgaaaacaccataagcaattgggtggcgtagaattgaaggatttgccttatttatagtttcaaaaacatcaagtaggcctcgtcgagcaacttcctccaatgccttatctacctttgccatcttcatgcgcttctcctgtaagcctaccatgtgtttgtacatacaatttagaatcgccaacgtacggtgatgatttagtttcgattccctcaaaactcttcttcctatttagatgagagcaaatgtaaatacacatagacttaggcaaaagaataatgcttatataaatatatttatgatcatgcatataccagtgccattaatattgaatgaagataaagttttaaaattttgattacttatccaaaagtattaaacaataataaaataagttagcacctcatattaaacatatgtacactcctgggattttagtttgttaaactacaccattcgcgataggaagattacctgtatctccacagttcggagcaacgacatgttcgtggttgacagcttcggggttctcaccaacgaattgctcaggttcgggagcttcgaggatctgaacaaggccctgagcaaggttctggcaaagttcaatgccttgaacagcgttctgggaaacttgagtttctctgagctgtctatcaaggttctggacaacattgactttacgagaaaaattctgagtttggaggttctggataaggttgtggacttggagacttgtaacaagcaccgagctacgttgaacaatagcgggttcaatgcgttgggcaccttgaatcattaggacgagggtacctgcatctgcgagatatctaattctgagattcgtagcatagttcaaggtatcgttgacgtcctggtgaagcctctgggaatcttcaatgttttgggcaaggctttcggcaacgctttgggcagcttttaagtcctgagcttggaggttttggagaaggttacgggcatttgtaagattattgacaatcatttgggaagcttcaatgttatgatcaaggttgttggcttggaagttctgggcaaaatttttggcaaatctctgggcaattgtgatgttttgtgcaagggtttgggcttggagttttcgctgtgggaggttttggttatttgccatgttctgtgcaaggttttgggttaggaggttccgatcatttgtgatgtattgttcaaggttttgggcattttgcatgtctatttgaaggcgatttaggtcacccaactgattattgagattctttttgttttcggcaagtttatgggagtagaggttcacgaggtcctgggcaagattcccagaagcttcaatgttctcggcaaggttatgggcatctttgaccttgtgggcatggcgtatttgagcttggtgtaaattgtaaaagttaggttggtctccctgggcattggggagataatttggatcttgggcatggttttgtccttgaagtgtgaaagaaaggtttgcagctaagagatactgagcaaggttctgggcaacttttggtgtagcttcaagtttctggagaatgttttgtgcaactctaacgttttgtgtagctccatgggcaaggctttgtgtagcttcaaggttttgtgcaacttcatgggcaaggttttgtgcagcttcaaggttctggtgaaggttttgtgcaacttcatcagcaaggtattgtgtagcttcaaggttcatgggaaggttttgtgcagcttcaaggtcttgagcaaggttttgtgcaacttcaatgttctggacaaggttttgtgtagcttgaaggttctggggaaggttttgtgcaacttcagcttgaaggttctgggaaagatttagtatagcttcgagattttgggcaaggttttgtgcatcttcaaggttctggaaaaggttttttgcatcttcaaggttctggacaaggttttgtgcggcttcaacgacccgggcaaggttttgtgcagcttcaacgacctgggcaaggttttgtgcagcttgatccacgtccggagcatggtgtatgactactgctctgagattttgggcgaggttctgtgcaaggttctgggcattttcaacgttgatattggcagtcaatgcattgcacgacatggttatgggcaacttcaatgttttgtctaagcaaattttgtgcatgcaagttttggacgaaaggcaagttacggacaacgttaatgcttggaagaaggtatctggcagcttcgacattcttttctcttttaatattttgaagtaagatattttcaactcctgtaatttctatttaagatgaaaatgaaattaaagaaattatgaattgatttattattcattgtgaaacattctatacaataatttatccaatatactagtaagagttaatgagaggaaaaataatatcatagctagtgatctccgatagaagaagtatgataccttataatggactatgggttgatacaacatcccaaaacattataatagtatacgtaccatcatatatgtctgtgtctgaagagctgagattgcataacgcatcagaaatgtctgttgaaaatctgtaaattggagtatgtttagaatggatagtctgagcaatagccagctctggatgatggtggagcaaatgcaatgcaatctctgaggtcaatcaatcaaataattaaactcatatttataaatatacacagagagagagagagagagagagagagagagagagagagagagagagagagagagagagagagagagagagagagagag

SEQ ID NO: 44476 - DNA, 1724 bp, Cannabis sativa
ctcatttttagttcttaacatgtatatccaagtatgtcttgagaaagcatcaacaaagctaatataatatcgatatccacttgaggacttgacacaaatccgaatgtaacagttgcaagggagcagcatagacagtagtggatataggaaatggtagcttatgtaggttcccaagacaacaagcagaacaaagagtattggaaatatcaatgtttttattgcttgtttggatattacaagagtttagcacttgctgaactattttatggtggggatggcctaatcttttgtgccacaaagcaaaagtattataagtggatgatggagtgctagtgttacattgagttgacttaggactacaagtacttgggaagttggcagaattagactcgacagtgaggtgagagcatgatgaaggctgcttgtgtgaggaaagaagattgagttggtttgagtcaaacttgtatagaccattgtcaagcttcccaacaagtaaagtcttcaaggtaacctggtccttaacaacacaatgaaaggggtgaaactcagaaaagactctattatcttgagcaaattgagacacacttagtaagttttttgtgatatgtggcacatgtaaaagattgtgtaagacaagtgtttgatcatggaaattggaaataaaataagaatgtgccaatgttttgaattttcaaacttgtaccattgcccatgtgaacctactgatctcccaagtagctgctgctaatggccagattttgttcatttggggtgaggtggttgatagctccagaatccggataccagctgggatcattaacaacctctggtgtggcataataggcttgcatttcgactatgttggctgtgacatgccctggaaaattctggaaggatttgggtccagtaaaggacttatcgaatctgtagaaacactgctgaacagtgtgccctaacttatgacataattggcattgaggtttttgaccccaaatggtagagatgcctcgaccacgtgaggtaccacatctaaaattgccaaattggccacgaatagatgatcctgtacccttggaagcaggcataaagaagccattttgtgatgaattgaattgaggaaaagagggggaaatacctctgaaattattgcttgaaccaggagcagtggtgttttgaaccacaggaggagtgccttttcctacttgagctttagtgtgagctaaattggctttatttttggtgatgtcaagatctttggctgctttatctaattgaacctcctgagccattaggagagcttcaatttcagcaacactataggcatcgattttggtgttgagtgaagtgatgaatacattgtattcggctggcagaccattaaaaatcgcttctatgtgatcttgaggagttgtaggatggccgattgatgcaagagtgtcaatgatactcttaattttaagaagatagtcacccagagaggactacatttttgtgttgcgaaggagtgtcttgaactgaccgatcttggcgcgattgagcgaggtgtagtattcacgcagattggtccagatctgggcagcggaatcagatccaaccattctggtgagtaccttctcggacatagacgagagaagccaagaaatgagtatgttgtcttgttgttcccagtcctcgaactgcggattcactcggttcagtcgtcgatcttcgatggtgagatattg

SEQ ID NO: 44477 - DNA, 1221 bp, Cannabis sativa
atgtatatttttacacattaatcacaaagctcttgctacattcaaaatgtgttgatgttttctctcaactactaaattttgttgaggtctttcaacacatgagttgtagatttgtatgcctttttgaagataaaaggaagttatgttcaattcttttgcattgtcacacctaactgatttaatatttgcagaaaattgagtgtgaatgagattatagaattgagggattatagattgtacatcagacttggatttgagcatgtaaacccaagtaaatcaactatggtcatcaacaattgtaaggaaatataaaaaaccttcaatgctatggatgtggaaaagcccctacatatcaagatgaattaaatcaaagcatgagttagcaatgttattttgagaattaaaaggtaatcgcttttgttttgctaagtgacaaatggagcaaggaagtacattgtgagaagtattcaaatgaagctttttattgataaaattggtagttgtcatggacggatgtccaagtctacaatgccaagaaaaagatagaattacatgattgattacaatgtgattttattctaggattggggaatggcagcaagagatagaggtgtccaatccgtttagctgtcccaatcttcctcttctgtgaatcctgaagaaaacagtaattgtgagtaaaagatatagtattggtaaagttgctgagaaagctagagacactaaaaagattgagttgaaaaccatgtacatatagaacattatgcaaagtgagattgtcaaaaagtttaatggtgcctgatttatgaacggggattctggtgccattgggaagagaaacaaagagagctatgacattgtgatgtatacttgtgaacagagactggttgcaacaaatgtagtgtgttgcaccgctatctattacccaagaacaagaattagagacattaccagatatgttcaaggaaaaagctggtggtgcatcagaagtagttggttgcaacttttggctgagaagagaaatgagtgcttgagtatctttatttttggtcaaattggccagcaatttattagtggatacagtagcattatgagcaccaggttctttattacattgtcgtttgtttccatagccaggggaaaccaataaggaagtagcatttatcctttaaatgccctggtttatgacaatttgagcagtagggtctcattttcttattg

SEQ ID NO: 44478 - DNA, 1963 bp, Cannabis sativa
aaaacttattaatcttgtaaatctaatcatccacatctgtaccatcaaatcgaggaattttgactcggagagtcttgatgatgttattaaattcatggccattcttcggggaagcaggctaagtatccctgaatttgtgggtatccctgacggagctagtatctcctgtgctgacaggtggaggctataatgatacttgagctaaacgctcctccgtataagcgacgtgtttggtcatacaatcctctgattgagcgattctctagtccaacatcgattgtaacttcattgattgatcacccttgaacttctccagcttagcatccaatcggacgttcaatttggaatgcaattcttgtatcaacgttgctacgtcctcgttcttcatagtgaggactaagcaatgaaagcaccaatgttaagaaaaggccttcttcgagacaagaaaaatctcccaagtagcaaattgccattttattcaacatgcttttgaaaattttacagtgttccttttatactcagcagctaacagaagcaaaaaagaaaatggttagaccctcatacagacttctaacaactcattctcatgacataatcctttagccagcttggttttgcacactctcttttgttacgagcttctctcgttacaactgcagtactctcttcttcttcgccatcggcttgagcttggctgaaatccatctgctggctagcgtccctttcccaactggatatcctacctttcatgtatatctttggggtccaattcaattgggcctatagcttgggccttgctaacatagtcaatcattagaatctactataacctatctagtgttgaaatcacaacaaaccaaccaaggatacattgtaaaaaccaaactactcaagcctttccacaactccagcctctcagcattcgtgttacatccatacaccattgtgaaccaaactccctatcaatacctatcatttttactctactatgcaaaaactgtttattcccctctaaaacctccacttacacaaaaaaaattcgccataacatcaagattttcccctctatagtagaactagtaagataatcccatccttagaatttagcttccattatttcacttaccttattctctctcaacttagtttccaaaaccgcacctatccccactttatttctttgcaagagactaagaaacatctcctacttattcgatcaattacactaagatgttgcaactctcaatcatcaacttattgagtgattttgttgcaattttgttcctgcaaaacactaaaagaattagtggtattaagtcttagttgctggatcctcccaattttccttttaggaacttcccatttatcttccttacccactgttagaataattgtgcccataccagactgctcctcaatcaatctttctttagcttgcacttcctctgcccctgctgctcacttttaccagcatttatctctgtggaactcgatcaaaatgaagaacccctccctctagaactagatcacgagtagtttcatccccaaatttcactaaggtaacccaagccatgtattcattcaaaccactctttctaccccaagttcccccagacacacctaacaaatttctcaaacacagataacgtagagaagggtcttagagtcctaaaccttaagctcgtgatgcttccatggtcgatgaacggaattgtacttaaacatgtaagtctgaaaaacaaaaaacacatcaatcatttcacatttccataaatctaaacaaatgttttatcttatcttttttggctgtactctgaatgctttgaattaatgaaatgttaatcttttcagagaaaaaaaaaacacaatcgatgaagatgggttcctctgttggtatcacaatttttttgtgtttttttttttttttggacaaatggatagggggatttgatcttggtattac

SEQ ID NO: 44479 - DNA, 1226 bp, Cannabis sativa
gtaccaaccggtcgaccggttctaatggtccctcagaaccggtcaaccggttctgtgctgggaacccaaaaatcaaccccctaaaatcaattcaactccaaaccttctaaaaacttcaaaacctgcttataccccaaacaatacatttcaagtatcaaatcacaacaattcacataaaaactcatttcaccattggagctctaagttgaagtttacaaactctaatgtagtctaaacaatacaaagctcacctatttcagccttaaacaacctaaatgatcaatatctaacttcagaataccaagataaatatccccacgcatacaacaactcaatccccaaagttcatacataaaagtcaactttaagctaaggaaaacaaaaagagacaagctaaagcataatataataccttgggttgaagcttcaaactctaccaaaactcactgaaatgagttgaaggaaaccagaattctgggatggttgctaggtgattcgaaggagaaggagagagcttttgaagaaaatggtttccaggtttttcttgagggtcaaaagctattctttcctttttgaccaaaaatgactaattattaacatatatatgagttaataatcagattattactcataaaagacaagaaaaagaaactctaactaaattaccattttgcccctaattaatttcactaattgaaaactcttatgggtaaattggtcattactaaacccaaaaattcttataattccaaagcctaacaacagcaccccgatgttaaaataattctatctcataaaaaaaaaatgcgactctctattggcccaacgtctctttccactgcttccaaacacattacagagcaacgaggaattcataaaaaaaaatggcataactaattatatcaaactcaaaataaatctccacaatatgcatgttataaataatatttaaacctcatgaataaaccgtaattatttaatagtccaaaatattaatccattgcggtcattacaataatggcaactaaaaaaagatatatagttgtctctgcttctaactcacgcatctaggtatgggtctgggtccaggtatggttcccaggtccaagtcctgggtctcaggttcccggtcctcgatccaggtcccgagtcataggtttgggtttgggtttagatcccgggttcaggtccgggtccaagtcccgattctgggcctagattcaagt

SEQ ID NO: 44480 - DNA, 1610 bp, Cannabis sativa
tctttcaccgtttcccaatggtgtgcatagaaactggggggaaggccatccggcccaggagccttgtcttgccccatgttcttgatagctgcaatgatttcttcctcacttggaatagaattgagcccttcgatctcttggtctgttagagtcccagtgaacagatcacggggcatatcagttgggtgtgtttcccctcgtttgtacaaatctctgaaattcctgaggaaacaattagcaatctctggttgattctgaatccagtcccctccctcagagttttttatggattggatgaagttccttcgtcttcggacaattgtcgaagccataaaaaatttggaacatctatcgccttcttggagccattgaacccgtgacttctgtttccagtgtatttcttcccgtaaaagtgcttcattgaggacattctttgcttcttgaatggcatggcaatccatcgggtctctattctcttcacacttcagggtagcattcgcattgttgacttggagacttagcttcttgaagtgctttttgttccacacattgagtttacgacaggtgctttttattttcctgtggaaattaaccattgggttgtgatgcaatcttttggcccaggcttccttgacaacccagaaacaacgggggtcacgagcccacatattttcgtacttaaagagtctatttcttccaatgactctccctgttgtgtcgagtagaatgggtctatgatccgaggtggctgaggacaggtggtgtatcactgcatttggaaaaagaactctccaatctgtggtggcaatgccacgatcaagacgggcacgcttcatagccgtagctctagaagcattcgaagtacctttcgcccaagtgaagccagggccgagataccccaaatcaataagacccgccctgtttaccattcgccggaaatcgaatgcatatctagatgagttgcctgggctcgcatagttaaagcattcgttgtcactgagggtaccattcatgtctccaagaagcaggaccggtcgtctgtcacccaggaccatatctcccatctcaagccagaacgcttccttatcttcatatctcggaggaccgtaaatgccatggaaagaccatggaattcctggagggtcagagttgatttgcagagagatcacgaacttattcgaagagctaattgagcatctaactcctttcatccaacagatacccaagccccccgaccggccaatagggggaacataatgcattccttcaaaatgtaatttgttacacaatctaagaaatttactttcttctaacctgacttccgaaagtaagaggagttcgggttggtgctggcggatcatcgccgccaattgacgaactgtcgtggcattcccgagaccacggcagttccaagcaattattttcatggcgactttggagacttttccgggcaagtctccgaagccccaaaccgaaaatcctctgtgagtttgatgacattggaaagattaggattttacctcttgatcttccaattctgagatttggcaactagatttgctagttcccactctttcaataaccacaaagtgattatccaagtccacctc

SEQ ID NO: 44481 - DNA, 920 bp, Cannabis sativa
tgaaacagaaattgggaattcttttacaagtagggtgttgttctatttataggcaaatgctctattggggcttgtttagcaaaattcttatttaatagagagaaaattttcgttagagcaagcgattactctccaggctttccgttatgttctcagtgtgctggaggcagaatttgaagccatcctgctgtgtattgaactctgtgctgagatgcagtttgacgtatagttatttactctgactcggctgttgccattaaggctttgaaggctaagactctcccgtactcttgggggtcctattcgagcttttctaagtgtttggctttgttgaaatcttttaattgtatgtctgttgtttttattcctcgtactgctaactcggatgctgataagcttgcttatctcgctagagtgaatcgtgtgtgtttctcctctgttgttagggaagcagccccccttgtggctgttatgtagtcctttgtttttgtgtgaataaaatcttactaatcaagtgtattgagatacattgtatacctactttactttatatgttttaatttttacttttattttcatattctttaaaatgtacacactttatagatgatgtcttcattatacttcctaagttaataaaaattatgtgctagacttaagtggaatgtgaggatatattgggcaatccactcacaaaagtgggtacattttaataaaatatattaagattatatttttaattaatggatataaaaaagaggtatttctcaatttatccctttaacaaagcaattcctttcattgggcccaataaggaaagcccacttgggtggtaagtaatgtatgatttgacttgtatccagagatatgagaggcgcatatacaagtcgcaactctttgcgcgtgttttagaagggtat

SEQ ID NO: 44482 - DNA, 2870 bp, Cannabis sativa
  modified_base (1998)..(2011): a, c, t, g, unknown or other
aatgctagcatggaagatttgttttagctttgaaaatttgattctttccaaaaattaaactacgagcattttgtattcggacccaccatctaaccctttgatgttgtcttgtgtgtatggtcctccctatttcaataaaaagaagttgttttggtccaaccttatggaggtgggaaataaatatggaggaacttagttgataatgtgtgatgctaattttatccttaagaatgcaaatagaaccgtctctcatgggagagaccaattagtcttggaaatcaactcttcaatcaacttttaggggctagtggaactacctatcaaaggtgactgtctgacttgggataaccatagagatggagagcatcatataaaatatgcgttagataaggcccttgccaatgatgcatggctaaccttgaatcctaaagctacattgagattgtttcatgttgttagctctgaccaaaggcccttgtgtctctattctagttgtttggacgggcatatgttaaaggaaattataaacccgaaaatattctttagtgatgcgcaacaatcaatgtttgacatgtggtaagaaggatgacgtcatggagttaagtagactcgagtcatagcagtcgacttgggaggggatcctagccctacgcccaagttaacttcgggagcttcaggatggaagttcaaacttcaataacatgaatccagctcactatctttcaatatattataccatgaagacatggattaaccaaatccaagtcccgggagctgaaattacacgaacctataactcgaaagccaacttgggcacttagggtttcacccaatgccaaggttgacatcccagactagggttacagtttttaggatcatcttattgaaaatgggtcaaaacatgcattgggacatcaactagacaaaccacagacatatttgaggtgtcaaaattaaaatcagagcaagttaatttttgagcacccaaagcctcgtagcctcgagcaccccaacgcctaggttgataagttatcaatctaggcgccttggaagtatcagattgatgattcgacttttgtatcttcttaattagtcttcattagaaacgaggaaatatgttctcctgaggaagaaacaacacatcctgggtgctaaaagcaaggcccaacgccaaggttgacattttgtcaacttaggccaacttcgatgatgttttttgagaactcttccaagattattttccacttttagaaaatattgagattcaactatttttggggaccaaacggaactttcgaagggccataactgggacccagcacccaggttgtcatattatcaatttgggctataagttttcatattgatggttaacatggtaataccctaaatatcgctataacatgaaaatctagggttcccaaaactgccccaaccggtaaaccggatcttaactggaaaattggtttctatacatgctgccagggggaaccggtcgatcgattccacagggcaatactgaaccggttgaccatttcagtacatgaatcactaaacacttcataaacactcaattctaccctaactcagatcatactttccaaaatacctaaataaatcacaacaaacatctttcaaccaaaaacccaagccataactctcagaattcaattatatcattaaaggcccaagtttgagttttaaatctcaaaccttggttcaacatacttacaaccaacaaggataagcacactcaactcctattaacgtaaaattaatttagaaaataaacctcaagcaacttaaactcaaacaataccataattacaagttcactacacaatagagctcaaaacctagaaaataaaggcatagaggaactaggtctcttacctttgaattcacccaagagaaattctttaaagcttactgaaatcctcaagaacaatgatgaaaagggttggatcctactggttttctagagagagagagagagannnnnnnnnnnnnngagagagagagagagggagaacttgcattttcccatttttttctttctaatttgcttattttggctaaaaggattaaatgataagagtttatcttttttcttgtcttattcacaaaaatcatcatcctaaaaattaaggaattaaaaaatttctaatttaaaataatatttatttaacttatgaagaaattacaattttacccttccattaccccaaggcaagctaaatacttaagagtaaaatgatcctatatcataaccctgagtaataccgacatttcaaatgtctaatcatatcatcccactatatctaaaatactaatccatttttaagtgactctataggctaagcatcgaattccactgttaccgatcataaaacataaaatttataaaaaagtatacatataacatatataacgcacctaaagttgaattatatatatccctaattgagaaattagtttcctatggcctatatcaaacaataagccttaattccttccaagaggcacataatcacataataatatataagtctcttaattatctgctaattcccatgattaaactatgtgttcattacatctaactacatttaatatatcagacttctttttacaagataaatcttttactcattatgtatataaatttaaaaaattacgagcattaggctatggcccattaaaattattgggtatatatttcttttatacatatactagagaattataagtcacgcttcgggcggcggtgttgttcaagtcttatatatatatatatatattgtagctattgagtgatatactctaaaatataatattttgatatgtgtattataaacaaagtaatatta

SEQ ID NO: 44483 - DNA, 2826 bp, Cannabis sativa
aagcgagaagcaccgaccccctcccctatataaggggtcatccatgtcctaggagggggatccacattcttgaacacttagaaaaataaacatttaccattctttgcaattaagagtctgttcttgacttttgcaactcagatcaataaagcacaaggggagtaggctattacagacatctggggtcgaacctctttaaattttgatgtcttttatttacatttattgcaagttctggtgtcattaactacatttattactgtgattttggtttaagaaatctcatttacgactccgcatcggttggctaaaaatccagtcaacattttggtgctttcattgagagctttagccaaaatcttgatgtttttcaccagaaaaatgatttgaacctgaagatctcaagagcaacctgacaaagagatggaaagtgcccaccaagttccatcagcaagcaatctcgctagaaacaatggagaacgactcccgtgtccggggaatggcagcacatccaccaccgcttaaactactggcaatggagcagctagccaaactgcagccactgggcagacaactactgggcataccaccaacgccatcgccgtaggaggcgacgctattgatggtgccactgaaataggtagtgctagaaattttgtcacacctactgacggcgcgggcccagctcaaactggccgaggccctggcgtctttaggccgcgaagtgaaccccatgtgaatatcgagggaattgaccctgagatggatcagctgcgagatgcaataaaccgaatgcaaggccagttccagactgtgcaccaagcaaactcaagctcgggtggccttgatagaaagtcttgccaaccaaaggagagaattccaatcttgactagaagatcatgctcgtgaaatgaggaggcaccaagacgaccaagatcatcacacccaagaggctgccgacttaatgcagaactactttaaccaaaacactaaagggatgggtacaaatgcccacaatcaacaaatacctcaaacctatcctcaagaagtccctaccctgaggaaccagcgggagagggtggtctatggacccgaagagcgcccaaggaaccaagagagggctaggagtcacccctctatcagggttccccataataataatcgaccgctcctagtcgatgaacaagttctacccagtcattatatgggacgtgatgactcccacaatgcctgtctaaggcagaggtggaggaaactctaggaacaacaatggtgactgtggcggaaacggtggaaggacaccccaacatagggagtggcaaccccgctaccaacgcggtcaaccacgagatggcgatgatcgcccaagaaatagtaggtctagggggagaagagaagaccccaaagtcaacaatgattatcgtccaaactacactgacggtgacggtgatgatgaagctaaaagtcgggccaacaaccaaccgaatcctgagctggggggttatcaagccagagggccgtatgcccctaataggcaacatcaacctgagaatccaccccagttgggtaggaatgaccaagtaccacccctgatcgatggaaggactgacagtcataatgcaggaggaaggccatgaatcgtgtcagtttttgaacgggtggccccgagggggtagagacctttgggatgccctcaacagaaatagggataactgaagttccaacatagttaatccacctgatccaattcaaagagaccaagtgaatgttagcgttaatgttgctcaaccccaagcagccacagatccagtgatccaggctcggttggacgagttaacctgattggtcaaggaccttactgcaccaaaactcactgacttggagttggaaagaaggagggggtctgccttctcccaagcgatcaatgacctccctattccaacaaaattcaaaatgcccacttgcaagtacacgggtagtgaagaccccctaactcatgttgagaacttcaaaatgcaaatggaccttcaagggatcagggatgacctcaggtgtcgaatcttccctgcaaccctcatggacaagcgcaacaatggtttactaaactacccaagggagaattactttttgggatgagtttgaagggttattttatacccaattctcttcagcccgacagataccagcagaggtaggtgacttggtcgccatcaagtagaagccttatgaaccactaaaagactacattcaacgcttgatgtaggaggaaaccaaggtaaaaaatctaagtgatgatggcaaatgggccgccatcatgggggcattctagagggaagtcagccatggaaggatacaaggcagaaaccaacccatactatgagggatttccttgacagagctaatgagtttattaaattggaagaagccgagcaaaatacttaaggctttaaccacactaagaacaaaaagaacgaaacaagctcaaatagtcaaagctttcaaggggataatggtaagaatggctccaacaattgtaagagggggaataacagtaatggcagtaacaacaatgacaataagcgaccaaaaaatccccccgagccagccaggtgagatccaaccccaaggttcactacctacaacatactcctagacataagagaaaacatctgcaatgcgactcacttggtggtgccatacgtaagccttatcccatgaaaaaggatattagcaaatgagacatgaacaagttttgtcgattccacaatgactacggtcatgacactgatgagtgcaacaatttgaaggaggaaatagagttcctca

SEQ ID NO: 44484 - DNA, 8706 bp, Cannabis sativa
tatttaggtataatgaccaaactagtaagagtatttaatatttttaggtttattcacattcaatctaattatatgtatatatatatattgtttttgaatgaaatacataattcattaagataaattcaatgttacagaaaaactcaaaaatcgtggataagcatccgaccaaacacaattcccctaaactagttacacagagattgtcagtgtatgggcattcgttgaatgcgaatgacgcaacaaaaaccaccaccaataacaactaataaagaatagatatataataaaatagactcaaaactaaaatttatgtgaagcttattaataaaatcaattgccactgaagaatcattattaataatggagatactgaaaccaaattgatgcgcaagaagcagacccaaacgaatgacaagcagctccaccacattaacagataaatcatataactcaccagatgaccacaccacctaaaccacacccgcaacataccgtatcacttcccccaatccgacaaagcccttccctgatacaaccaaagtatcagtcgtcagagcaaaagaatcaggaggtggtagtatccatcgagtacgacggtttgtaattgggtttgcaaggcctaatcccaaatgaagaccccgtcgaccatactccttaaactccgacagatgattatggactaaatttgggacaacatctaatctcgactgcttttaccaaataatactaagtttcgatcacactaaagccaccaaaaaagttgacatcatcaatttaaaagcctcacgagataacttgtcaatgagaaataagagaatttcctacattggtccatatacacatcgacggagcaccgaacacacccccaattgatgccacactagaatcaaaccaaagtagaataaagagcatgctcaggagtttcaggttcttctctgcatcgcgaacaacaaaaatgtacttaaacttttcaagagataagctgtgttgctgttggtaacctcaaacggaacatacgccaaacaaatttttttacatttggtggcatagcaagattccacactccattccaccaacgaatcagcctggatgaatccgcgactccctcctcaatctggagtgaccacgccaacgagtagccactcttaacattacaaaccccatctcgatcatagtgtcagcaccatccatctcttgtttctcacctctctaatggaatagacagaattatgtccacatctattgacaaaaaaacttattgaagtttcaccacatcctaagcatgagagggaaggataaattcacttacccaacaatcatcattgatcatcctcgtgattggctggaaaggcgtcgaacacagggagccatgggtccttgaatgtctgaacttgcattccatcattaatggatctccgaagactgcatttaagcaaattcatttcccaaatcaaactcggccaaagatgagatgaaccatccgatatgatccaattaatttcaattatccaatcgatccaacatttactggatgttggattggatcggttttatgtgttaaatgtatttcatatatatttgttggtttaatttgaatttattcaatattttagatctagtatttttttttttggattagatggaattcatttaatattttaagtctagtatgtgttggattggattggacggatccaatccaagaaaaaaagagtaaaattttaaatgttaacttttatatatacatgtatattttacgtataaaaatataaaatttaattactcatttaaactaaatgaaaatattaattagtttgattggatgttagatgtattgaatttttagacaccccatccaatatctaatccgatctaattaaatatttaaaaataacatccaatccgatccgatcagagttgaatatttaatatttggcggtgagttgtaattggattagatctatttatgcagagccctaactagctaattttttttttttaacatatatgccttatttttgtttatgtatgcatttcacatgttcttacaaaattataaataatttacagtcgtaaaaacataagtctaaataatttaatcaataaggacacaaattattactgcacttcgacagtaggatttcagtgcctataatgctcaattgtttatataatacttgggcaggtacgcatgtttattgttaaatttaaattaatttaatcaaaattttgtatatgcttgctacttaatgcaatagtaccaagaacagtgtgttagcactatagtgccgtaccttaaagaggatggagaactagctgttgcttgatttctattaatgttttttttcactgtaagttgcttatgttaataattgtgtcatgccaacttttcttaatgcaatggtacatacatatatcaaataaaataaaaataatacataaaaaatatatttctgtggaacatctaccttgtctcaccaatttcatattgcccaaccaaaaatgaaaccaaaaaaagaaaaaactctcaaataccaccaccaccaccaccacctgctaaaattacatcaatgaatgcaaaagatacataatataaataatactctggtaagacataataatgctgtcaaaaccaatcaaaccgccgagagacttgcccatttcccaagttcatatggatcagcatagtagtacaacttaattctgttggccaaagacaaccctgtcactattggagacccgaaacccgaatcatcttgctctgttggctcatctgcaaatgctgttatgtctccaacaagtttaaatgtaattctccggctttgtatctgtctaggaaagtcaaaatacattatggtacccgcctttgtctctggcaaccgatactccccaatcgttaccatgctatgaggctcctgttaagttttcggaatgaatgagagcttagcagaagttaagataagaagagaaagaaagaaagaaaatcacaactaaataaggcagaggcagttctttaagtacctgaagaacagacacttggatatacaaaacagctggagtgatgtatctgtcttctaacaatgttggcgacgtatcccagatatgcgccttcgaagatggtgaatgagttacccgaggcttaattgcactgaaagcatctaagcggaatccagcaagcaaaggtgaagcaggcgacaaaaattgttccaaaatgagatcgttgctcattagcctttcagattcaatgggaacctgaaaataaagtagcattatcaatgaggtgaccaaaaagaaaggagagagaacatgaatcaaaagatacagagtcgataagattaccttgaatctgtttaattgtggagctctatccaaccaccctttcatattcaactgatcagagctttgagatgaagcaagtgccacatcttttttcactgagcttcccactacaagtatccttttggcatgaaggcaaggctcactggaaagcgaccctccaaatgaggcacgtctgcttacttgtgcagcaaatgggttttcgtcaagagacagaagatttaagttttcgtagttaaaagaacttgagccaggtcgtggaagacgtagtgatatccaaatgatccggcatctaactggtttcctaaatgcaaacttcacatgtctcggtactttatcttcgttgtctaaattttcttgcccgtaatattctgacgaggacttaatcagggattgcacgtcccattttcccgtgcatgtcctttcctccatatctattttattgctggcccagatttgcacctgcataatataaatacatgggaacgagtcaaagacagaacaaacaaaaccataatacattgtataaaggagaacgacaaagattaatctacaactaagaaaaacaatgtagcacttgtatattacttacaagttcataaataattgagttatctagaagaaaaaccagttgactcacctacatacctaaatccagtgaagatgaataaaaatgtaagcagagagaagtctacataccgtaggtgcatccgcctcagaatagccacaaggactaacagccaaaataaccccactgacatcagaaagagtaccaagaacaataatgaattcaacagatgtggtagtggaaggggctttccaatatgaacgccgagacccagaatcaagaggagcaagcagagacaagcatggtgctgaatctgttgcagtttcaacctagaataacattatatataggttaattttagaacaaaatgtagcatgaaatgaacaaaaactgaaactagatgagaatataaagagataaaataccgagtgcaaaaagctggcgaatggaaattcagcaagggattcctctccactaagtaactgtcttaatactttaacggatctatgactatcagaagatttactcctctgagaatcataatccaataaggaagatcccatcaccagattcaatgctttacatgcagcagtatccacacgggaattcctatgcaaactaattaagactctaacatagtccaagatcaaggcatccaatacaacttcatggcagcaacgtttacatataacactatctagcactacagaacgatttgtagatacgtccacttggctgccatggcttgatccaccttggtttgtcataccattgtaattcgtggcttctcttgatttatagcttgaaagcagaagggcccctctcccagcacagcaaaacttacatgtctttctttcgcattgggagcaaaacaagacagactgggagactcctgcagctgaaacattgctaggtgcgcgtgtagaagcatcagtttcagcatgaacctcacacataccaccagagcagctctctccaattttactaatattccagaaatctattacatcatcatccatcgtctcaagaccaatagaagctataattttgtcttcaacggaggtctgcccgagaagtgcaagggaatttgcaactttgcacagtcttcccatgtagcgttcatcaagtaaaaggtttggattgatcctagcaggatccattccaatcggtactaaagctctatccctttcagcagcagaaagatttaagcggaggcgttcaatttcaagcttcattgcttctacaaagtctagctttttttcctgcaaaatttgacatttttaagaccaaacattaattctatttcttttccataaaagattaagaaaggatagttgatatattacaaaaagtagacggtaacttgaattatgaaataaaacagagtaagtcaacctgacaccagcatcctataagaaccaatagatgagttcataaatgaaacaatctaggtaaacacatcagatagtcacataccaactgtaggccagcaagagatatcagacaacttatatactgctctgaactgctaccagaagttttactatcttgtgaaggcaagacttttttatcaatttcagctacaccatgatattcaactgcaggttgatccaagaaatcaagaaagttgcttccttggtccaaagtagtgttgactgtcactggttgagcaacatgatccgagaaactctctcctccagttaaaaggtcaacccaatcattgctagaagcacttggttgcactgaggttgacacagtttcatgggatgaagcacccgaaaatggattagtttctgaactggcggccagaaatggatttgtttcctcttgaaagtttttggaaatctcaactaactttgccccaggtccttcatttgttaatatgcccctccaagggagagaaactccaaggacttctatctgtaacaaaatttgaacaagaactattatcatgtttcggtcctaggaaatccttctcctaatgaaacaaatatacttgactgcacactatcctgcattcaaacatgtgaactttcaagtaactgagaagaatgatcgggtaatcaatttttgtaacagccatgcatttgaggattcacacaaaaaaaaaaaaaagaggaacaaatccccatttctcaaatactagataaaatgagtccaaaagttgcattttagcattctacctcacccagagtcatagggctttttccagaatcagtaggataaaatgttactgcgactactcgggtgaggaagtccaattcaccttctacttcctcaaaatcatataataatggaagggccgatgtatcttgatcctgaagacgtgtgcctcctccagtgacagccatatcctctggattaattggccctgctacaggtatcaagaggtttgtcccgtttacacattgaggtattgaagcaccctgaaaacatagtgctatagtgataagagaccacgagcaaattataaacaactttacgtgcctgttggtgcagtacaacaagacatagttcagcttgaaaccctttacccaggaataaagcatcacagttaccatcatctattgggcacaaaaagacttgaagctatttagtagaattatcttaagttgaaaatttcagttacaagcaagaaagtaagggaaaattttgtcacggaaaaaaagcagcatgctttaattttagtataaaatgttgaaaagaacaaagtaaaattagaatgtatatgactcgtccagcaattaattatacacacatatgcagacatgaaacatactaaactcatagtgaagttacaaagcacatactcacagagcacaatttaaagaagaacattgtaatgaattggcaccactgacctccaaaaccagtttaagaccatctaaatgccgtcctgtccttacatcaattgttgatggataagttgaatcatctgcaccgtgggatattgtgagaagaagctggcaaacatggcaaggctcaccgagatagataaaaatttcaaccacatctgcagcctgctgacaaacctgtgaagaaaaaatacataattcccaaaagaaatattaaagagagtacttcagttgaatagttaagaaaggaagtcacccaccaaagacttatcttagtagaaaatagtgagccttgttgtaaaaaaagatataataaggttaagtacccatgttaggtctttcttcttgaaactcagaagacctgatccaccatcagaatttggaaacatattggcaactggcttaggaaggaaaccagatggccgagatgctacctgcaatcaccagatggggaaatttaattttcaaaagaaatatacaaataaactaactatttattcgtttcgttgaaactttatatataacaagcagaaactaaatatgccaatatatgacaaaaacagtaatattgtagttcatgttcagccaatcacaagtggctggacaagttgaatcaaatgaacatatagtattttagaaattaaaattaactgagattgaagatgaaaatcaaaacagcattatcacaaacgtacattaagaggattcaaagaaatggagggaagatgcttaaaaagtcgcatgccaagaaacatctccagttgtttttgacgagagctgtcgacaattgcatttttatatcttctctgcagggtgattttcatattctgagctgcggaaaattgtttaaacttaccagcatcctcgctgaaaatgctaaggatttggctatgcatggctttcgaaccagtataaagtgtggcatgaatatcaccagcaagaagaaaaagatcagcaagctgggatactggtgataaaattgttgacctcttgaactcctcaaatgtcatgtcaaatcttttccaaggtttatcaggacacgggtgcgtccatgtcgtggtcctagtattgtggtcaataaaatacactttccctgttactgcatcagatcttttttcccatcctggtggcaaaggagcattgtaccctccataattatttactgtctgataaccaaaggccatattactgtcaagtgatattcccagccgcctacactgctccataaatgcttggagggcgccaaaataactagctgcatttgtcctgtctaaagaatcagcacagttgaaacgtgtcactccattttggcgtgatcttaagcagtaggcgccttctaagttatcactatagatgatttcacctttgcaatccttaattcgttgccttgaaggcaaataatctccttcagatatgcctatagatacagtggggccttttagaagtctccataacccctcaattgtttgctgctcaccttttaactttgtactggcatgccaatcataattaattagatgaattcgagtatgaggaagatttcctgttgatctaatataattcaaagattcctcaaaatgttgaactaaaatagcctctgattttccttcgccgcttcttaagaggttaatgcatacaattggaactatagcttttctattctgactcaaaccaacagctacatcaaaatttcgagcatcgtatctcttacttaaccgctgataatactgtgcacttcctttgtatggatcacgattggaaacatatatttctgcttctgcagcagtaatctttaactctgcaccccaccacattggaattgtacctcgtctccagacatatgtattaaacggaacactctgaccacccttctttggaacccatacaagctgctcacactcaacttcatttcctgttaggacccacattataaataagttttgg

SEQ ID NO: 44485 - DNA, 5268 bp, Cannabis sativa
gaccattttatccctagactttaaattgcttaagtttaagcaccatgggcattttggtaatttggaaagggagggttaggtggctggtgggttgagtgacacctagccaatctagttttcagcatgagtttaatgtagttaatctttttacacttaaaaaataaagaaattaaagaaaaataaaaaatcaagagaaactatttctctctctctctctctctctctattgctcggctcacatagaacctgaaggaacccagctaatttcatcatcttttttgggaattcaacaacaattcaaggagtaattaatgaaggtaagccctagaaactctaactttatgaattccttaagttttagttggttttggcatgtgattttggatgatagggctaaatttgtttttgaatcagtttttaagtttattttgagcttgggttgagttcttccagctggttttgaggtttggtgtggtggatgcacaagttggagtttgaaaactcaagcttggttcatccatggcatgttttgattttgtgtgtaattctggattctattgcttgaaatatgttgtgggaggtcaatataggtgttcttgaaagtttggtgagatttggacatgttttggacaggttttgaattgtttggggaaacctggtgcgaatcggtttactggtttgccatgtcctgtaaaaccggttaacttgttctgggactggtttcccgaacaattctttttgtcgattcgtgtccatttcaaagccttggttgtgtgattctctatatttttagggtattatagtttcagttgtctatggtagaacctgtagttggaggttcgagtttcccggattagggttttgggcgagttatttacccgattattttatgtgattaaggcatccatccagcatgaggttttctattcaggtcggccaactcacttgaattcggaaacgaggtaagaatagcgtagaacatgtgatgtacttatgcgaatgtatgtatatgtaaaatatctatgcatgcttattatgcttagtacattaccaacacttgtacgaaaatggtacagagtgcattggtatagtgtacaatgtataaaagtacattacagtgttactagcacaagtacgggaaagtacagggtgtgtgtggtatattacttagagatactcacggtacgaaacaaaccctaccaacactcgtacaatgtcggtacgtagtgtatgtggtacagtggctgtaccctagtaatgaacattcttgctcatttgttaagccttgtaaataggtgtatgggcacctagacacaagtcggtattatatgatttattatatgcttttcttactgagtctgtcgattcacagttctacttttgtgtgtaggtaaaggaaaggcaaaggctaaacaggatggagcctcgagctagaaagatgttgtacatgtcatggcaacgcaacttggagtgttcggtatcgggacatcttggattttattttgtagtcgttgtgcgacctaactaaatgtattttgaatattctataaaagtttaattacgggatcccagcttttgtaattatatatatcaaagtttataaagtttaataattaaatctaaaattttaattagacatgattttcaaggaaacttctttgattagcaaagatggcactgtaattgaaaaatccctgtagcgtgcctaagtatcatggcattacaattctggtatcagagctgctaggtttgtttaccaaagagcgccaagacatgtacaatcatcattagagaaaagctcagctcacagttcaataagccattacttatttagtattgtatgtgattattaatgcatgttaagaagcatagtagtttataattacttattttaatgcattgcctttaaatccataagagcgctattgagttttatgattgatgtctaacttgcctgacttatgggttcgcaggctaagtcctattaaatggacgcccagcgaaatacaaggagtcagggtaatagggtcgagaccggaggcggtcagggaaatcgaattccccaaaatccctgtcgacatggtagaggccgtggaaggttttagggtggtcgacatgaaaatccacctcaagctcctccaaattgggagcagagattcacaaaaaatgcaagatcgtatccgccaataagatgaagaaattctgagattaaggtagcagggtcctcctgcagtgcttccaccacaagctcaggccgctttagttcctgcggtgccagtagaacaacatgttgctggcaactatatggagccgttgtacgagaggtttcgcaagcatgcacctccaatttttctgggaggtccaagaggtagaggattagggcgaggtccgtcctgatactccattagaagccgaggaggagggagcagctcagaggctaccctttggtgggttcaacgaagatggagaacacgtgtctgaggccggtgaaatcctggatgccggtgaggactacgttactgaggaatacaccgaggttgttcctcaaagaagacaaaatgcagaaggggctcggtgggtttctcctccatctatagtaacccaggcaaaactgaagaatttggagaagcacggctacttgagggatgtcaaaagcttccttccctctccaaaccactgggcaaccagtccaagggaggggtactgtgcttggtcgggcgctcatactaagtagggtgcaatgttgcccttgcttccatactttaggagaattacggattactaccatctttgcccaacccagttcactccaaagggcatcaaatatatatccgccttgttcatcctttatgcctcacaaagatggagggagccatccccacacgacaccaagtggctctttgatctaaagtcaactcccaagtagaggaggttggggtatttctatttttctcagctcgaggagaagtggctaatgggcaccgtggacaccgatgtcagcaagataggacattttgtgtatgagtactactttgtccagggcatggatactgtccacactcggttccagcagatcccctcatattgctgccctcccttcactttggggctcatgaagagggcacagagaattcttcagctagcaaatgctgctcagaacatcaccctgctgggcactggggccaattatgttaagtataaactcttcccagaggactttgtgccaaggcccgtgaaggagaagaagaaggcaaagcctagctaggtcgaggtgactgagcaggagaagctgagtaagaagaagaagaagaagaaagaggaggaggaggctctccctcgtgaccaagcaccagtagagcgtgctatcaggataagggaacctgatatgcctgtctggtcgttagccccagtagagggaaaagggaaagtcatcctgatggagtaggaagaagactcttcggacgatgatcctccgtcttttcttgttcgggcaaatgctcctgcccacatgcatggtattttgacttgtatttatttctttcattacatgctttatattacacttgcttctaactatgttgttttgtttgtgtagtcatgtcccagaaagtactccaagctctaaagaagagggttggtgaaaactcgggccaggctcccctgcccaagaggtctaaaggcaatgaggctccgtccaaggagaaggagaggaagtaatagacctctctgaggaacgacctgtcgtggaccctcaagtctagaaggtctcaaaatccaagagttccagtgggaggagctcaaaacggcctgcattagctccttatgtataatgcacccgctcggttttaagtcaaaaaagtattttcttgtgaaaaacttcatttgtatgctcgatatatatcccgagcacttagaaaagctgtattttttattttaagaaaactagctctacaattttttataaattttctcctattttggtagaaggactatttgcctttactttactgcatttgtttgtaattttagtatcaaaacactatttgtaattgtgttatctatttatgtaggtcttatctctttggagggattggttagaagttcgtgttcgtatcaaaaagcaccaaggattctacctctagctcggttagtttagctatatatttggctagtaattgttctcattaaaagaagattatatagtgaatattttgctaactctactatgttctctcatttgatttttgggtattgttaattgattgcttccactgcaaaaaaagagctacctatatctcttgatgaggaagaagatccaggatttgagcatatacataatgaagaagatggacaaaatatggaatcaagtcagccacaaaatcgtccactttacctactgatgggacaaaggaaaatgatctgaagagaaaggcagttaagcctccatcaatggtttggaatcactctactaaggtaagtaatgctaaaaataatgaaaaagctaaatgtaattactgtagtagtgtacatgcatgtggtagcaagaaaaacggaactagtaatttgttgaatcatattagaattcaatgtaagagttttcttgggaggtgataagaagaaaaaacactatgttttgaattgatgaaaggggagggaaacactttcatgactcataaatttgaccccaaaggaataagaaaatatattgctaggatgattgtcaaagatgagtagccattttcatttgtagaaaacgaaggttttagagaacttcttcaaaatatggagcctaaatttaatgtcgcttcacgtactactattacaagggatatcatgaatctttaccttagagagaaaaagaatttaagagctatagttgtgaagaagaaaaaaggagtttgtcttaccactgatacatggagatcttgtcaaaatttggattacgtgtgtttaactgctcatttcattgatgactcttgggtcttgcataagaagatattgagttattgtgttgttcctaataataaaggtgacacacttggtaaagctattgaacaatgtttgttagattgggggcttgagagggtatttactattactgtggataatgcatgatcaaacaatgtttcttttcaatatgtcatgaatactgtgaatcagtggggtggtgcaattttgagaggtgaacacatgcacttaagatgtgcttctcatattctgaacttgattgttcaagatggattggaggaatatgaccaaagtataaac

SEQ ID NO: 44486 - DNA, 2264 bp, Cannabis sativa
aggaagagaagaagaagaatggttcacttgtgagcattcatggtctttttagtcttattagcaagaaggagtgacttgggtgaggagaagaggaggctgtaaaaaaaaaagttagggttagtattctgttttatgaggttttaattaattttgtttaatattaaattaattttttaaatgttaagtgtaaaataaaaataataataataataaaaaaaaatctattttgctaatttcactttgtcaaaaatttattttgacaaattttacaagaggcgacattgctaaaaatataaacagaagtggctcatgtttccacatttgtaatgacagacagagtagaatcaaaacaaaaaagaaaaaaaaaataacttattgtttttcaaaatttatagcatcttgttcattgttcaaagaaaataaaaagaaatttatagcttcttatcaagcacttggtggctttacaattattaaccaaggccagagcttggaatcaatttacactatgttttccctcttatattttgtctgaaaacctaggacaatttggttcacaacaataatcgaaaagtgcttaatcaataaggcatgcttttctttctttctttcttttttttttgattaacatcaataaggcatgttgatgatcattatggaatatggagatttacacaaaactaagaccgggtgacttctttactcctctcttattcatggcttctctcatccttcttgcttcttcccactgctcgaaagtagcataagcatttgacaagcctacatatctaccatcatgatctggctctgcctctataagctttctaccaactatttctgcaagatctagtcttccatggtttatacacccactcaaaagagcacccagtatttcagcaataggcttcatcggcatgtcaaagacaagttgaaatgcctcatcaacatgtcctgcgcgtgataaaacatccaccatacaagcatagtgctcactcttgggtgtcataccatctttgctaagacattcaaaaaaataccaagcttcctttactaatcctccatgactacaagcactcagcaaacataaatacgtaatctcatccgggacaattggaaccattgccatttccttaaacagatcaagtgactcttttaccaaaccatgtgtggctaatcctctaatcattgtattccaaatcaaaacatcagtttttctcattgttcctccaagaaacaattctaaagcatcatctattgccccacactttgcatacatatccacaagtgatgttctcagcaccaaagtaagaggcaattcattctcaactatataattatgcatcaacctcccattctcaagttcacctaagtgggcaatagcacacaaaacactcaccattgtcacctcatttcctttaattcccacattctgcattctcttgaataaggtcaaagcctccaaatactctccatttttaaggtacccatcaatcaaagaactccaagacacaacatccctttccggcatcagctcaaacacatgtcttgccgaattcatatccctacattttgcatacccatctaacatggcagtccaggaaacgaagttccttcgagtcaaattatcaaacaccttgcgtgcacatccaatataaccgcaactagcatacatatgaatgaaggtgttttggataaaaatatcagactcatagccatgtttggcaaccaaagcatgcactgtctctccgagctctctcttcaacagggaagacgaggccttggtaagaaaaagataagtaaattggtctggcttgatcccatctcgtaacatttggacaaaagctgaaaccgaacggttcggatttgggctcttggagtagcctcgtattactatgttccaatgaaaagtggttggattggagaggtgggaaagaattcgaaaggaataatcgacattgcccagatgggataaggccaagaaagaaaggattctggaggcgagggaatgatgttggtggagtccatgagtgagtagaagagtttgaatctgcttaagctgggccactgatttgcatttgtcaagaagaggaattaggatttgggataagcttgagttttgtatgggtaatgttggttttaacatttaaagatttgtggagaaaaagccacgagagattgatcattctccaaaccaaaggaagattgagtaagttataaaccatttcttaataaagccactaatgctagttaagtggtgaaggaggaat

SEQ ID NO: 44487 - DNA, 3462 bp, Cannabis sativa
ctcaattcaacccaatcagttaacaattaacatcaagaaaaaggttgggtcatacaaacaaaaaaaaccaaataataatagagagagaatgtgtttgtaggttgaggtggtaagttgataggtggcaaaagaaagtagccactaagatgttgccaagttgggcagaagaggttagaaattggagtgtggtatgagaatgtgggtttgtgattcgctgtcgcttcctctcgcaatccttaaggcacaccctgatgagtgatgaatgtgatgatgaatcaccctcatattttcttttttttttatcatttcttttctccttattccactttcccatatttcaccctttctctttcaatttttttaccaatttgccattttgctttttgttttttagtaggcaaaccgactttctttttttcttttttgaaacggtttagatggaacacttctagtttacttgattgacctcctaaaaatgcttgagggtagatgggttcaaatccaaaagaaaattttttcttttatgcttcatgtattatcttacttcaaaaatattttaaataatgttactctttcaaacaattttagtatattgtctctaattaaaaaaaaggagaaaaaaaaaaaagcttatattttagagaataacattatatgctagttagagtaatttggtgtctctcggtgtcaaaacacaaacttattttatagctggttaactcaatttatggcagatggttaactctcaattaatgattcaggataagattcttaggattcattttcctatcaacaattctatatgctcgatcaggagtgttgccttcaattacaatctttgatcaatctttatgttcgaaaatatatgttagaattttttatttcaaaatttttttcatggcagtgttcattatatttataatatcattcttgtaaattttttaaaatttttttaagaatttacagtgacagaaataggtttcaagttttttgaatacgcctggtatactaaaatatcaggaactttgttttcagtactgtaaactattcagaattgtttataaatgtacatgaatgatattatagctataacaaatatctctataaaacaaaaaaatattctagtatataatttcgatcaaaaaggttgactaaaaaattataatatataggatatatattgtaattaacagagcttaagtatatcatggatctctttgttgaatctcatgatcttttattttttttctttgcgctttctgatcttcctttctattgcacaagatacacatggctggtttagattcaccaattggccaattacttactcggattggaggaagtggatagggcggattagcataggattataggaacaagttttggctgtgtactatatttggaaacgtataaatttgtgtatatttaagaatatgcccaatactgttcagattgtaaatgagttgattaagcggaatattaaatctaaatgtagttgctatagtaggagaaagttgaccacaagagaagagaaaagtacatttctgatatggtgaaaatattgtaattgttcaacttcatttctttgagttcgttttgaaattggtgcttgttgattttatgaaaattcttctcctttcattaaatagaaaaatatattaaacaataaaaaaagcattatatatatgtgatatatttttaataaaggatatcttacaaagtatacgtacttaaatttccagtatagctatagtaaatattacactaatttatatatgttgaaggataaaattttgtataccttgtattgtacaagcccattaggtttagtatattgctcattctcccgttgtatatgagcaatatgatttaatgattctcttctctcttcatggtactagagccatggctcaacaaatcccaaaatctcaggtaggctcctgcggtggtcttccttctcctaccgataaaactcaacataattcttatcttctcaactctcaaaatttcctcaccctaccttcaatgaatccacaattttcagtcaaattagatgaggatacatttctcatatggcagaatcaattactcaatattttcatggctaatggtttagatgggtacattgatagaactcaacattgccttccaaaatttctagaccccggcaatacactcatgaatcctgcattcacaacctgacagcggtacaatcggcttgtgatgagctagtcttttgcttctctctcggaaggaaccgatgctaagctagattgttagctattgcactttaattaggaggtctagaaatctatgttgggttttgtgccttaactaaaattctatttcaatattatcttgaattttattatcaataaaggaacataatttatcttattacttgcttagcatgtttatttcatgatcatatgtttggtatataaattctattaaatcattatcacattgctattcatgattattgttttatctacacagtggaaaactataatttaacagtacacaggatttacagtggtatgataatcaacaatttggtttacttacacttgtatagtggaatgtcttttccaatgcattaacaaagtaagcttgtattggatatatggttatacatcaaactggaccgatattcacagtggaaaggatatcataaatttaccgtaatatattttctaagtaaatatcacttagttgatcttagatcaatgatctcaatcctgagattgttatgatctggtttaagtgtattacttgtgttctttgacttgttcatttaagccaaccaattggattggtccaatacttatatcttgggaacacggtagtataattgagtgggagcgctaatcatagatacaaaatctatagcttctataatcacatggaagtgaaacaatggtctccttcgagcttggctaaatgagtttaaatggcggagtactcatttgagtaattatattagtttactaaaatatcatttcagtaattatataagttttaataaagtggcaaaattgaaacccattaggctcactaagaaattcggccataaaggtttaagtaaagccaattttatcttcttctttttttttttattttaaattctaaacctaaacctaatatctatcatataaatagaatagctcttatttacataacttaatttgaatctttgtcgggaaaaatagaaattaaagagagctccgagctccttctattattgaatccttcttcttcttcttcttctcaatatcttcgaaccctatagtgtatgagtgatttccaacacaatttaagtcaatactcaagatagtttgaaagattgtgtagtgttcttatcacttgaaggataaaccaggttcagatcttgatcatactgtgcgacagaaaggatcaagggttagagatcttaacattaggagtcaaattattctgttg

SEQ ID NO: 44488 - DNA, 1481 bp, Cannabis sativa
tttctagtcagcctcattagtgacgtgcgttgaagtgtcactatacacttttagagttactcaatgtgtgtcactaaaacccaattttctagtaatggtggtaattgcttcaactaaaattgtgttggcctcttttaccattatttggcagtcggcttcaaatgtaagcctacatagaaatacttgtgtgagtagtagcacctatatctacccaccatgtattaccaggtacaaaagtcaaactaactttataacaaacaaaggtaaaaagtctacctttcttcatacgccatgagatgtacttgggacattacttcttcacatgcccaagtttcttacaaaagaagcacgtaagttacttgtgaaatttataatttttatgatttttactcggcgacaatggaaaatacgacggataaccattagagtcacatgggtgagtttcgaaccttttatttagtgggacaaacatatgcaatatttggatgggtttagggggggttatgatcttggaccattttatccctagacctatagattacttaagttggaagggcaatttttggaattttttcctaggtttagaatggttatcattaacttataatgactatacctaagcattttcctataatattattggtgcatattaaataagatattttgatttaattaatataatgagaaactattaattaattaattaattaattataaagtgacacattaatatattcactactaaaattacttacatttagtaataattttatagtcacaatataaatttttttatcactaaatgtgacttttagtcacaacaaaaaaattaattattttgtgactaaaacatatatagtatttaatatacaagttgtgactaatttaaatttaatcacaacaagtattgtgactaaaaacatatttactcacaataaattgtaatttttgtaactaatacttttagttacgaatcttttagtcaccatataaaaataataatttataattattagtcacaattttttttacttttagttacaagttttgttcaatctaagattttttgtaatgagtgtatattaggattggacacccagttcaatcaaacatttttcttttaatctaatccaatttaatcagtaattggatttgaaaaattatcatcccatccaatccaattatacctaaaaattaaatccaattcaatcattgaattaaattagtcttttaattgaattgtatgtttgggtaacttaaaatgcagcaattaatggacaagagattaagttgtttctttatttattaaaatgaaaagaattaaatatacattttattaagggaatctttaaaaatatttttctttcatgttttatttataattttaaggcctaaaaatattaattacaaaattacgtatatgcttgtacaattttaaaattataaaaatacactttgctcaacaaaaaaaaaaaaaaaaa

SEQ ID NO: 44489 - DNA, 2819 bp, Cannabis sativa
  modified_base (2071)..(2071): a, c, t, g, unknown or other
tgacactccatatttttagtgactcgcatttttgaaacaccgaatatttagagtctaatggtttgtgtcactaaaacctactcttgattttttagtgacccacacttttatgcgtgtcactatatagtgtcactaaaagcctaatttgtagtagtgaatgtggttgaatgatgaagaatgtggtgaagttatttcagattgttggcagtatgctgatgggctgactaccttagttgactatttagatcaatgtgttgtaaatctacagaagtggtacaatggtaagttttgtcagctaaagagagatatatcccaagctcaagacagagttaaaactctgcattctactgttgctttgactttggatcaccctcaagctatcctagatgttgagactctcttgaatgaatttttagctaatgaagaacaatattggcagcaacgttctaggatcaattggttatagtttggagattaaaacaccaaattctttcatgccaaagcctctgctcgaaactctaagaataaaattcgttccctcttggataatggagctaatattgttacttcaaaagatggcatttcatgtattgttgctgattacttctaaaatctttttactgcctctgaggatgatcattgggcacattcccatgttctatccaccctttccactaccattactcaagatcacaatgactttttgctttgtgaatttacatcaaatgaagtcagtgatggcttgaaaagtatgagtgctaataaaagtcttggtctcgatggtatatcagctatgttttatcactataattggaatattgttggtcctttggtaacaaaggtggttttatatgtgctgaatgaaggaggtatcctgctgcttttaacaaaacacatattacgttgattccaaagattaataagcctaaaaccatgaacaactttcatcccataagtctgtgtaatgtcatctacaagttaatctgtaagatgctagttgctcgcttcaaaatagttttccatcatgtcatctccgagactcaaagagcttttctcccaattaggcttatcattgataatgttcttattgctttcgaacttgtccacagtttgaaacatagaacacgaggtcaaaagggatttggtacacttaaattagatatgagtaaagcatttgatcgggttaaatggtctttcttagcagatgtgatgggtaaaatgggtttcaatgtgcactagatgactcttattatgacatgtttgcgtaccaaccatttcttatatcttataaacggtgctatctcaggatcaatcattcctcattgaggattacgtcaaggataccctcttttcccttacttatttctcatatgctttgagggattatctagattattgaaatatgaagaagctattgggagactcaaaggcatggctatatctcgtcatgctcccaccatctcacatttactacttgtagatgatagtcttttatttttccaggctaattgtcgatcgtgtggtgcaacaaagtgttcattggatatatatcaaagagcctcttgtcaatagctcaataatgacaattttgtcatgtccttttctccaaacacaacggaggctgttaagctttctttccaataaattttggggatgccaatctgtgagtgccatgagaaatatcttggccttcctgcttactccgagtgtgataaaaatgtttaacaacattaaggaacacatttggaagttaatgcatgcttgttctgataagcttttttcaattagtggtaagtaggttcttttaaaaggagttattttgtaacaccctactagtttaggcatgttatcgtgattttatactaattgtgagctcgttgctaatcaacgggtttattgacaatcgtgattaattaaaacttttttaaaatacttaaaaataccaaaataacatatatatataactgagatcccgtgtacaaaaaatttacaacccttacaaagtatgtactacggaagttgtcacctagtgactatgaaaaatatgtccagctgtcccaaagaccgtacnctccaggcctaaccgctccgacatgtacaatcttcatccgctcgctctcgcgggtgctcagccttacccttgcccttacctaaacatccaaacagtatctgtgagtcgacagactcagtaagaaaagcataatcaataacataactacaacctggattataatcaggcgcccagacacccaaccataaccctatccccgtgtcccacacggtactgagtccagaacgttcaaacgatagtactattgattgaccataatatcagcctatatgcagtacgctagtcatactctagtcgtaccgatgtgatacttcaaatagtgcttaagacaacatatatttatcaatatccaatataatactaaatatagtgatactgttattctcatgtaatctaacaagcttaacaaacatgtagctaaacatgtaaacatatatgcatatcattatactaatcttacctcactttaaaattcaagtgtgtcgtccaacctaataggaacaattgctcgacgatttataggcccctaaatcacattaatcggaaaactgatgagtgacacgctaaataaattttaggggacttaaaattgaaactaaaggtttccctatctatggataacatggtaataccctaaatacttcaaaaatgggaaaaaactaaggttcttaaaagagtaatttgcggcataaatacctaagtttaactcccagttacaaataaatacctaagtttaatttttggcagt

SEQ ID NO: 44490 - DNA, 1312 bp, Cannabis sativa
tcacgtaatacgcctatggtagttagggtgttatagaaacaatcctcatatatacccaaagttggcctacacgactgagctccaccccaacctaaatggaccaacccccatacccaaagtttcctacatgaaagagatccaccacgatttgaataatgtcaccctgactggaatgaaccaacctccctctacctcttgtacaatgtgtcctatgatgactctctttctcagaagaataatgttagttttaattacgcccatggtcaacaaaaattatcaaaaagctatcaaaaatacaatttgaaagaaatcagataaattctatcgaaaaaacattgaaaatcaattaaagatgaaatcccatctaaaagatagaattttgatagagtttcataggattagtcaaattgcattatcaataggttctcgatgcgcttttgatagcagtgttattttattttatatgtttacaatttttttatgtgatttagataagattcgatacattttcggtgaacatgggaaaatttgatatattcttgaatatgaatcaaaaaaaatatcatccctaacctccctaacaagcatttattgagtgattatcgaaataacattgaatcttttaacaaaaaaatgcataaaacttagaaaaatgcaaaaaaatagattcaaaattttcaaatatgtatatataaacatacaaaagatacaaaggaatgcaactaatttgatttaaaaattttggtccgaaaatcccaccacaacaccacctagtttcctattttgctcattgtcattatagaaagtaaatactttccttattttattgcttattagttttaaaaaactaattgatataattaatccctataaatagtggaatcatctcactattcaaggataagaaatttattatgagagaacacacgagagaaatctagatttaaaagtaaaatactcagaaattattgtaagagcttttcgagagagatcaaggccttcttgcttctctactctcaagtaaatacaactaaagaggagtaggctattaccatcatcaaggggacaaacctttataattctggtattttttttatacttaatctcaattcatatttattgcttaattattcttaatcgctttaacttgactcactgttgttggctaaaagtgaagtcaacattatgattgttgtttattttacaaagagtatgctttgaaatatttatgtttggtatgtggaagtagcagatggattaatcctaatacccaaggacaaaaggttctacatacggtgatgcattattttcc

SEQ ID NO: 44491 - DNA, 2824 bp, Cannabis sativa
tttttttgtaatttattttttaataaacttaatgtttattaatacgattataaaaacatattaaaatgattaatgtatgtttaagtaattaatgaattattttaaaaaattaaaaaatatttagttagttgaaaccattactttacttatttcttcttctccttcaagttaaagttagattacaaaattcacaattcattgtataaaatatactattttttttttaatttaagactttatataaataaaaatactatttttataatttaatttaatggaaacaaaaaagtctaaatttggatttatttctattataaagtgaacaaatattaatctactttatatgttatttagacgcaattttttatcaacatattagttgacagtagaatcttgtgaactaagttattggctggaaaatgaagaaattattagaattttatgctctaaataaaatttgttttaatataatcttatttactaattaataaaagatcagaaattattttattgatctaattaacaaatatattaaaataataattttgtttgataaaaattaaaatagataaaattaatatttaaataaatacattagatgaatggtattttaaaaaaaaaaatataagtttctttcatttaatgaaataaagtgacaaaaatcaaagccctaaggccttatagtgtatttttcgagctctaggcttatggttttgggctcactatcttttttctagcccacataatataaccctagtccagtagagagcatatataaggaaatagatggaggctttgtcagataagtgagaaaatctaattcaagtgacttgacctaaatctgactagaaaaaactctctctctatatattagatttatgaattctctctctaccaatctctcttagaaatcggccctatattgagttgagtaccgacccactctatttaagatggtactcaaatctttgtgaaagactgtgtagaaaatgagtttgcaaattcaagaaagagactcaagtttattacttggcaataaccatgctacaaaagagaattaagggttatagtaattgaatagaaggagacatttaattttgttgtaaccaagataaggatttctagtatcttatctgttatttaatcgttttatgaatttcatattttaggatgttagattatttatgtgataatcaaacatacatgttaataaattaagaccttggtaaaataagttctaacaaaaacttgtaatgaatatatagaaagtatgaaataacttatgaacttaaagaagacaaatgatttgtagagaaaatggtgcttgtattgataatatgatgttctcttgctacaaatttttcatccctctctttaatggagtgaataggcatttatagttgagctctattagcctttcttacaagcagaagcctatgtgctcccaatggaagaccatgtactactctaatggagtcaggtggcagtagaacagaagtagtggtggttgggtgtcaagtcgtatgggcaccactttgtgagcccttgggcgaggcacctctttgtgaggccctcaagtgaggcacctctaggtggtgcccttgagcaaagcacctctttgtgaggctctcgcgtgaggcactcctaggtggttcccttgagtgaggcacctctaggcggttcccttatgtgaggcccctcttcgtgagcccttgggtgaggcacctctttgtgaggccttgagcgagatgcctctaggtggtgtcgttgggcaggtgactcatggtaagttgagggagctcttaggcaagccttaggctacttgggtgagccttgggtctcttagcgaatcttggatttcttaggtgagcccttaagtgagacatggtattcttatggcgagttgataaactagcttcctctaacagacatgtagacggtctcagcaggagatggtgaggcatcaaaagtggggaactaccctcctcgagatggtcacaaactggaggagaatcatgacgaaaaccttcttgaagaagatgaccaagaaggtaatgatgaggacgaaagggatgactacgataatgactatgatgataactagagtaatttgtgacataaatatctaagtttaatcttttatttttaacggtaataatacatattgacctcatttttggtaaacaacgtggagtcaaataaacgacaatataagtgtttgaataatgaaaataagaaagagcaataaacaacacagaattatcttttttaggattaagatcaattggtctaagatcaactaagtaatattgtaaagaccacttaattttaatatgaaaatttagcagataattaggacttaagtataaaattagattcctaattatgatttatgaatttatagagatttatttgaattctaggtgtgttatttattctatatatggaattttatgtttttcatattttatgtccgacaacattggaatgtgatgtttggacaatagaatcatattttcttatggtttggcattttagttttagttaggcaatatagttagacattgagaatgtcgagattaggtgaggtattgtgaagtgactattttacccctaggccactttagttattaagctttatgtaaggggcattattgtcattttatttaagtgttgagggttaggtgggtccctctcatgttggctgctggccacttagggatatcggcattattgaattttgtttctttagttggaaataagaagatttatcaaaaagaggaaaaacagaaaattggatttttagctctctctctctctctct

SEQ ID NO: 44492 - DNA, 1303 bp, Cannabis sativa
aaaaaatatcctaaagtaaaataaagaaataaagtgggtataccgtaatttcctcaaacaaacccgatgaaaatttacaagaagcccaagcccaatattagaagcccaacccaatcaaagtcagcaaacttcaacgactctctctctctctctctcttcagcgggtactctaacctcgtttgctactgatccgagaggaggaattctgtatgccttcattacccccaaaccaattactgccctcacaggtacgccctttcatttatttttacagagcttttttttctttgatttctctctgtttatgtttgcttctatggtttgtgtacagtgttaaaagcagttaaatcaacctgtgttttgttctgaaaaatagtttagaagaagaagaagaagaagaacataagttagtggtttcgaaatatgctaatattctgatttgattctgttaagctgtgatccaaattgagttctctacttaaatccagagaagcccgattgaaacttcatatggttgtttgatttttctcaagtgattccctctgttctacattggcattctaggtcttttttttttttttacagggatacgatttatttagctgttttccaatttctttccttctttttaatggtgtcagggttgtcataattagataggcatttagtatataggagttaggatgagactataaccttgtgaaaaatagctcagaagaagagcatttgtttgtggttatgtcattttgaaactaatataattgatttgattgttttatgctgtagtcatattttaagtctgtaaactaactaagggagtttttatactttttgtgatgctgaaacttatttcagattctaaccaattgacaagaattgagtcctttccataggtacctacaatttcaggcaatgcacatttttgtattgttagatagtcccacatcgctaatgtgtggaaagataagagaatacataaaaggaatgggctactcctcccattgccaattgattttgagatggaacccaattcaccttatcccatattctaatatgtatgttgcccgtttcagtaggctatagacttgtttgtaaaagccttttcgggcagtgtgaaatttgaagtgttgagcactgtttgcttggtttataagtatgataattttgtggttagctcatgtgtcattgcttattactcttctctctccttttctttctcgttattgatagctttcaaaattgagtccttgtaaatctgcattgttattattgaatgtggtatttgagttttgatattgcagtt

SEQ ID NO: 44493 - DNA, 2553 bp, Cannabis sativa
gtagcttagtggttaactaagtcaaatgtctctcccaaaagtctgtattatattacagtagaaaatccaatgaacaacaccccaaatgaataaatcctgggacatgttttctggttttactatttattgactaattctttctgcgtactgcatgaggggtctgcttttttacactttgaatttggttttctgtccagatatgacaaagcaaataagaaaggtgtagcaagtggatattttctttggttggtgattggctatggagtcggtgagtttcctcgcaacaaacatttgtttttcttttctatttgtatgatatagatgaatatattcactttctcatgcttggttgaatattttttgagttactcagcagaatttatttcagattaactgtgcatgttatcattagacatgtaaaatgaaactacaaagaatagttatgtccatgtacctatttatgcctttgtctttgtactaatggagggttactgcttttttaggcctcttttttacgtatcttgggttgtatctaatggatggacatggtcaacctgctcttctctacctcgtaccatgtactctaggtatcgatttagccaattttctcttaattattagcccttttatcctggtatgcatctcttatttttttccctttggttggaaattgatgtttcttgttttgttttcaggtgttatcgttattttgggactcattagaggtgaactgaaacacctttggagctatgggactgaggcaccatctagcctttcctcagcggaaccataaagcattattagattagtgacctatcctaacatgtaaatcgctgtaaattgggttgattgccactaattgttgtttattgtaaagaatttgacctttttgtttttactgcttaatatggatctctcatctctttttaacatgttataaatccatggtggcaaaacaagagcattgcaggattataccattcaagaaaaccttaccgaaatctggtgtaattggaactcgtggtgccatcagctcttcctatttaattttgttgttgtattagtaaagatcatactgagttaataatatcatactgattgtgttttgataactctggattataagtttaagttcattgatagtagtttgcttattgaagaaacataagaaagacaatacttgctgaaataatggcatggaaatgctcctgtgtgtgattctatttcgcaaggaaaagaaataatgtaatttatatattgtatgctatgcatgtaaattggaaagatagggaggctccgtaacacctagctatcttttttttttttgttttggtttattactattttacatctttaatttacaaaagcttggctttctattttgtaaaatggtattttctaaaataatacaaaacaatgctcttagctcaattttttattttttatttttatataactaattagacaatttatagtaggaataaatgcagaaaatgtacttattttgtcataacaactctagattgaattattattaatttttattttgatacaaaattaatttcgagtactattttgtatcattaaaaaaatggttcaataatttttacaaaacgcgaggtttaaaataaatgtcaagaaatatcgcaattgctattgcaataagtcgtaaatcacatcgacaactacattgccaaaaatcgcaaacatgtcgataaatgtccttcaacacttcaccaacatatatttctaaaattatcgacacacattgcaaacaatgttgatagacattgtgaaaatcgtaggtagaaagcataaattggtcattatcgtgaacttagtccctgcatgtcgctacgagtcgtaaaaagtcatccttaaccttcaacctacactaatatcactagatatcgtgaaaggcatcactaaatatcgctaaaatacgaaaaataaactagaaaatacagaattcaggtagctcaagtttcaggaacaagacaactaaaataaaagaatgatatgtgtagatatactcaaattagcctaaatacaattaaatccaacaataattactaataaattacatacccattatttttttcaagatttatgttggtaagaagtttgggttgctcctacacacttggttgtcaattgagatactccagcaaagggtgctacgacaaatggtgctccggcaaggcaagggtatgtgtgtgtgactttgtagagagggagagagagagagagagacaagaatgagagatggaataaaggggaagggtttagttttattatttgaggagtaaatttgatactaaaaaatagatgtagcatattatctctaatgtttaagatggtagcatacaataataccatgctacacatttaagcgtggtcggaattccttagcgaaatttagataataaaaaacaattgatactcaaatttgggccagccaaagtatatgacagtttgggtcattgtacaaggccccctatattaaaagacccattttttttatcatctatttatattataatataataaata

SEQ ID NO: 44494 - DNA, 1410 bp, Cannabis sativa
gtcacctaaattagttgtcaattgggattgttactttttttttggatgattaccaaaagcctcttttgaagacaacagagattgttgtaggagatcttctaagtaaaccgtggctaatttttcttctcctatttgacacttcctttgatggcttttttcaaggtcaatattaatgcgactttagatgtgaaaggaagtttctttgacatggacatagttatccgtgatatttatgggattgtctatgcctaagctaattggcacatcattggctattttcaagttaaagttgttgaagctcttgctttttcgtaatgtgagaatccaatgtcatcgttttggtatagaaatgttcaatttgatgctaattatctgaatgtggttaataataagattacaataaattatatagtgaaatgaaaaattatgcattgaagtagttcaaaaataaattaatgttatatttatttcaaattttgtaattgtgttttaatattaggattaaactaaattttatttaataaaaaagtgtaatgtaaaaaaatcaacaaaaatattccattttttttttaaaaaaagaaaactctaaaaacattcaaattacaatgaatgcatctaaggactaagcctagaagctaaagaaacattattgtaatacttctcacctgaagaagcaggggcaattctctcaattcccattggtcattgcgcaatgtttcgggtaaacttgtttggcggtctgagaagcatggtttctactctgttaaaaatggttattggcttgcaaaccaagacaagaacgaacctcatgcttcatcctctaatagtaattttccttggtggcaaacacttttagcacttgaaccttcctcccaaggtaaaaaatttttcttggaaattttcttctaactagattcctattaaggtcaatcttcacagacatgattttcttaacgatgatttatgtccaatttgtaattgtgaattgaaaactatcatgcaatgtggggatgtagtaagcaattgcctcaactcgaaaattatgtgcttttaaacttgataaccgaaatatgattgtaaatagtatatgtgatttcatctgcaattatcttctacaacttcctcgcacaaaaattgaattggttcttgttacttggtggcgtatttggttctgtgtaataaacaagttcataaaaatttaaccattttgcctaaatttattggtccttgggcggctaactttctaggttcttatcatttaataaaaaaggaatttcatttcccttgatcgtactacagcaagtgatccacctcattggaaatgccctccttcaggtactctcaaggccaacactgacgcaatttttggctctagttcgcactcgagcagccttggtatggtgatcagag

SEQ ID NO: 44495 - DNA, 880 bp, Cannabis sativa
aattaattatatgcaattgtattttgtcgtagcaatttcttcccatatattattaattaattttattatgatgtcatgtaattatagataaaacacaaagtcaaagattggtcactaattggccgagtcaagaaagttcaaagttggggcagtggacctacgtactttaatttttatatagtcaaaatagagaattcttctatatatttaggatatatataaaaagaagggatacacagcaatatacatgtaattataggtacgtatatgtacatgtaaaacacaaagtcatctaattataaatatttgtacgtacgtacatgtaaataattacacaatcatgtaattataaatctatgtacatgtaaaacacaaagccatgcatataagtatttatatatataatcattggttggggcagtggaatttttatatagtcaaaagtgaaatggaaatatttagaatataaaaaaacataataataaaaaaactgatcacacgtggtgttcttttttcttttcttttgttttttgtttttttttttttttttgagagagaacattctgaatgggggaaaatgaaatattgtcgactagggtgttaaagaagctactttattacctttggaattaggggtctttctgaaacatatttttgtgttattgagaataattttgaaatggttatcaatgtattgaagggaacttgtttcagttactacaaaaaaaagtcatttttaatgataagtttttagtcataagactcgtaacataaattttttataaaaaaatgtaatttttagtcacaataaaaaattacttgtaactaatatatagtatttagatacaaattgtcactaattttgttttagtcacaacaa

SEQ ID NO: 44496 - DNA, 1066 bp, Cannabis sativa
tgtttacctttgagagattactttttaatctgcaattttcatggatggtattaatagcttgcatgtgtttctttttgcacccaacactattgcatctttacattatgaaataaaagtcttaattgtttgtctttgtaaaggattattgcagatggtatatttggaagagtggtcggttctagattgggactatacttgttcattgtctggggcctttgaagctttgaaggctagcactctccgtcttctagttgttgcaggggcaagggtatatgtgacagacttttccttgaattgtttctcattgtcaccctgctacaccccgtttttatcatcagttcatttgcccagaagtttgacatagttaaagctttcattatcgcttgctgcaggccgatgtacaaaatgtgaaggacgctatttgctcagcagttgatgtgatgcaagccatggcatcctcaatatgcttattaacctcaaaggtggttttttctgtatagttgctttagctcatgtcatgtttgtatcttcctacttgtagttacctaaaatatcattatcaaaattcaatagtaactttttttttttttgagttgccattggaatggtataggtattttctattcctttgattggttagcaattttaaagacccaaattctgcagttttagtagaaaatatgatggatttgtttcaaattttctggttgataggatggcgaagtgaattccttggtgggcgaagtttcaacagtaacagcaaaggagcgtgctctgcttggtcattgcaaagatttattatcaacagttgcagctttgcaggtaagtgatagtatatacaattgcattattataatcacggttttagtcccaaactttgggagttaaaattacggaaaactaatcattgttgtagcatagtatgttaaaaaatgttcttaatcgttttctctaattccccaatttataaatatatagacaaatattagcagaggatgatcgtcaaagctaaaataatttcttaagatacaggcaccatcgtactagtacctaataatttaagagg

SEQ ID NO: 44497 - DNA, 3917 bp, Cannabis sativa
tcctccgctacagtagctgcgatcttggtgggcttcgaaaccgcccgtttcttcttcgccatgagaggaaacagggagcttcacatgccatgagagataagaatatcatttattcttatctctttaatcgttgattaaaagtgaggtcaagaaaagtcatttcattattaagggttccgaattctattcttcaaaagagttctaatgctataaaattttaagcttttgagagagagcaagaaactcaattgtttctcttctcacaagtaatacaagtaaaataggatgaactattaccactatcatggggctgaacttctataaatctcactattcttatttattactttcatttaataattatcgttcattcttatcgctttaattgactcagcaaaaattttggtactttcactgagagcaaaaagaacactagttatttctttgatcctctccaaagatggtagtaactaccaagagctcctaaactaatgaaaaaatctaatccaatggctacggatctagaagtgctaactcttattaatataggagcgatccaatggttgtagatcctgatctcagcacccgtcttcctccacaagttccaccatttgtaggatagggtgtaataacccttctggttgggttcaccctaggcacacaagaaactgtaaccactagtactcataccagattaattggcttgggtacttgaaatccatttgttggagaacctccagttattatcgatgaagatattgagttgtagaagctgtatgatgccttcgcaaaatgcaaaaacatataaacactcttcaccatgattaggagcataacggagaagttgtgaatatagcatcagacaacgaaaatgccaattctaggagtggatgaatcaacagatggaaatcatgagagcataacaagcaacgattcataatcgctccaagtaggtgatcgtgctgattcggtgagcttatcagctaattggacaacaattagtggaagataatacactcatacgggatccaaacagagagaaagaagcctatatccctaattcactttactcaacatacccaaggtaatggactgtccaatctaaggccacagggtcaaactgtggccatgcagtagaccagcaggtttttccagcccatcatcttagagggaatggtcaatatcatttctatcctcagacggatataccaaaccaatcaaatactgataataaccaaacaagaaggcctccaagtgaattagtcttccacaagttgggactcgtacatgatttgagagatgctctgaagcgcatatggggacaggatggacacttcatcccccctaatattcaataaattaatgtggataatatgttcccgatgaagttctaaaaggtccacaagtgacacatcttcgtcaataggcaggtcaggttgaccagtggtccaagcctaaattgatcaatttaagagccttgttcaaagcctaactggcccaaaactcatcaacctagagcttgatcagacaccaaattccccattttcacctcaaatcaatgccctcaatctgctgcatgagttcaaaatgcccagatgggcaaagaagaagttctatctcacattaagtaatttgaaatgcagatgaacttgcaggttttaaagggtgatgtacggtgtagaatctttccagctaccttcgtggagggtgcctagcatttgtactttaagttagcattgggaaagtttagttcatggaattctttcatggtagagattcacgcacagttctcatcttcatggcaactcctagctcacttagaagacctggtcaaagtaaaacaaatagcatgggatcctttaagagactacatcattagtttcatgactttggctacaaaagtgaaggcattaatcgaggaaggaaaactgatatctgtcctacgagttatagaacccctaggagaattatagaatgatatcaaaagacttaatgtggggtcaataggagagtttctagactgagcagatggattcatcaagcttgaagaaccagttcagtgagtagacacaattggtaagaaaaagaccaataagagtcacacaactccagcaaatacatctatccaacataatcagaagtcctagcatcaaaacaatagaactttgggtcaaagtggaaaaagatacaataacgacaataataaaggtaattggaagaaaggaaaattaagtaataagtccaagcaatagtattctcgagagagagctccaaagttcaccgccttcactatccttattgaagaaatagaaaccattttcatagagcgccagttcgtggtgtcgtagaagagaccccctccgatcaagaaggacataagcaagatagacactactaagtacaatcgctttcatggagactatcgccatgataccaacgagtgcaataatcaaaaacaagaaatacaattcctcgttaaaaagaataacgagcacttacaaaggtacataaaattcgacaaggactaaagggctgcccagccatataataatcaaaaccagttgatgcccccacctgtggacggaaatataaaagtgattattgggggtccttatattgctagagactcaaacaaagctagaggaaggtatgctcggaccttgcagtacgagcaaaaagttgaaatacttgttgtggaagaaagaaaaccaaaatagttgcgtagagaagaactagtcatctcatttagtcaagaagagtcttaccatccgcacaacgatccccttgtcgttgaagtacaaactgcaaatatgacagttgctcaaataatgatcgataattgagcttcttcaaacattttttgtaaactacaaatgaaaagatagggctttgactcaatgacctggttcgttggacatggctcatacatggtttatctggccaaagtatagttcctctaggacacaatcaccttttgctcacagtaggaaaagctccaaatgccaacgtggcacagttttttgtaattgatgtaccttctgcattcaatgtcatgttgggttgaccagccttatatgatttgaaggtagtaacctcaatttatcacctgtgcatcaaatttccaaccagatttagagtaggttgtctaaaagacagtcaaaggacttcacaagtatgccgtaacctagccttgactaaggctaaataagaagagacatttggctagagttcatagaaaggtaaaagtattgctaaataaggatcctcccaaggcggggatgaagacatggatcccgaccttatggaaccaagtacggatgttgggtcggtcgtagagctagaagaagttgaaatttatcctgctatgccaacctggaaactcaaaattggcaaaactttcttgctcaaaatgaaattagatttgataaaatttctaagagcaaatcttgacatattttctttgtcgcatgaagacatgatcgcaattgacccaactgtcatttctcatgacctcagtatccatactaattttttcccgtacatcataaaaggaaactactagataaagagctcccataggcattaatagaataagtagaacgactccaagcaaatagattcataattgaggttttttgccttacctgggtagtcaaccccataccggtgcccaaattgaacaacaaagtggtgggtatgctacagtaggtcatgagatcctaagtttcatggatgcctactaggggtatgatcaaataagaatgcatcttcccgaccaagaacacaccagctttcaacggatgttggcttgtattgttataaagttatgccatttggacgcaagaatgttggggcaacctacaaaaggctagtcaacagaatgttcaaagaccagattgagtgtaacatggaagtat

SEQ ID NO: 44498 - DNA, 1336 bp, Cannabis sativa
caccttctcgacatgtcgcgttgcgattggctagtgatacttcctataagttattatattaaattatgtgggatttaatatttagttgacaatacgatattaatacataagagggtgctaggtaccactggtgcccattacatttctcagttataaattatctatataatatgttagttttttttttttttttttgaaagaatataatatgttagtttaaattgtaattatatagtttattcgtcagccgaatttattttgaagattaattaaggaggaatatactctgttttagattttagtaaccattctttgaggcaccttgggaatagtatttgcagctttctttattcccatttctactatgtgacattacaaagaggtcacacccaactatacttgtgtggccaagtcaaaatcatcattttaaagaataacattattctcatcaataaatatgtatatatacatataaacgatacactagtcctcaaaaagtataaacaaatcttgaaagcatccttcaattttgatatctcattaaccaacacactatttaagtaaaattcaaaattgactataataaaaagggtaaatattattttatactttgtgttttacaaaagttaccaattagattacttattttgttaaataataaaatggaccttatattttctaaaatggtaaaataatacctttaatttaatttttaaaaacttttttttaatataaccaacttgaagacaattcttaacacgaacagatacagaaaatataaacagttttgtcataacacttttagatcggattattattaaattttattttgactaaaaatcagttcatgatcctatttgtaccattttaaaaatacatggtctattttttcattttaccaaaacaaatagtctaataggtaatttttgcaaaataaagggtccatatttaccctattttttagtgtgaataaataaattaaaaaaaataaaaaagagcttgggaatgtaggttttaatttgtagaaattacacctagcttcttcttcttttttccattaaattatgtttgtgagaatttgttaatatttctaagattttctgtttaaatttcaaatgtataattttcagatttctatatatttatatgttaacaaatattccataatttgttcacataaaattttagatctagctctttttttctgtgagaaaaaatataatatcatcaagataaacttacgacaataagttcgtaaaatttgaaacttaatcattacaatattataaatattttaaaataataatttgagaattattttatttttgtttttgaa

SEQ ID NO: 44499 - DNA, 1875 bp, Cannabis sativa
taacaaaacacagggtccaatctataacttttgcaaaacacagggtctaaaatagtatttattctaatctatattataacatgtaaaaaaatgtaatcaaatgtcaagaattttaattacatgagttgacttaatacttgttgaagtgtaataaattacatatgattgcactttttagtgttatctttaatattttttcttgtagtattgtcatcttttgctaaaatttgttttgaatttattaaacctattttatggatgttatcttttaatttctttcgcatttacttaaatattgacattttgttttaaacgtgggtacccagactttgcaaactattttttaataaatacaactttatgctatatttattttaataaatgggggcattacataactagctactcccacctcaataaaaatttaaatattatattcacagcagtaatcagttactcccatgttaccagaacatgaaaactacttatttcacagtagtaatcagttaccaatgcattactaaaaaaaatagtaagtagaaactatgaaaaaaaaatatttttatactagtaaccgattacactcaactactcaaacaataaggaaaaaagattttttttttctttcatggaatgaaatgttagagcactcccattactttctctaccatatctttcaaaaaatatcatcaaaatcactctttctttattatcctcaagtttttacattacacactggtctattgccttacccacaagtgtgatcatatagttgcaacacctattttaggagcttggaatcccattatctcactatcgtattctatggtgtgacaatcttggagcaccatcacttgcctcaaattctgtttttcacaccagaataaagcatatagaaattaatctttgtttcacctgagacagggtgatcacataattaggttgacattcgtcatgttttcacaaaacaccaagttgcagacatatctttactaagcctgtgtctatttcacagcttcaacattttaaaactaagttaacacttagctaccctagtgtaacttgatgggatattagaaatcttaagttggtgattagttagttaggagctgcttagatgtacttggtttcacttggctatttgttttatcaaaatatccaatgattattgcttatggtgaagtaaatatctcaacaaatatggagcagttgttgttgttgttctccaatcgagactcatcagttatgaccactgttagtcgtgacacttatgtacaggctaggtctgcatttaggacccactcattttaagggccaaataaaaaaaattaccttttaaaaatatatatatttttaatattttttaaaaatatatatatttaatattttttaaaaatatatatatttaatattttttaaaaatatcatttatctttatagtaaggcctaaatttaagttatatggcgaagaactataaactgaggatgtttgcagtgtaagcggtatggattttagttatatttttcaaacaaaaccatgcatgcagttcttacaatttctccgtagctacaccacaagacctcaaaactttaaaaattattatgcaaaaatatagtgtggtgtggtataatataagtggtttatactattgtcaaataaataataatatatgtcaccaacacaataaaaatatacataatctaatgtatatacacaatcttttagacataaaattaaaaaatatatatatttaaaattgtaaaccccaccaaataatggtacaataaaagttaaaatgtggctcttgcctatgttcatttttttctaagtgtataaaaaaaaaaaaaaaacctaaaatttttttgttagcaaag

SEQ ID NO: 44500 - DNA, 525 bp, Cannabis sativa
tttttttttttttttgtaagccaagagtgtttcgaggccttggctttcgatatggatcaaaatgtgttaggccctacgattcttccatcttatcgagctgctacctcacggtattgactctaacattagtatgatattgtccgctttggttctagaccttcacagttttgtttttgagcacctttccaaaaagtctcgtactaatagagaaagtagaacacttatatctagacaactcttatatattctttcatgtggaacttagattgataccccaacaaaatggaactagacgactcttgccaagtacctttgggatatggaatggaaacaagcttttttgtgggtaaagtgggtgaattgtatttacttgaaaggccaaattttgtggtcttatgagcttaagcaagagatcgtgagttactattagaaaaaaacttatcagactttgaggatattctcccaaggtgcaatccaagaggcttgtgtcttgaacaattcaagagatgttttagtcacaagtaa

SEQ ID NO: 44501 - DNA, 2773 bp, Cannabis sativa
tctctctcatgtcagtgaagagcaaaacctgcgaagaataacgagaaagatcgaaacccagacgagacggaagaaaaaaatgcattcgtttgggtacagagccaatgctttgctcaccttcgctcttaccattcttgcgctaatgtgcgttatagcatccttctccgacaatctcaaccaccctacgcccactgcccaagtccaggttcctcttttcctcatttccttcatcataataatgatagatcttggtgtcaggagtctataattcaatttcgaattttgaacgattcccttttggatttcatgattgaaatttcttaattttgggttggtttctttcaggttttgaatattaattggtttcagaagcaatccagtgggaacgacgaggtaaatgttgttttttttttcttttattccttcgcgttttaatggaaacttgatttggattttatctatctctaatttggtccgtaaattgctcgatttgtatgtcgacgagtttgacgatgactttttatttgtgggatttaggcgttttacttttgttgcttgtgtttctttttggagaatcacaataaagtttgagtctttggtttattatttagcaaaaccttgtgtgttcttttaccaatttctatgtatatattagcttaatgttcttaaattagggtttgatggttaagtttattcataatactaaaattttgtatacctcgttatgtgccttctcttttgcggtgctttgacgtacttgttctgaattatgctttcggatcaaattatataatccaataatatattgaagaaatacatcattattggtcacatacctataaacacttgtctttctgtggttaggggataggttgtatgagaagatataaaaacattggaagctattgaggacaatgtagaatttgcttgcttgtagacattctttaccgtaccttttttagcatttgacttgaaaaattgttaatttgattgccccatttcacgtattagctaattttgtaagtagcttaagagaaaacagttaaaagttgggagttactggtggtcaaatttgtagtcttggatacttgtttgagaagtattgggtagggatttgtctaatctagtagcttataaactgtacttctttttcctgagttgtgtatttaaattttctttgcaacttataaaatatctgttttatgagaaataataagctcatttcatgttccatttctataccagttttgttagttgtccataagagtcatgatctatgtttgtagtataacatttattaaaatttcttgatcatatgcaggttagcatgactttgaatatatctgctgacttacagtcattgtttacatggaacacaaagcaggtttgtgagaaatcttttggatttagatatttatgtcttctcctttatcaatctgtgagaatgtgctttttggttaagggtttgttgagatatactgagataaacactaagatcccggtcttaaagtataattctattctgaactgatgtaatttgtgacaggttttcgtcttcttagctgctgagtatgaaaccccaaagaactctttgaatcaggtatggttttaagcttctgttctgggtccatgaatatttaaatccctttgatgtgtttggcttttggagattgtttgcttctatgctgtgcacattcttagtagcagtggtaaatctacttaataacatgatattttcttgaaaagtttcttcattcttgaattcactcttacagatctctctttgggatggtatcatacctgcaaaggataacgcaagattttggattcacacatcaaacaagtaccgtttcgtcgatcaggtgtgtgtcttacctcccccaaatgatgcctaatagctttttgtatattcctgacagcatcgaagtttgaaagttttttaatatcattgtgtagggaagcaacctccggggtagagatttcaacttaacattgcactggcatgttatgcccaagaccgggaagatgttcgcggacaagatagttatgtccggatatcgtttgccggcggaatttagatgaaattgactgtgtatcttgttcctgtaacttttagtgtttttttttcataagacgaggatatagatgatcatttttaaactagagaagagaactagaagcaagaaaggattcatctttgataaaggaaattaaagtctctggatttttttatttaattattggcttgcctattcatgataatgaatcctttgctgaaaactaataataactgactattataattaaagtattgcacaactggtattttaatcattaaatttgattaaatgttattattttgcacccaaactttgtttagagtcatgtctcgagcttagttgagtcatattttagagacgggtcaaacgttactcaattaaatcacacgcgcacatacaaacagccattttactttcctctctcagcatactactcaaacataatatacaaaatattatatatgtcaatataagaaaatattttttagtgaatgggacttacgaaaaatactattttctttttgatggaaaaaaaaaattactacatttggtgtagtattttgatgcatattgctaagaaaaaactacacctactgacgtatcaatacatttcagccaattacatctaattaaaagcacataatttgtattgtaaggtaaaaagaaaaagtatttgtgtgcacatgggacacaacggaaactaattgggctgc

SEQ ID NO: 44502 - DNA, 1691 bp, Cannabis sativa
aatatatttccaaaatatacatttcataaatattaatttaatctcatacataaaccttaattatttaataattcaaggtattaatcatatgcggtctttacagttagagtctaaaaaatacaatcagcataaaaacaagaagcttgaacaatgtgatagcctgattggcagatcgtttaataaaagctaaagaaacattggaaaaagaatttaaaaattgtcgacagttttccacaacaacaccaaatgtagaattgaaaacattattactaacagcttgaaccgaaacgaggctatcactttcgacctaatggacataaggaaaaaatcattcaacgaagaaagcacttttttgagagcaataccttcactaattttgagaaatacacgaccttccttcagactgtttatacttggttgtctaaacttcatgttaataaatgattttacataaggattttttttttaaaaaaaaaatcaattggattatttagctcgtgtaatgtgaaaaagaaaaattatttatgcacctactttaataggaataattgtaattatgtttttcttatttttttttaactttcgtcgactcacaaacgcccttccgtgcattggggtaacacaacaacgagtagttcgcgcgttcaggaaacaaaagttaagaaaaatatgttaaaaaacaacccaagtcacccttttattagaggatgatgttgtccatgtccaactttaagctgaggcagactagtaatacgcctaaggctataaagctcataaccctcaaatttcaataaaaatatttgggaaatttacataaattattattaattttttgtaaaatttttacactttcacgtttaaagatttttttttttatacttttacgatgtttataaaataatacaaaaacattaagaaaagaaaactacatgaaaataacaaaaaaataacataaaaaaataatatgtaaataacaaaaaattaataataaaataataatattacaacatagaaatacataaaaaaaaatcatattttatgttaataaaatcttaaaaattataaaaatattaaaaattccgtatttttataatcttttttattatttttgtgtatttttgaaataatcccaaattttttgagaaaattatactctatacccactttttattcccattttaatttttatctttattttacttctctgtagtttatacacagttttatacgtcatatccctattatgtgcatcatgaactttaattttaataagttatgtgaggttatttagtactttgattataaaagagggtatttaccaattaaaatttcatttagagttatatttgattaatgtgtaataaaaagaggtagttttcaacttatctccaaattcttgtctctatactaatatggcccattacagcttccatgggctttctatttactaagagaattgggcttgaacacatcacctgaccttcctttctttttttttttttggacttttgacattttttttctcatttaataaagagaaatttacatggtatacttttgcagtatactgtgttaaatttttactagtgttcaactggtattttttagttgttctaatggtgttttgagttgttatgttttgtattctacaggtgttatataaaaatacaatatttttgtaaacttttccg

SEQ ID NO: 44503 - DNA, 1368 bp, Cannabis sativa
actttcagcataatccaatcttgttcagtccagtccaatccttttcagtccaatccagtcaaatcctgcgtaccaaacgggcccagaaggtataataaggatgaggttagtgggtcaattaatcattcccaagctaaccaagtaaatgttcagtctttctgggcgctgccattaatatggataactctaaaataggaattggtgtaccaattttccacagggacaaatggctgcttgtatccgcttctatgctaaaaaaaaaattatgttttttttttagggtaaataccattttagatattgtgttttgcaaaagttaccaattagattttctgctttgttaaatgataatatggattttgtattttttaaaattatacaaataggaccctgaaccgtttttttgtcgaaataaaacttaataataatctgacctagagatgtaacaacaaaactagttacatttctgtatctgttcgtgttagaaattgtcttaaagttagttacattaaaaaataaaatttttaaaaattgagctcagaatcctattttaccattttggaatatacatgatttattttgtcatttaacaaaacagataattcaattggtaatttttacaaaatacatggttcaaaatggtatttactctttcttttttaaccaattttatcaagattattcatggagcattgatttttatcgagtttttttatagggttatttacaccatatattgaaattttcaattttttttacttctttactgtggggcgtaattttttaaaaaatactatgtaacttttatattgtgtatcgtgttaaatttttactgttattttacgattattttttagtttttctactgttgtttttagttgttctgttttgtgttttactgttgttttatagaaatataatatttttgaaaaaaaaaattgtgtggaagtattcttgtaaaaattaaccccattttaatatttgtgtaagattaccttttttatactcataatgttaaggcccattgggcattgagaagcatcgagtttcatcggtttttattattattattattattttatgaaaatcatgatttttataagaccttatcgagtttgcattgagaagcatcaagttgtactcgattttctgcaaattttaatgtttaagatctataaaatctcaaaaaaaaaaaaaaaaaaaaaattgccaaatccttttatgtatgattagtgttttagtaaaacttttatgtggctttaagttttcaattatcaattttgtggattattctaaattataaaaaattattctctgtatttttttttaatatctacggttaacttaacattggttaaattgatggga

SEQ ID NO: 44504 - DNA, 955 bp, Cannabis sativa
  modified_base (888)..(909): a, c, t, g, unknown or other
tctctctctctctctctcactcagaataagcaggtaggcctaagtatttttcatgactcattgatagggatcccaaggatacgttgaaaagagcgattagcaacctctatagtgttaggagagaaagacaatattgatttgtctaggttgatttgttgaccagatgcacgatggtttatgtctaaggcgcacatttgatagccccatagcacctgtcatcagcttggcaaaagagaagactgtcatcgaaaacagtaaatgggtgatggaaggagcacagcgagagacagcaaatcccttcaaacgaccaatctgctcttcaaactgtaacaatctcaaaagaccctcagaaaaaattaaaaaataagtaaggggagagaggatccacttgcctcaagcctctttgaggtgtgattgaacctgtgacagcaccatttaacacaaaagagaaggtatttgtttgcagacacttcataatgagggaattccaacgaatattaaagcccattttacccatagcagccgccaaaaaagactactcaacccgattaacagctttgctcatatctaatttaagagcaacatacccttttgaaccctttgtacgatgcttaataccatggatcatttcaaaagcaaccaagacattatcagtaatcaagcaattaggaaggaaagcattttgagtttcagttgtaaccactggaagaacatcttttaaccaaagaactatcatcttggaaatgagtttatagatggcattacacaagctgataggtctaaaatccttcatagcgcgtggctttttcaccttagggatcaaagtcagcaaggttttattaaaagcagcagggttgctattgggaatattttaccaggatctaaatnnnnnnnnnnnnnnnnnnnnnnaacatcctaaatatgaattctgtaaaacaatgaaaataaacacata

SEQ ID NO: 44505 - DNA, 945 bp, Cannabis sativa
gcttatctggggtaaccataaaaagtcagattaaatccaaatgatattgaaaaaagaagctaaattattaacatccaatacttaaaatagtcacctttaatttcttctgagtggtttcaggtcttggcattagtttgaatctatagctcaaataccctaaaagagaaattacaatcattttcagaagtatagatacctatacatacatgataggtgattttaaacaaataagttctaaaatgacaaactaagatttcctagcaataaaaaaatgcaagagttcaagtagaacagcccactaatcatttttaatgtgctttagactactgtttaaatatgttaaagtgatacatacatacatacatacatatataaattgaaagggaaaatttttaacgccctaaaaagttcagaaacataatttaatacatgtcaaatttgcaaaaatcctaattagcctgcaaatatatagtactgcctagaactagaatcttcactagaaaagctttgagggagtggtattacatacaaaagagtaagttacaagggctcaaaccttctttacaaggaccaggaataatttcagttccacagttaatgacaacagagtcttcatttgggatgacaacatcatcagcaaggattgcatgtgaactatacatatatacatacattaaaaaagaacaagaaataaagaaagattaattcttttttaatctcttcaatgacattgttatatagtaaataggcaaaaatgaaaaaacaacctcttattgtgcaaagtagcagaagataaatctgaatttcttataatctgacaccattgatgttgctcagaagaagaagaagaagaagaagaagaaagtgttatgtgggaggaaacaagaacatcatcaacctttatctcaacatctgaaaatcttgaatcggagggaactgcaacat

SEQ ID NO: 44506 - DNA, 2322 bp, Cannabis sativa
  modified_base (460)..(460): a, c, t, g, unknown or other
atagaaaaattaagcataaaaaactcaaaatttctaattttacccattcatgggtaatacccattggtgtgcacccatatatatatgaaaaagtaaagcacgaattcaagtctgaatatgaaaatgggctggtctgtttaaaaaataggggttggcacgagcaaaacacgacatgaaaatatcgagcctacgggccatgctgacctaccctttaaaaatattggcacgatatagcatgactcatatttttctgtggcacggcctagaacgacccattttttgaaaagcatgaataaatatgggtcgcatccgcacaatacacacgaatttacaacaccactcacaatggatattttaaaataaatatatgttttttaaaatatttaaagaataaattaagggattatttcacaaatgcacaaaaatacaattgtgcggaattttaaatatttttatgatnttatttacagaaaatatagtctttttatgttgtactcttattaatttattgttgatttcttgttatctgtatgttattttgatgttgtttgaatattatttttttattacttttatgtagttttcttgtggtttctatagaaaacattgaaagtgtaaaaaaaaaattaaacatataaacatataattttttacaaaaaataatattttatgtaattatccttaaattaaaaacacactgtatattttagattttaatattttattttatatagatatgtgtatatatatttatattatatgttcgaaataaataaaatatattgatttttttaaaaaaaaaataatatttaatgatgtatgatataatgtaaaagtttgaaataaaatagaaaaataaaataaaatttgtataattattttaaaagatagagcaaaaaaaaatattgggagtgctctgaaaagtgtgcgaattaacataaaaatataaaactcttcttataagatcaattaacataagattatagtttcattagtatttaagtgaaacaataacaaatggtatttttacagtaaataagattatagtttcattagtatttaaatttgagattttttttagtgaagtaatgatgttcaattaatttaaaataaaatttgtaaagtattacatgaaaaaaaaaagttttaaaaaccgaccaaagaagtttgttttaccaaacataattatgtgtttataatccatatatatattgaacattaattatgtgtctattttatagccattacatccaaaaatatacaagatccaatgcaagaaaaatgaaaagaaattcaactttacaatgaacaaaaacacctttctattcaaaaaagttcactttggtgataattatttatgattatcccacattaaaggaagctccaatattttcttccaaatatatatattttttcttttggtgagtccccaatacatcttttttagaggtgtgtttcaatagatttttttatctgttttagcacaattttttagtattttttttatgatcgtgtatgctataattatttaagactgcttgtaaaatttcaaaaaattctgagtagtttacaatgtcaaaaataagatttacatattttattgtacgttttttcttatatacatagtaagtaactgtttaaagcttatttattgcaaaacttataaaaattaaaaatttacaaataatttaaaatagctacaatatacaccgaaaaaaactaaactaattctttttcgggatatcgaagtacataagaatgtaccaaaacaacttttttaagaagtttaatacagaaatttttaatttttttctaaaatacaaaaaagaagttattgaacaatcaagtggccagattcacattggaaaaatccttcctcttcttaactactctacgtaagcatatggttatttaagacattaactcttatcgatttcagcatatggtagagtttttcactcactttttttataatcgtgtacgctgtaattatttaagacatcatgcaaaatattaaaaaattaaaaaatatatatataatacactaaaaatatggttcatacagtttattacacgcgtgacttttttattttataaatacattagaacttttatctaagaatacacttgggaccaagtaaattatattataattaagagattataactaaatagagttatactaaaaaaaaatgtaaaacacaaaaaaaatattaatggaacaacaataacaataaacgatatattgatgtgcctttttataactggttagagttttttttatcatttgttaaactaaaatatgtgggacttaatattaaa

SEQ ID NO: 44507 - DNA, 2699 bp, Cannabis sativa
caaggccacctccagtacttgcggcctgcagcttgaaagcaacattcttttccctagggatgcccttgtattccaagccattaaagccaataaataccctcctcaaatatgtgagagggtgtttgaaaaataacttggtgtaacttaggtcttaaattcaatagagaaagagcaatatttcaagatcttttcacctttatcttcatcacattttggggtatctttgcattttctctctcttgcttcagctcaaccaactaggggaaaatcaagccttctttcatcaatacagtggttgtttagcaagattgaagtagtgtaatccaaagataagaaccctaaaacttactcctttaagctttgttaatttgtttttagtttttaagcatgcaagtgatgtaagtgttactgttcgagttagggtttaggttgttttgtgtttctgcagtttagtagggttgttcaaagtttgtttgaagtggttttgttgattatttgttgagttgggaaattttgagtttttgaactcaaacttggctcaacaatggtgaaattttcatattaagtttattgttgcgtttgttgcttggcaatggcttattatgatgtgtataggtgtcctagagcttaatgcggagttcggggttgttttgagtcgaattggagactctttgtgtttttgtagtgaaaaacgacaggtcgtttctgcaataacattctaccatttttactggtgcaagcccaaaaaaatggctccccgttttcacagaaatgggatactatttttaaggtaatttccccgtttagagtattttcttgtgtttccttaatatttagggcttttcgatgctattattgatagggaaacttttagttttgagtgtagatcctctgaaaggatttaaaaagttgtttacccattttacgtgattgtgacatagggcatccgttcagtgcataattttccatttaggtcgaccaacacacttgaacttagaatcaaggtaagactagcatataatgtatatgtatatgtgtatgtattttatatgcatgctgttatatgattcatatgctaccaacacttgtacgatagcgctagtgagtgcatgtggtacatcgtatgatgtttaagggtacaatccaatgttaccaacactagtacaatcatgtacgaagtgcatgtggtgcaacactaagtggtactcagggacagttcaaacctatcacagaggttgtaactttgttaagaacgttcataatcatttgttaaaccttgtaagtaggtgtatgggggcctaaatacaagtctgtgatattttgtatgtttgattcatttcttactgagtttgttgactcatagttattgcttgcatgtgtaggtaaagggaaggctaaggctgagcaacaatgagtccaaagcttgaagatgattgtacatgtcaagatggtatgacctggagagtctggtctcaggataacttagccttactttgtatttgttgtgcaacaaagttgtaaagtttattttgaacatgtaaacaagtttaaaagcaagatcctgaacctttttgtataattatatatttatagttattaatgtttaatgttagtcaaaaattttaatttatcaagatttttgaaaaaatcctttgattagcaaaggagtacccaagaatcaaaagatcactgtagcgtgcctaatcattacggtgttacaattttggtattagagtcgcaaggttatctactaaagactgtcaagacatgtacaatgatcgtcagagataagctcatctcactgttcaataagtctttacttgtttagtaagttttatatgtgattaaaaaagcatatgttagaaatatgttttttatttgaatgcattggcttaaaatccataagtgtagtacttagagcatatatgatcattgtttgatatacctgacttattggttcccaagctaaattgtatattatgggtgcccaacaaaacacgagaagtcatagtaatatggtcaagaccgggggcggttggggaagtcaaaatctttagaatccaagtggatgcggaagaggtcgtggaaggtttcaaggaggctaacatgaaaatcaaccacaagctccttgggattttgagcaaagttttgcaaaaatgcaagcccaaatcatccaacaagataaggaaatacagaggttgagatagtagggtcctctagcagtgcctccactataagtgccttctacttttgttccagcgatgcaagtagaacaacctgttgttggtaaccatatggaacctttgtataaaaggttttgcaagcacgcgcctctagtttttctaggaggtctagatgtcatgaaagttaaatagtggctcacaataattaggataatttggaattttatgggggtcatcagaattgactgattgacttgtgctactttccagtcccagaaagatgcactcgtgtggtgggagatggtatatgttacctaggatgtcactataatgacatgggaagaattgtaggatttatttaatgccaagtagcactaaaagaaaagagttcacttaactggtcagggatggaccatgttagtgagagaatatacaacaaagtttgatcaattagctaaattggcatcggaaattatgcccacagacttcagtaagaaggaaaaatacttggcgggt

SEQ ID NO: 44508 - DNA, 2685 bp, Cannabis sativa
actattgtgttctatgttatatacaaatagatcttgggttaattgttaatttatataacacatatttatctttttaattttgattaagaaaattaaaattaaagtaaaataacttaggaaagaaataacattccttataaaaatgaaaaaaaatcttttttactaattctcccattaaataatttagtaagcaaataaacaattataaatataattaataccacacattaattacgatgcccttttaaaaatatgttaatggttaatgtgaacaaattcaaaaatatttttttcatgaacaagcaaattataattgaattataatttcattttttgaacaacaaattccataagtatttttttaaaaaataaacaaattcataagtattgaatgacacccttttatgtgaaataataaaaaagaaatatacttttcaactgccacgtggcaattgaagaaagcgtaattataaaataaaaaaaaaatgcgactacagatcagataaataacattttttatgagtagtgtgtaaagttgcaatagtacaaattcttacaagccgtattatgttctgacagggagaaaataggaaagagaataataataataataaaataaaaaattccaaaagaaaaaattatttaatttaaaaataaaaataattgggtatagacgccgacgacccaacgaaaaaccaaaccgagctcattttctggtcgacttttctctggtctcgaccccccagctaaccattgccagcttttactaactttctctctctttctctctctcttcgatttgggttcaggtgaatcgagctctttgatctgtatatgcttctgctattttctcctgttatcctattctttttttgtggttcaggtgattaagttttgtttagatcctaatcttcgttggattttctagctaatgttactgttgcttccttttgttgtcgattctcaattttttttcttcttccgctttatattaaagccatttgttttttggtgaaacttgaaatatgttttttttaattctttttttgggtgctgaattatggtggcgtttcttttggagcttttatggtatttagggaattttgattttttttttcgagtgatgatttgagtcaactcttaagtcttcgttagagctttggttttttatttttattttaaaactgtgtgtggttagtgattaaatgttattgatcagatctgaattatcaactcagaacatagaattctgtaaatttgtattaaattttgatctgattttgagtttttcgttattgaaatttgattttgagttgaaaaatgctcacaatttggtgttttttttttttatataggattttgttattgagagagagaagggaggatgtcaggaggtggtacacagaagagtttccgaaaagcacttggagcaattaaggacaccactacagtttcattggcaaaagtcaatagtgattacaaggtattagcattttttcttttgttacaaactaaaactataatgggttttcatcacttggtaataatttcttgcaggaattggacatagctatagtcaaagccacaaatcatgttgagcgccctgcaaaggaaaaacacatcagaggtagatctccttctctctatctcgtatagttggataggctagtgtatagttattgtttctataatggctttagagtaagaagttggtagattggaattcaattactgatccagtttattcctcttttgctttgcagctatttttgctgctatttcagctaccagacctcgagctgatgttgcttactgtatccatgctctagccagaaggttgtcaaaaacacataattgggcggtacgatattgtgctgttattattttgtgtttgtaaaaggatattaggacagggttttttatctttgtgatctataagaaggttattgtacatttaagatcagtgaaactgtttttggttttgggcactagctttaatgcttaccagtacaatattgtaaatgctgtttctgtttgtacatgtccaaaaaaaactgaatgttggtttaactatttgatggtatgaatgtaggtagctttgaaaactctagttgttattcatcgtgctctgagggaagtagatcctacatttcatgaagagctaatcaattatggcagaagcagaagtcacatgctaaacttagctcatttcaaggatgactccagcgcaaatggtatattttcttgcaccatgtatttgctaaacaagcttttccttgagaatgctttaattattactaaattactgtgatgtatgctgccagcatgggattattctgcttgggtccgtacgtatgccttattcttggaggagagacttgaatgctttcgtgttcttaaatacgacattgagacagatcgtccagtaagaagacactggattttccttgttgcttctttcttatgtctcattattttagtgaaatatggcgcttcttgttagacttagatttatttccttgtatcaccctctgttagttccagagaatttcatctcagaacttatcaaaaattatttctgaatcaaggatgctgttagaagtaactaggtctctgtttcttgtttattattctcaagaaattagattttgtagacatttcatagtatcttttggcgcagagaac

SEQ ID NO: 44509 - DNA, 2622 bp, Cannabis sativa
tttatctggtagtggtactactatgatatatttagatagggaaaagaagttctaatcaaaccaaatatgttcatgtaaaactaacacgtctatgaaagacacaattattgtttaactagtatttatttaaaattgcagctactctcacacccattcatcatcaagtacaaagacacccaagtagacttggcagaatttgtaaaaagcatgtttgatccaacacaaaagatgaaggacttggcagatgtaagaacagcatgcagcacacttttaaccacttaatattactgagagcatgagataacttgtatttactaagctcagaaaatgttaatctaacttgttctttgtttgagcagatgctgacaatacattattatcaactctttgatggacccgatgacctctggcaacattcaaagactttattcaacgacgactcaattttcaggtactgaacagtgcaatgataactttcctatgcttttcatgaatgaaattgtatttgcgagttttgtcaatgtcaagagaggattctgtataagttaataacatggctttcctatgtcaagtccaattcactccaatgaggttcttgtctttaaaatacatgttcttgtaaaactaatgacaagtaaaatatttcattttaaatttctgaaagcatattattttcactttttataagctttatgattaatatcttcttgaacatatctcttttttagtttctccggaaagcaatcagttggtggaaatgaaatctttgcgactctatcaagcataagaagtacattagccggtgactggccttctgaaagacttgtacatgttgtggaaaaacttcaatgtcgtgctcatggtcaagatggagttgcaataagagtatcaggaaccttcattattgggaatcagttccttatatgtggagatggcttacaaccagaagggttgcccaactttaaagatctatctatcgatctttctagtaggagaatgggcacatttcgtgagcagttcattatggaaccaagtagtgttatcggccgctacttcatatcaaaacaggagctatatattatgcagtgaaaggctgaaatagattatgatgaatcttaactaactaaacaaacttcgcttggtgcatttgcctaattctcttcatttcaaagtctcacaatcacaaaacaccaggttttgattttttttctcttctttattttttctttgccaactctcttactttatttgtaattcctttcatttatcttattttattttttcataatgtgagtttcttcctattcaggaaataccaaccggacaggcaatttgtttcagccaatcagtgatatttgtacataaccactcgccaatttactcagtacgcacctctcaagttgtaaacgtgttgagaacatgatatttattcctttttggctaaaagaatgtaatcataatttataaccaattgactagtaatcctaaatgtggcacaacttgaaatgttacacttttagagctcgtttaggacgccgtattaaattatattgtattatattatattgaattgtattttatacaatatttttataaaaaattgttgagattaaactcacttaatctatatcaagtcagtagtttcatcatgacactcactaattgaaacagtttaagttgttagttataacagttggctttgacaccaatttgaatagaacttcaccaatacctatattagggtctgtctcaactctctcagcaatctttaatgctcatacttcaaatttcagagccaaatttagggagagattgtctatgatcattgtgtgcgtgtgtgaagggatgtaatgggagtatcacttttgaagtaattcccctcactgtgagatatattttgtaattgttcactgtgttgatttgtattcttggacatattcaaattcaattatgtactactgactattcttattaataaagattcatgattcattcatttttgagctaagttttattcttgtccagtttttaattaagtttagtttaattattgttattagttttagttccattatgtgttcttgaacactgttattgttgtaatagcgtggttttgagggtgatctttcaccacaaatggtatcaaggctcaggatttagagttcaagaatcacactcaactaatcaagattcatcttcaacattttaagaattaaactcgaacttttcaaagctaaattcaagcaatcaagaatctggtttgaatggctacagcaagatctgaggtgaacaagttcacaagttccaatgattaaagcctatggagaattaaaatgaatgcacttctggttcatcaagggatctatgaggctcttgatgttaaagccatgggatcgaagacaggaagaagagaattgagattgaagccaaggcacacaatcccattctcctaagtcttggtgatgaggttttgagagaagttttagatgaggatatggcattgggactctagaacaagctggcttcaatctatatgaagaaatctcttgcaaacaagttgtatctcaagaagaaattgtacacacttcgaatggatgagtcaagaaattgagaaagcatcta

SEQ ID NO: 44510 - DNA, 2145 bp, Cannabis sativa
aaaaaaaataaagtgtcacaccacaccaaccaaccagctcagattggatcggatcagtcggatgaatggcgtgtgttaagtgttaactcagaatttcattacaataaatgagacatttttgtaacttcgaataataacttttggttgaaactataaaatattaataaataataataaattggttgacatgatatatttaggtagttttgtaattaaatttatattgtgcacgagtcattgttatttttgaatatttttgtattacggaagtacaatgcttaagaaatgtaagtaataaaagatggatttcttgtagggtgattgtaatattccaaaaaaataattatgaataattaggacttattatataaatatggattaattagggtgcaatgaggaggattatgattctattaatttaattcagcgtgaattatgaaattttaccataagtagataaagaagtgtaatttattaattactgagatttatttagaatataagggcataatgtgagttatttatggaataaaaatatttttaagtttgacgaccttagagactcgatcagaggccaaaaatgacacaatggatttagttagtaattttaatgagattattaaggtaagttgattttaaaattactggggtacttgggatcgaccaaataacctagggttagaaattttttagttgctaagaaatgttgaaataatcatttttttaattaattaattgttttattattattctttatttcttttttgacttctctctgtcaaaaattagttccacaagcctttagtagcagctaggagtaagctagcttgaagaggaaacctaaggtaagggtttagtatttttcttccatgaaagctttgggtttgaatgttgactttgctttctatagttgttggaggtttggtaacactttgtttttgtttctgagttagtttagaagtatttttatccttatttaataggtttgcttgttgtgggaggtgagagtcaagtttgagtttttaagctcaaagcttgatctctcttggcaacatttacttaagggcgtgatttaaattcttgtcaggtagaaattgttatatggatgttatatgattgttctgtaaagtttggaatcaattagttaagttttggtaaggttttgagaagttgaaacttggggtttcacgtttcctataaaaaacaacatgccatttttcggaaaaactgcctactattttccctgctaggaaatcccaaaaacggcttgttgttttataaatggcttacctttttggtgatgtttagaacacttgtttttcatgttttctcaatgttttggggtattggtacccttgtatcgataggaaaacttatattgatgaattaatgaagtgattaattgatcttttcgttgttgtgacatagggcctgagatcgttgatctttctccattcaggtcagccgatacacctgaatcaaaactcgaggtaagataattatatttgtaccacatagcatgtcaatatacgatcatgatcgtttgtgaatcagttggttatgaaagcaaaaagacggtcattaccgttatgaaacctatttgttgattatctcatgagataacgataatgatatttgaacttgaatcattgttaggtttcttacttgtcagttatctaatgagataacgacagtgacatttagattgaaaccattgttaagttttctacttgtcagttatctcatgagataacgacgataacatttgaactgaaaccattgttaggtttcttatttgtcggttgtctcatgagataatagacatagcagaaggaatatcttaaaattgttgtacattgctactgaaaataaaagaggaacgatattacaaaatgaaatttttgggttgagtcgcagactaggtcgctctctttaagacgtttatagcaccgtccaggattgtgtaagcagctgaaattttgtcgatcgtccccaggataaaacaacccaatcatcgtacaccctcaaaatatgatatcacagatgacaactgtattttatttttcgatatgaaaaatatgtaattctcttcttttttttgtcgaaaattcacttattttgtaaaaagtttcaacaacagcttca

SEQ ID NO: 44511 - DNA, 627 bp, Cannabis sativa
accgctaagcttctgcaactgccatatcaaaaaaaaaaaaaaaagattttagttatctgctaaaaccatatgtctttagttttagttagtcctttactggtttttacgtacctgaagagccaaaccctgtttttctttcttgagagcatcgaaacgagaagctaagttcttataattggcgagtaaaatagagtagtctcgttcgagttgcttggatttccaacgagctcgtttgttctgaaaccatatggcgacttgacgaggctgcaagcctaactcggaggccaactggagctttttttttggctcgagcctggtctcgttctcgaacattgattccagagatttgatttggtcatcactgaaccttcgtttgttgtttttgctcttcttttttctgtttccagctggtacttgaactccagcaccagtagaagatgaagtagaggatgaatttgagaagctgctctcgtgaatattaatgttgttgttattgtgatcaaatctgtccgatgtgggacaatatgaatattccccatgaatgttgttttggtcttcaaacatcgtcctctctctctcactctctctctctgagtatatatatatagtacgaaactgtggttggtt

SEQ ID NO: 44512 - DNA, 1138 bp, Cannabis sativa
gccatttattgcgttgaagatttcccagaagtataccctttaaccgtggtattaattattaaaatggaagttaattattccaagaatatgatagcaatgtacagtaatctctttattgtagattctcactctttctttaactatagcttgtgacactgattttgtaatattcatttttacagcacaggtctgctgatggcatgtttatgggttctagttcacgtagtcctgttggggatgtacctgcagcgtcccccaagtactctgatagactttctccggcaatcaacaattatctgtctgaggcatcaaaacaagaagtcagagtgagttggtttattgtggtcttagtctaagaaattgatgcttccagtgttttgtctttgattatgcttttcttagttacttatttgttgttttaaggtcatctgttcatcataatattgttacgcgattggtagttactcatttttatgcataacacttatgttgaatctctctaatgcagcctcagggaacacctgaaaatggatatttgtggcaaagagtaaattctcagataagttctccaagcccattgagagaagatctctctcaggcacaatcttctccaattgaagcttctgcccaggctcttagacaatccttgcacccattattgaggcaaaaactggtatgtttacttcatcatatattatttttgattgctgcaatggcagattgtgtaagtagcacagtatttaaccccgttctgaatttgttcagtcgtgtattacttttaggttgctaataactttaccattttcaggagctctgggaagaaaacttgagtgcttctgttagtcttcaggttttagaaattactgagaaattttccactatggctgcttcccatagtgttgctaccgactacagcaaactcgattgtgtcacagctatatttatgagcttcatctctcgaaatcaaccacttgctttctggaaagcttatgtacctattttcaacagtgtattcaaccttcatggtgcgactctgatggcaagagagaacgatggtttcttaaaacaagttgctttccaacttcttcgacttgcagttttcctgaatgacaacattagaagaagggctgttgttggg

SEQ ID NO: 44513 - DNA, 1164 bp, Cannabis sativa
cctctagtgtgcctatttttaaacttagctgaataaaattgggataaaaaaaaaccctaactttagttttgaaactgaggcgtgtgcctcactaaattttacgcctcaggcggctgaggcgtacacctctcccacggctgccatgggggacgcatggcgaaaaattctgcctcaaactaaggcgtacattgaagcgctcaataccggcgcaattttaaacatcaatctatcaataaacttttccaccaaaaatttaagttttgcattcttaataaacaaatcttaaaaacagcattaataaaatataaaatagactttgaggagtacaataactctactttaacaagagacattaccagcttgatagtgtttgaatcatagtaccaagctgtccaggtctcagatctctccctgcagcaaattgaacctgcatgccaccaaatgtattgtatttcaataaaaattaaggaaatagagatagcagaactctgagagataattgaaaaaaactagcaaggttagaacaaaaacccgaacctcaaagcatcttcgcagctgatccaactttcctctaactatgccctaaaaagcaataaacataacatacacatcaatttaggcaattaacaactttctatgttcttcatcaagacagtccttcctaggttactcctcttatgctgcaacctgcagaatgagaggagaataacccaaaaccctaccccataactgctcttaacagtgtgaaacaacctgaaagttttaagaaagatgataatattttgactatttgcagttctaaagaaagcaaaaataatactgcttatcacaacctagtaccacaaatagggggtaaattttccaaaagtatttcctaataatcatagttcccttccaatgtatcatgactagtgtacttaatgatttttatgatgagcattagcatttctcaaaaaataaataaatcgcaggtcccttttccagtagtaagtaaaggcaagctaaaatatagaaagactaatactgaagcaaaagcaatgacttggaagaaagcataccgcatacatgcactcattaatgaggaagtcctcaagttcacgtacgtttgtaacatctagctcctgcattagttggtcataaggaagtacctgaaagattaacata

SEQ ID NO: 44514 - DNA, 2025 bp, Cannabis sativa
  modified_base (853)..(860): a, c, t, g, unknown or other
taaaacatgtccatatgataataagaatcgatcatctatagaacttgctttcatctcaggacaacaaaaaacaatttgagcaaacaaaatttctttgagtgtcattcgaagcaactcaaattctacatcgccatcatcaattaataccttccccgattttgaaaaaatatccaaacgctttttctttttcaccattgtttttgtcaattggatcgtagataccaaattcttaatcacgatagagttatcactctccaaacttagcagttttaccatagtcttgaaatcttcaagattcttcattatttctttcctatcacccaaaatcacaatcatcaaaataaaatcactaatgacttcacacaaatatgtaccaacacaaatcaacaacctatttatgtaatcaaatgaactctttctttgagattgatggtcatgttctttaagcttttcaatcaagctttttcctccattcgctctttgatctttcgctacttccttccacttctccataaactcttgtaaatttttcaagtaattcttgaaagattgatgatgttgaaataatgatggaatgttgtagcctaagcatttgtcatcgaattcgtccacacgtttcttaagagacagagcttgtttgatcaattctatgaatttcgatcgtttttcgaatgcattaagatctttactctcgataagtgttgttacagatttaagcagagaaaagaattcttctaattctgattcactttcaatgtcttctgagttatccattaatttcttgtaaatgtttgttgtgacattaatccatgctacccctaaatccattacaacaagagagagagagagagannnnnnnngagagagagagagagagaggcttaagagtcaggggaatatatagaggaagttatttctgttatttttgagagtttgaaacattcagtaaacgacatgtcgtttatttctttacttataatcattaagtaacaaacgacaggtagttgagttattcatatgtagcttcataattactacataaatttttatttttagttttgtgaccaaacaacaactattttagtcaacaaattttgttactgtattgtatatatatgtaattatatttacctttttttttgcctataattattttgctggtttgctgtctgagaaaaaaaaaaagacattttgagtagtgtgtttatttttaagtcattttgatttattattagtatatattttgattgtttttgttgtattatttgttatatttttttgttcattgtcttaacttgattgaattcaaccttttcaatttaatccaaatatatgattattgactttgttaatctgattagctactttggttatgtttacatatgttcatatatttatgtttcatgcttgaatcagatcattattaagaaaattgaataataattccctctgttaaatttagtttaggcactgattaaatcagtcaaattcggtttgcttgaatttaatgttacaaagtatcgggttgtactcttcgagtcagtgttaacactccaaatataatcttggagacattatcaatctcctgagggatactctcctaaatgtacttcattttcattaattttcatttataaaataacttaacatatttatactacttaacactttataccctttcatgtaacacttaaaccactttgtctcttaaaatcatgaaatgatgatatgatcccaattattaatctagattgaatttcagatacaagtaaagttaccaagtaaatattatattattgaaaattgtttggaacagaacatgtaatctattattcattaaatctaattctaagctactttggttatgtttgatgtttgaattagtggtaataatatttcattctaatgtgatcatttatgccaattaaggaaattgaataatcatcaataatgtaattttggaacagaaatctttctattattgattaagaaacattaattattacacaaattcaacacatgaaa

SEQ ID NO: 44515 - DNA, 2679 bp, Cannabis sativa
atcgatgtatatttggaaccattgattgacgatttaatagaattatatgagaatgatattcaggcttatgatgatcttaaaaaagaatttttttaatctgaaagcagtgttattatggactgatagcgatattctagcttacagtataaaatgttacgaaagttgtctaatttgttgcactaatacatgggcttgtcgcttgaaaaatgaacataagatgtgttatacaggacatagacggttgcctatagatcatcctgatagatagaagaagagtcattagatggtattgaagagggatatatggctcccttgccactgtcagggaaataaattttttaagaagtagaactactagattttaagtatggaaagacgcaaaaaaataagaaaataaatagttgcatgcacaatgacgtcgattatgtttgaccctgcagcgttgcctgaatcatcatatatcggtagcgaaaattgacgttgaaatgtcttaaaaacggcttttaaatctcaaatttatagtagtgattataaaataataataataaattaattgcttgttgttttttaaatggattaattacttgtttaataaataaatgaataatctaaaatgacatatcaccctgaaaaatattcttcaaaaaattgggagcattaattaatgacatacgtaatagctaccatataagggtacccaacaagttaaaatatacatagctaggtctacccattcataacaaaaacattgtttctttcttatctttgataatatcgtaacaattaaatccatgtacaaagagttgtgtcgtaacacaactatagtaattaacaaaatcgttggaaataaaaaaaatggctttatttatttttttaattgattaatagaaattaaagtgtgagcttgtttaaatttaaaaaatattatgtatatatttatttatttatttataacaaatgagtatgaaaagagtagtgttacacggtattaatagtgtctaataatagttttttgcggttaaattctctcagctatcagtccacttacatttaattttataagtttaaaatttaacggtaaaatccttcaaactattgaattgctagtaaaattaaaatgtcatctatttttcagagttaataatcaatatagagtgcttatgtatacacttttgtacatttatattggtacactgaatattattatttaaaaaatataaaaattaattcaaaatttataatattttttatttttaaaaaatattttattttttatttttgtagttttatttgattttaaaatgaattttgaaaataatttttaaataataatattaggtgtatcaatataagcatgtcatgtgtataagattgtacacataaatagtctatagtgatagttaatcggatgatacctttaatttgaaatcagttcagtaatttaaaagattttaccactaaaatttaaacttaaagaattaaatacaaataaaacgataattgaaaatgctaaaaactcgtctaataacaccatatgttataagtttagtccggagcagtaagaaccaaataaggatagaaagaatggccaagccaattacatttctatctatctattttttttaagtatacaactattatctagtatttaaaacaagggtatcaacacagcttatataaatataaggggttataaatataagccaattaccttaatatatataaattatatgtaataaaaacaaattccacaaaattaggggagccaacttccacaaggacattcatagttccgaccctagtactttatgcaagactcaatattaaatcacattaaattaaattaaataagatataggagtgtatatcatgcaaaatagtgaaaatggtttgcatgtatttatgagtataagtgcaattctctttggcactaataatgcctaatacaatttaaagatcttgctttataattggttaacacaatacactttaaaagttattaaatcaaattatataaaaactccaatatttaataactatttattttagcatttctataagtattattaagtaggtattttccaaaaaaaagtacgtatgggaaggtctttggtactggccaaccataattagccataaatgtttgagcaaactcagtagcccatggttccagctgtgggtaccatcccattttggtgtcaaaacaatatcactttctcttctctcacttcaaatttcaacttcatcatcatatatatagatttttcttaattttttaagtaaagaacaaattgtgtcatgtttgaatattaaaatcttttaacactagatagtggttcaaatcttggtggttctttgaaagtcttaaatgtgaggataatagtgctaactctctctaacaacttttggcatctatcttagagagtgttttgttttgatttttgagttttggggaaggaatcgggggtaggaggccatgtgaaactcaaatttacaaagatattgatattacctattaaaagtatgtgggtcccacctagggccggctctaggagcggagacccaaataaaaaagggaaaaaaacaaaaaaatacaaaaaaggaaaaaaaattacaaaaatactttgggccggcccattaaacatttatacagtccacatacaaatatttataaaaata

SEQ ID NO: 44516 - DNA, 857 bp, Cannabis sativa
cctgagttcttgaactgggagactcaagaccagctgttagtttcatggctgctgtcttctatgaatgagagtcttctcattcggatggtgggatgcaatatagccaatcaaatatggagatctctagagaagcattatactcttcaggtttcatcaaaggttcttgaattcaaaaccaaactccaaaacctcaagaaaggctctctgtccttagatgaatacctgttaaaagtgaagcaacatgttgatttgttggcttcagttggggaaaccttaacagctcgtgatcacattgcagcaatcttcaaaggattaccgagtgactatgatacttttatcatctcttcaaacactcgcattgaagagtaattggtaattggtaccccgactctggtgccacgaaccattgtactcccgatccacaaaatctaatgactacagcagattacaatggtcaggaccaaatctttgtcggcaatggcacaggtctgtcaattcaacactttggtcacacttgtgttgcttccaataattataataagcctttattacttaagaatttgttacatgtacctgagattactaagaattttcttagtgtgtctaagtttgcccttgataacaatgttctatttgagtttcatgctgatgcttgttatgtgaaagaccaggttaccaaggaaatcctattgactgggactctccacaatggcctgtatacttttgatcccacacacttcaagatcttacccttctcttcaccctcctctgtcaagccagatttccactcttccaatcaatagacagcctttcttctcaccaataaaccagatgctcttgattcaagctcattttct

SEQ ID NO: 44517 - DNA, 2593 bp, Cannabis sativa
  modified_base (2553)..(2553): a, c, t, g, unknown or other
aaatcaatggagcaatatactcagagcttgccacatacttggctacacttataaattgtcttgtttggacactttattggctcccttttattcatccaagaagtattttggttgtgactataaatgggtctggtcttgtaattgagtgtacatacttaatcatgttcttaatcttctaagataagaagaaaattattaaagttgttctttttatttttgctgagcttgttttcatttctattctcaccctttttgactttatctttgactcattctcgcaagcattgttggtaccatttgttactctttaatatcatgatgtatgctgctctattggttgttatggtaaattactagttacttgttattaattagttactttttaatatcattatttcttgtttgattttaattgtttattgtttttggtgtagaaattagtaattactactaagagtgtggagtttatgctatttttcttatcatttcttcattggtacttgatttgagatggatttctttaaattctcatacatgtacttgatagacctttgatgtgatgaccacctcgaaaacttacaataggttggaaatttttgagtgatattaatggtgtgatggcgttatgctctgatactgatgttattttgggtttaagttgtgagtaataacgtattgtcaatctctgtgtcactgcttctttgagccatgattctttgtgaaacaaaaagtagaaaccaaaacgcatacagttatatgcgagctcggcttgagaccatcactctagcatcccataatattttataattttaatggagcattttttttttatattttaaattgataatttctgggttaatatttaaatacaactttgtgtgtgagttgtgttgagttattaaatatatgtatgtatgtatgtatttgtgtgtgagtatatgtgagtgtagttcattaattaatttactgcaatcaagcagagaaacacgactgtaatgatgaaaagaaaatgcgtttcacttacttatattgtacttgacttttgttctctttttacccaattattattatcattttcatatgcatgtgaatttgtcgattgattaatttttagtagtatgtctaatgtcttatgttaaatttattctttatgtatcattaactgagatataattttattatgagaaatactataaacttgaggacaactaagagacttcacgaagattttcaagtagatttgattattacgaaatcaaggtatcgtaagtttccaataatttattgtatttgtatacgttaagcttatttgtcttatattgttatagcatactatataggtgccataatttatgaatgttttcattttaattatttttttagatggagcaaagctcacaatccccatccattggtactccaatcacaccaacgagccaaaatcaatccgttgactctagtaatgcttctaaacctcctttgcctactaacttttctaaaaaaacaagtaggcaagtatctgatgtttgggaccattttactagaattgaagatatggaactagtacccttaggaatcatttggtgaatttgtgtctgaaatatccttttagattggaggataaaaagcaaaatactttaatgtttcgaaagaaaaatattgttgggagtgaaagtgttggaggtagtaatttggtggctgtgggatttagtcaaaatgcgtgtaagcttgcatgtgcaaaaatgataatcattgatgagttggcttttaggtttgtggagcaagaaggattcaagttattttgtagtgttgcttgccctaagtttgatattccttcacgtgttacaattgctagaggtattatgaagttgtataatattcacaaagagtttctatcaccactgcacatggacttcccttcaaaatgttgctatatggtgttgacatcacactttatagaccatgagtggaaaatgcaaaagagaatttttaatttttgtcaaatttctaatcacaaaggagagacaataggcaaagctattgagacatgcttaaaagattgcggtattgaaaaagtgtttacaatcactattgataacgcatcctctaataatgtggctgttatccacattaagaagagattgcaaatttggaagagtgttgtttgtgatggagaatttttgcatatgatgttagatcgtgcattaaaatatgttgatgctttcaaactgttagaagaagaagatgtgtattatatgcaatattttagtgatgaagataggaatgggagaacattagaggagccaccgaattccaaggattggaaaaattgtgtcactttttgtaggtttttgagagtattttatgaagccaccctaaagtttagtacctctttacttgttacttcgaattcatatttccatgaagtgtgttctgttcgtgggaaactaatcaaatagtgttctagtgacagatcaatcttaaaggatatggctactaaggtgtagatcaatttcgacaagtattggggcaatattgaaaaacaaaacatgnttctttatgtggctattattcttgatcctaggtacaagtt

SEQ ID NO: 44518 - DNA, 752 bp, Cannabis sativa
ttttattttattgtttgccttactagaacactctcttacaatcatcaaactttctttatatatttatttccttccttctaatgaaaactttaactaataaaaatgtcttatatactgttcataattatttgtgtatgcatgtcatgtctatcactaatgaaaaaaaaatgtcacattattatcacaatttagttatgccataaaatctccactactatctagaataatatgagaactttggaaaaaagagggacaacaaaactcatttcattcatatgtattttaatttgccatatatgaaatgattgttttaccaaagaaggggaaaaaaaaagggaaattacccaaaaaattacacttattttcatgaataatttcaaaattaaattagttgtgcgcattgtactgacctaataattttttctctataaatactatatgaatcatataattttttgctaaatatttgatttggactttttgtcttagaaaaatatttttttagacctcacgcttataaattggtttaaactagtttgttcaacttgattttatttctatttttatttttttatttttttttttaaaaatattttatttatatgatcataaacatggaaaactccattaatttttgacaaacattaggacgcgtttggaaagccacaatgtaattggatttgtgtgtaattggaggttgttgcccctgattttgcccaatatacgtggaccaaccagataaggacacgtgg

SEQ ID NO: 44519 - DNA, 1751 bp, Cannabis sativa
tgcaatctgtaaaaatacagtgtctcctcaacttaattattctacatctacaagatttttaaactgaaaggggaacaacaaaccatattccagacagtcaacgacaaacaaaaaatttaacagatgttatgtacataatgaagatatcatgtagctctcaataaggctaatacagaccttttcatctagctacccgctttgtccgattggctaaatagttaagtgccactctagaaaatcgggctatagagaaaaacatctgccagagagctcgacccttgacaatgccctccctaacacctctcacggtaattgcaagtggaggtccagctgcctcagtttttgatttggttaccccctgcaaagatgctaaccaagtaaaaatgaagtaaaattcattgctccagaccgattactaactcacagcagcataaataaataaatttagaaacggaagaaaaaaagcacaagaagaaggtacaaagaaactcagtaacctgttgaagtcatgtttgtcaagccgcgtaacctctcctcagccacccggacagctcgagtggaactcctaactccctgtgtgatttcctggctgaataaccaaaattatatacaaatcagtgagtgaaacatcgagttaaagataaatgagcaattagcatacaaatgaagtgttttaaaaaccaacccaagatcactaagttccattgtaaggtcactaatctccattccggatagtctaacagcagccattgtgtctggaagctcttctctcatgacatccatgagcttctcaagtgattcagctgctctcttgaaagcctaaagtattcacagtaaacaaaaagtgaccaaaacacagtgtactctttattccatcatagaacacaaacagtaggatcatcagaaaaagacttgttcggctatgctaaaaccacaaagtcaaatagaccattaatttccctattcgtggaaatgaaaatatatgattcaaaatgaacaaaaatacgattctgttaccaaccaaaagcgcggggattgctgagcagaagagccaagtcgcagaaattgccacctaccatcatcaatcaaaaccggcattagcatcatcatcaccatgaacatatgcaatctgggtttcctttcacagtttccagaattaaattttccttttttctaataaaattgataagcatttaaaattaaaaacagctcttggaaacgaaaacggagtgggggtattaccgcgcaagcaactacattgagcataacgacatggcgatgagtgaggttccactgagagagctgaagcgaagaagaagacaaagacgaagttcctaccgtcgcattaaaatgcgaaggaaccgacgacccggcggtgccatactccgatttgacagacacatacctccggggccgggccggcagcctgggatcgtaagaaacacggtcggagccgatgcttcgggcaaagatgtggttgcaatcgaggttgattgcaggtttcggcacctgcaatttcagagaagagaacatcggtaatctcggggtcggtcgggggaactctacgcaatctccctccgacctatagagctggagagtgaagtgatttcgtcgtttcaaaagcccaaattaagtgggctgagatgactgggccttatgatattgtaaaatttacaaaatgtgggaacaattaacaaaaaaaaatggtacaaaatgaaacaaaatatggttatttaataaaaacaaattaa

SEQ ID NO: 44520 - DNA, 1336 bp, Cannabis sativa
cacattacacttcatgaggagacgtgcacttcatgaggagacgggcactccatgtgggaaaaatagaaaatacttcaacaaaatatgtacatattatgtctgcaacaccatccccatgaataagttcacatgggaaacaatttctaaagctaaaattaatttagtttcggacatacttgaggtattttgtatattattcttaaatttataatttagtatattattcttaagtttataattaatgtaaaagttttaatgtgtaacttttgtagacaaactttgtgtgcccacgaggtaatcaagtttttgtggagtatactttgtacggaatgtcaaaatgtttgcatgaccggtgagtcgattgtaagaacaattggattggaaataataagggacttgcacaagaggtgtgaagttattgtattgcttattggagcacattaaatgaacatgtatgtaataaaaccattaatctcaataatactttactttagagtcaacaataaataattaattgtaacacaaatatgttaattttaggcaagatcagcaagaaaaaaataaggcctattgtagcatatgttctcaatggggtaactttttatatttatttgtgattgataagtattgtttcttttttttaaaaaaaaaaataataataacacttatattaacttaaaaataggctaatcctgagacaaggtaacttccagcgattgtggatacttttcgaagatcccccataaagataacatttggcgtaatgaatacatacaacaagcttttgtaagtttatattgatatttattaatttatgaagatgtctttcagtttgttttttaattaaaatttatattttaatttatttgatttttgtaggagaaaatggttgaattggctgcaaatcaaccaccacccactaaggatcaacttgcttagtatgatatagatcccacccagtatccatgatttaatgccctaaataattaggcacgctacccaaaatacttatgaagccctattcccctaaccggggttactaataaaattagcacagaatttaaactttaataacaataggaatgaaaataaacttgtaatactttaaactttataaacttaaagttacagtagttgggatcccaaaaaaaacatttacaaaatattattacaagtcattttctttcagccggcctaagcggcaaaacagagtctcaaaaacacagcactagtagaccccaactcgcttggtctgatatggcccggacatgtacattcttcgtctagctcctgcactcatggctgatcaacaacagtcttaccctttcctgcacag

SEQ ID NO: 44521 - DNA, 1670 bp, Cannabis sativa
ttaaaaaataaattattattttagctctcattaacttaaaaagaaaaattgaaaaaagattgaaagtatgaagttgtaacaacaaattcattgaaaaaaataatttagtaacagtacaaaaagataaatcaaattttcgaaactaagtaaaaaaaatcgtaatacaaaaatatgttgagaagttgatattgttttgcatattgcaattaggtcattgttttgttatttttctgttattttgtagttatctttttgttgttttatagttattttcatcttattgttttttagttattttttattttactcaaacataatatttttgtaattttaaaactttaacacaatatttttaaaaacttgatataataaaaatattaaaaaaaatgtaacttaaaaatgtaaaaaataacaaaaaaaaaaaaaaacataaatatttttataaggtccctaataaaatttcctcaattcataaactagatacaaaaaatatgggcccatttaacaaaatggcctacccagaactgttttggaaggcccaattatgttggagaggccgtaaacttagcaggctaggtctgttgttctatttctcttatgctagtaactttttttttttattttttttatttttttaagttaattgcaggaaaactctcaatagtttaactctactagcaattaatttttaaattttaaattttggcaataaaactcccaaaactaaaattcagttagctatttataattttcatctaaatttaaatgttaactgtcatattagattgtacaagtgtacataatgtacgtgacacaattttattagtccacataatttattaattaaataaataaaattcaaaaataaaaataaaacatttgaaaattaaaaatatattttttttttctttcttctttttattttctttcttcattttcttttcttttattttctattttttttttcctcttcttctttcttcatagccagcatattgaatcaccaccaccccactcctctctcccacaactagcaccaccattatcacagcaaaaaaaaaaaaaaaaaaccaccaccaccaccattacatcattctaccgaaatcccacaaataaaaccatcaccgccaacactagtatatttctcagatttaaatctaaaaaacacacaaaaaaaaaaaaaatccatataaccacatttatacacaaaagtatatataaaaaaaatcaatgtatcaatggcaagctcacggattagcaaagtatggtttagagttggatgaggcttgtttttggtcggagttatttcctcctccaatttactttgttatcgtaaatgaccttccttaatttataataacaagtatttttataaaaaaaaaaaaaaaaacttcattttttgaactaaattttgcacaaaatttacaaagagatatctaacttatattgtgtgataacacaataactattcgatgctttttaaaatttgaacatttacaacaactgtccaatctcggccttgcatgaatatatttaatttcaaacaaatttattattatatattaggataatgtaaaaatccccaaaaacttagagttaatgaagattagtcctcaacctaaaaaattggcagtaatagtcccaaggtgacattttctgtaagtccgttg

SEQ ID NO: 44522 - DNA, 1549 bp, Cannabis sativa
tttttgaaaaggaaaaaatattttagtcaagctatcaccaaaacaagatacaaggcaaggcctcacaaattaaaaattgtgtatcatgagaattatatctttctctctagatgtgaactttaaaaaacaactcattctacttttagactaagctttaacggctactcaaaggtgacatgtgctcaaaattcttcatggcatccactattgtgagaaagaggagaaactacatttaatgcatcaagaatccggatgatagtaattggatttgggatcaataggaaatcactaaatgcttcctaaatcattataaagacctgttctcaaagcaacagattttgcatccgtctcggctgaatgaagtgtttcccaaccaggagttatccgaatttgaggtctcaaatcttaatgtaacccccaccttggatgaaattgttgcgaccatcaatgagatgggcaaagataaggcccggagccctgaaggtcttcccctgagcttttattctcaccattgggaaattataaaagttgatgtattgagatggttggtcatttcttcacccacctagagctgcctcactttatcaatgatacttctttggtcctcatcccaaagaacgatgcttcgatgtttaccaaggactaccgccccatcgcactttgcaatgtattctacaaaattatttttaagatcattgccacaagactacgagggataatccaaaaaattatctccctgaaccaagcggtttttgtcaaagacagaagtattgtggagaatttgatgattgctagagaaatagtccattccatgaaaaaaagaagaggaagcaggggattcatgatgatcaaacttgacttggagaaagcctacgaaaaaatggattgggactttatccttgcggtgctcactcacatggggttcactaatccgtcctaggatggatacgagtctgcatctcagtgcaagaaattaaggtcctgcttaacggttccattgtgggtaaagtcaagcctgaacggggacttcgacaaggagatccgatatccccttctttgttcattcttgctgtggagacgctatcccgtctacttatcgataaggaaaggaaaggtttgattaaaggcttcaagattgggagacatggaccggttgtccatcaccttatgtttggcaatgatataatgctctttgggcaagcttctcttaaagaagctaaggctttccaggactgcattgccacctattgcgaatgctctggttagtcaatcaactcacaaaaatcatcggttttcttttcatgtggagtgccacgggggaggattcaagcaatcacccaactcctgggaatgaagaaaatgaatgctaatgcctcctatttgggtctgcctctattcaaaaccccaagaagaatgggtgatttcaatcacctggtggaccgtgtgttgacgcgtattaaaggttggaaggccaagcttctatctagtgtggggagggcttgccttatcaagtcagtgggatcaacactgtccaattacattgcctctt

SEQ ID NO: 44523 - DNA, 1142 bp, Cannabis sativa
aatattgcaaaaatgaaacaaccaaaatttgaacagaaagagcaaataaacaaaaactcgtaagagcaaaccttagttcctgcagctgcagacctgaggggcttcagcctttcagatttctcaaaggaaggagtggtagactcaattggtctgcaattgtgactagagaaatacaaatgaattttattagtaaagtagagtaagaaataattaaatgaattttaaagtcatactacgaacttgaatgagtgcagcctcactgatgctttatcttcatcctgcttctgttttatttttgcaagttcttgtaccttagcaatgtacacctcctgacaaggtgacggtgaagttagtaaatctgattataataattatttataaataaacagaaatacccataaggtaatcaatcataacacacaggattctgaatcatatgactgaaaaacaatttttcctcctctgagtgagaaataggggtggggagctaatttgaataattattctttctttaataagactgaaggaaaaaaaactgttatatctttaaatttaagaaagctgtagcttcaagaacacacaaacatattttaaaaaaataacaaaatgaccagtgtggtcacctttatagacaaggatgtcgctcagacaccaagtttagaaatgaaaataaaattagagagactagtttattaagaccaatgtctgatttcaaattttaccaggcaatgccataaatcagggagaataaataccataccaataaattttaaggaaaatgtaccttatcagcgcgattctttgccatgcttctttttctttttgttatcttccttttgcttattatctcactgttgggccgtgggtgatcatcttcttgttctaactgtaccctatccacatgatcttgtgttgtccttccttctcttttccttaagctccttccacccattaccccattgcaatcatcttcagtggtatcaatcacagaaacttctgaacacccatttttatcatttgtacagaactgtgcctcgtctgcgtgattgtttgccattatccttttgcttttccttaagctcctttcgtccatcatctcattctccgcggtattagctgtattgtttacagaattttcaaag

SEQ ID NO: 44524 - DNA, 1614 bp, Cannabis sativa
caagtttcccacaaaaatagccaaattcaggaagcctttcatatttgaaatctaaccatttgataatctctctacccatgcatcttaataaacctaacatccatccctctcctaatgggcatgttcacatccaattccattcttatcctcatataaggcctagtaccctctctaacagtagttttatccacttcaattagatcaccaacctcaatagcaatgaacttagcaagttcataagatttacacataaagggaatcccataaacctagacccaaaagggtacataatgaagatgctcaagggttataggaacagaactgtcaggagctgcaaaaatggtaatactttgagcaaaatgctaaggctgaccctttgaaattctacccttatctctctcacattcaaaaataaccaaaaaaaataccatcagcatgctcagaaacaataacaggaaaatgacactgcaatgaccaaatttcaaacagagttttcataagagaagggtgattaaagtgtcaaacagtatgcaactgaagaagaagactaatataagtatgggagtcagtgggattaacatcataggtataaacaatgttttcttcaggtgttaaagctagagcatttgagacattggcaaaaaagtcatccatggcgccaaatagagaaaacaaaggtaaaagcaataaaaggaaaacagagaagaactggggattgagggttgatacctgagacgtgccttatatagaaagaaccagaaagctttttcgtattcttctggaggatttcccagtcccatcccagatcgtaggaggagtagcccagatgatgaaaaagatctgattagcctcaatttttcaagcatttgcctccattttaccaagatcaaagcgtcaaacagaggtaattattgagtttttgcaagaggaaaagaaaagaaagagataacgaggctatgtggagcaatttcgtatgggaagtgagaaggatttgcaattaatgcactgcgaagagtaattaagatgggaaagaggaacaatgtctttcccagatcaattaatgtgataagtaaagcaaaaagaagtaagagtactgagagagaaaaaaacaaaatagaagatgggaaccaccacaacactattttgagtggaccaaaagaaccatactcggtactggagaagtggaacataaaccaccaaaacgctctagaactagaaaaattgacgatggtatatagtaattgaaattaatctttcaagactacttttttaaaaaataagtgaatgttacatttggtttaaatttataattatgtttcaatatattaagagtaaaataaattttattttaataaaaagtgataaaaaaaaagtcaacaaaaaaagtattaaatatataaataaaagtataaaaagatattacttatattaataagtgatatttattgtaaatgtataatctcatcccaactattttttgtgctaaatttgatataatttttagcatattaaaattttgaccacattataatttactattggagtttaattttataaatatagactaaaatataaatatatataccacatactctattgaaaattatgttagtg

SEQ ID NO: 44525 - DNA, 2064 bp, Cannabis sativa
ctgtaaatttgaaaaaaaaaaggtcaaaaaaatagtatatggagtaattctcctattatttttttttaatttttaattttttaaaaatgtatatttatttgattgtaactagtaaaactttggttatatatatctagtttattataatggtaagtaattgtaatagaatcatgattatactataaagttaaaataactttaatactttctctttatataatcttaaataataaagtgaggataattttatcaatttatcacttatttaaatattcattctaacaacaaaccaaacatctgaatcaattttgattactattcttattccattatattactattatcttacatcaaaataaacatcactttatttatttattttttttttttgacataaaacatcaccttatttcagtcaaatgaactgaaagatcccaacttggtgggggcccaataagtagtaggagtgggcccaacaagtttgaacgtgaacaaagaaacatatagaacaaaactagaaaagtgagcttgggctgttgaaagtggacccaccaaggaagcttcatcatccattaacacaaacacaatagtttccctttcttttcttttttctttttgataaatacaataaatagtttccattcttgctccaagacattgtacttgaaaacaatcatggcttgtatattgattaacctaagaaattgcattgattgaaaatatcaatagcagctctaataccatacagtgataaatcttgttaccaatattatatttatttttcttaaaagaataatatattttaataatgctactattaggaagttgtatgatgtgtcatttttattaattgagtattgtacttgagagataacaagcttttttttaaaataaataaataaataaataaagcatttttataaaattaaactaaattagatctcatagtcattacaatactaaacactaagcacgatttttattttagcatagtgtacgagccctatattagctctagtatggtaaattacactcgaagcaatatcacacaatttttcaaatgtgtgtgctatgaatgtattttgagcattcttcatctacattataattttacggcacttatttactttgagttgatactccttaacgaaacaataagggaaatttaaattaatattcatgcatttggacaaaatcagtgcactaaacttaagtatatcaaagttagttagataggtcactttttcattaaatccaaaaatacccctcataactcacccatcatctctctccccttctttattctctctatctcttttgctctcttattctcacgcacacgaagatcctatcaacccacggctgccaaccactgcacctccaaccgaagaccaccgacgactaccaacccaagacccaagatctttgaaccacgaccaccgcgccatgaatgtaagtttccattttttttttattgtattttgtgtgatttagggtttgagtgtatgattttatttataggtttattgatttaagaataaattacatgattaagagttgatgttagatttggggtcgaaaatggttggatctgtgttttgagtagaaaactaatttttttgccaggcccgatagtaatgctttcctgttgttaaaatgagtaaaagttgaagacgaaggtccgatgatggtttaatgatacctataaatgtaggatatgatctgatggtggtctgatgctttcgtgacaagcttaatgaatgaagtttaatatttataaaatgtagaatatagtctgatgatagttcgatagtggcctaatactactattttttatgtacagaaacataaaaaaataatatgtaacatcaagtcactatcggaccaccatcagtatgaatgagaatggggagtgtggatggtgaaattagaagagaagataagagaaacgaatattatgaatattaatataaagtatacatatttcttttaattttgataagctagtgttcaaaaaaatttatgtataaatgtatgcatataaattaattttttttaacaaaa

SEQ ID NO: 44526 - DNA, 2129 bp, Cannabis sativa
gatcttcttcttcttcttcaaagtctgtagcctcttcctccttctttggccgctcgcagtaggccaaaacttcttcagcactttcactgaggaagctcaagtccatgctagggtttgccatccatgctcgatagatggaccgttgtgcaacaatgttgcaactttccttggcattagcctaggctccctcaaggttcacgttggctgcatcgagttcctcctgaagtttttggcaagcctcgcgtttgtccttggcctccttttgggctgcttcaagttctgccttatgattcctctttacctcctcagcttccttggtgagttgggtgttctccttttgagcatcattccatgattttgcaacaacctcgcattgtttaatggatttgcgaaggtcatttttgattgcttaaccttttggagaacccgacgttgggcaatgtgtgataaaagggagacctacaaggaaaaatatacgtatgaatttttatgaaaatctgaaagaattgtcaaaaacaatgagaaggaaaaagggaactaaccgagaggttaaaattgaggcttctctcaagcatctcctcggggctaccactgttaatcaaattctagtcaccagattggaaggatttgaaatggtgccagcaggaagtggcaaactgcgagtagtactcttagccagttttccctgcctcgatgggcaaagggaagaaggttccttgatttgtacacggttggagtgtagatttgaacttgatcttaagaggacttaagacttaagggtcgcaaggctcgctacttattggcagtggtttttttggatctcttgaggggctctatgttctcggatgatgtttctgaggaagcaatcctctttttttccttcttgcttgaagtgttgagaagattttcttgatccatatctacgagataaagagatacatcatcacttaatcaaaaatacataaaaagaaaaatgggaaattaattccctcttaaagaaggttaccataatcatcagatgatgaagaagaaggattatagtattcactaaatttcctagatcctgtgatcatgaatatgttgtaaggattaattggatctaaatctcaatatgaatcttagtggctcgccctatccaagttggtcccatactgctcggcaatcccatagtatgaactagggcaactaagttggacacaaaaccttgggtaccagctatcaaacctatgagttatgcgatctattaggaaatggttcaaagtataaaagttatatctactatcttgaaaggagactagcgaggtacgctctgccctaagcatagtgggtgaccatccgcattgattaccttgggatgcaccttcttcagcttcccgaggggctattttctcgagatagtgtacgcaagcacataatcctggctctcttcgtttgctggaactgagaccttctcccacgaagaatactttgaaaatttgtaatcacaagtgtactcatctgaggtaagaaggccaacagtttttaggttggctttgttaagaagaagctcaaccgatcgcagtctgaacggatgacctagtagaattttacgtcgctcggccagctggggagtaggaattggccttttcaataactctgtcaacatgataaataaaataagtcagcaagtttgaggctacaaatatgaaataacttaaaaccaagtttttgagacaaagtttacttacgtattatgtgaagtgcagttgtgttgattgggaaaagaccagttgtctagaagaaatcctctttaaaatttgtcttgttttataatcccactatggtcctacgatcatttgtgtgggtcccgaggtaatagaagcccctacacaacgcttcctcgtaggaactgccttaactgaataaaaataaaatatttccaggggagtgggacactcccatcctaaaatgaattataaaccttcaaacttgcaagaattacagaattctttacagtactctcttagggggagaactgctccagccctattgtgctcgaggctccaagcgtcgatcacaactgagctactagtacttgcttcaccagactcctcgcgaataggtctttctggtggatagcaactgaattc

SEQ ID NO: 44527 - DNA, 1351 bp, Cannabis sativa
ttgataacttttgtaaaacagagggtctaaaatggtatttaccctattttaattaaggattaattcctaacctcaaattgagaatggagtagactgtggagaagcaatgctacatcgaatcaaagatggtttatctctaattagaatgaacatcatcactagaagatggcactgacttaagaacttcatcaaccactatcttcaacttattaggattaaggatgaatgatgaaactctaaccctaaccctaaccctaatttctttttgagaaacagaataatattatcatatttactagtggtaattttagtagaatattgttaattgttcttaataattatggaaataaattggacaattatcattaatgattctgtaattatgaagattgatctttatattatattattgatttaatttctacttctttcccttttaaacttctattcacagaaaggattaagatcaattatggagatgatgaaactaaccctaaccctactttctgtcaatagcatcagataccattaataagttcttaatacaatttgaagaactcaacaaccaaacagaacgacttcagttaagttgttatcaacaacattaaaatctcttaagcatatgtttttcgacacaaacaataataattataataataaaagtttatacaactcttcgacataaaactatgtacaaaacaaagcttgattgaaataccaattgaaggccacagcacagaaataatggacaatattattgttttggttaatatatgcaagggacaaaaaagagtttcaactcatgttttttccttttcaagctatttttctttttcacatataaacaaatccaatgaaataacttccaattcatacgaacctctgtaaaattttcaaggagacaaggcacgacacgacacaacacgacactgccacgggtaacaataacatcatataaagagaaactgaaaaaagagagaacaagaagaagaccggcgataaacctggcttttggaatgaatggcgtacatagctgatgtgattacaatagtaacggactactactgtttatacctcgttgggatattaataatcgtcaaagaaaggcaacaatgagttctcaccatcgcccctcatactcgacgctccgtatattttgcttgaatgtgagcaaaagggagtttgtgacccctgatgatgatgagtagttcgttccatggagcggttttccttttcactagaggaacaatgtcccaaaatgtgtcaaacagttttcttatagccatctgcagaaggatagggggaaccgaacggtcagtgttcgttctgtaaaaatccaaatcaaaattcc

SEQ ID NO: 44528 - DNA, 3281 bp, Cannabis sativa
taccaaatatgtacaatttaaaaatatgaggtaccaattaagtattattgaaaacatagagtaccaaatatgtttttttataaaaacacaggtactaaatgagtatattcccaaacccacccttgaggcatgtaaggtaagcctccacttaatttttattttttaataaaatttatgttatgaaaattccaaatttcaagtctcccaaaatttatgtgaattgtcctggtctacctattatggatgtggagattgagctaagtcatcaaaaatattaaagcatgaagtgactcattcatgcgttcgattatttggcatgttcgtcttcgtttgctgaacactttcacttgtgcttttttaggttttcaggttattctttttgattttgtagctgtttcagatttttgcttggatctacattttaatgtttggttctgtttaacttgtccattctgaaataagttcaataaaattgaagttgtcaataaaatgtgtatcttgtaattagtggttctatatggtttgtcgaataatgtttcctaggtttatatatatatgctctttgatgaagtgactatgtgaaagttttcttttcttaattatattgataagaactgtactgataatacatattgcagagttgtttttccttggcttcaaattatctctgtagttttgaacacgtatgcacaccaagtgtttgtcaaaaatctttaatgaagatttttcttgtgcatggagtagatggctttcatttttttctatgttggtattgcctctaagttattgtttattctgaagtagttttggagttattctaaggtgtgataccgacgtttgagaggatgaggaaaagtgtgatgaaacaagttcttgaggatggaaatatcgttcataactaattgatttcaccaaacttggtggtttggagaagaagcagattgtcgacactctgcttaagattgttgaagaagataatgagaagattatattggggtgggggagtaggctgtttggaatatgaaatggaggtacaacttcggtggtcgatggagtttggggctttaagaagaggagaaaggagaatgggtcgtaggctatggaggtgcactcagaaattgaaagtcggccaaataataataaagaaggaaagagggttgtgactctcgaataattagcatcaaatatcagttcaaatattattttattaaataaaaataaaaaatcactcataaatttctcataaaccaagaattcaattatgtaggcacactttatatatatttacatatgtgttatattaattcttctttttctaattatatatatgcaatatatacaatatatttatatattataacatatatttaattaatttcttattttaattcttatattactttacaatagagttgtaatacattttaatttttttccattataataaaatctttatcataattttctcaatattagaaacaaacaaggagaaaatgaaaaaaaaaaaaaaagctataatccttattacacataattaattgattttgaaatgtgtgtgtatagatatattcaggtatcttaatatataatataattgatatctttgcccaatttttttcattgaggcttgaagaaattggcatgaatacctgtgtcaataataacatacacaccagccgcagtcaaaaatacacttagagccataccaagtaggccaagtgcccaattgagcaaccatattgagctacacatctttggctttttgatcttgagccacatgaaacatggataagctagagtaacaggcaacgcaattcctccaatcagaccagctaggctccccaagaatggaatggccactgccacaaagaagcagctgaatccgaacataatccggaaaactgcgcggagccaccatgggcatggcttcttcgtcctcctagtgtacagtgactccatatcatcgaatattggcatcccatatatttggaatgaacttacggcgtttattattaccaataggctcgttaggcctaagatgaattgagatgtgtcacgtgagtggaatgcatacaaggctgttagcatacccccttgttctggtatctatcattcaaaaaattaaccgattaataattaaaaatttggaaattggctttaatatgttttttttttttcaaaaagagaaaataaattattaccttttgaccgtatgcccaatagcctcctattgcaagggggaataggcacattgctatgagaaagtaagaaaacttgacacctctccacattgggattcttgatggatgcttttcactagatggcattgtggactgtatacaagcgcgtattttttcaataattttactcataactttcaaccaatgtaagcttattatgctcttgtatgtagttattttctcattagagttacaaatttattggtaattaattttttatatggaaaaggaaaaaggaaatagaaaacatttgcacaaattaagatgagtatattgttagttaccttaccagtaatgagtcatgatcaacatataattataaatattatattaaattaaaatatataaatcagatttttattgcaactccaataaaatatatagaactagaactaagcaatttagtacgtctctcacagctttaatgcctagatatataagtcaatctatgattctagcatatatgaagtctacggtcaacttcatccaacgcccaacactttaaggcgggaagggaagaaaaaatcagtgagaatcagacaaattttatggagatacttatatacaataagtcttcatttaaaaatatatttatatattgtatacacattgagttgtacctaaataaatataattatttggctgattaaaaaaaaaatttgacaacctaataattttttaatccatttaccaaataattaacactttattattaatttattatttttatttatttttttaaaaaaaaatagacataaaaaattactagtatgtatcatattatagcctaaattaagtttaaaaaaacttaaaaatgtgagataaacattaattgaattaaataaaattaaacattgttatacataaaatataatgaaaatattaataataacttgttcaaattcaatatttcaaattaatataatcaaaatgaataattataaagttttaatttcaaattaaacaccaagaaattcaaaattaaataataacaaatacaacaattaaacatattcaatataatatattatataaatttta

SEQ ID NO: 44529 - DNA, 1616 bp, Cannabis sativa
aaaaaaaaaaaaaaatatgataatcttacttaaatataaccgaccatgatgattcaaatttacacataacaaattttatatatattcaattaataaaaaattaaaagtaatgttagtattaatttaaatatttaatcatgaaaacagagagttaagatttgttttggcttcctatttactttccttttatgaaacaaacaacagtttctgacaatatcattaattagtgtctgacacaattttggcctcattcttcttaattttatctctatctatctttaattaattattttatgtataaataacagtaattaatttatatatttaacagctacatcacaagaatgtcatttgtgtactaattaaaatgattatatatatattttattagaaaatgataataaaattgagtgagtcattccaaaaaaattgtataaaaataattttaaatgtaaaaaaataattcataaaattaggaattgacttgtaaatagtccacaaaatccccagaaattaagccgaagcatgttgtccttgtgtgtttcagtcaaaattttgacttttagagtaattaattaacatctaagtacaattaaattaaaaatacctattacaagcttctcaaagagatcacagatcacaatcatatatatatatataaatattctttacaaaataaaattattattaataacaaatatattagttagttattattattttgttgaataattagaacgtaccacctgtctctctttaatccaataattataaaacattcttataagttaattactagttgttccagacatgatctgaaactagaattagacaatttaaattgtaaataaatcaattattttattgtgatttagaagttgtaggctatatataattttaaaaaaaaaagaataataaaaacaaagacaaataaattgattttgttgaaagtcaaataatgaaaatgttcgttaattaattgattcctaattagcactaattaatatatctatatatattacagcagtatgactaataataagattttttttataaggtaacaaatgataataaattaatatttttgaaataaataaatgaatatatatattgtcgaatatcgtacattttaattttatttttttcttactagaaatcttaattatctcgtttcccaccctccctatatttattttttccttaaaaaaatattcttaccatttataaacgaataatataactttttctatagtcattttccttacatatatcatatgtaaatggaaagagaaaaagagataataatataatttttttaaaagaataataatttattctctttactcttttatagttattaagaaaaatatatttatttattatatgtatatatatttcaaaaaaaaaaaaaaaaacaagaagataatttttttcatttaatcattatatggcaatgaagggatataggctttggcaaagggcctttagaattacattattaccaattttttgttgttgcaatttaatccatttaattatacactttaaatacctacctacactcaaaattttatttaatttgccatatattttgtgcttgtttcttcccaatatat

SEQ ID NO: 44530 - DNA, 2864 bp, Cannabis sativa
agattgtttaggattttttactacaaaattatgacttatatattattgtgcgttcgaaattttttaggctattaaaaatagtctctgaattatttacctcaagttttatcttatttaatcagttgtcacatcaacattacgtgtatatattaaaatttaaaaaaataaaaaaaatatatatgtatttttaattaaaagatcactaaactaaaaatccattaatgattaaaattattacgtaaaataaaatttgaactatttttctcaaattaattatacacatggcgttgacaattatctaaagagtcatgtccttattttgtttgtcgtgacaaaacttgaccatagaaccaatttacaatattgtaaatattttggcgattatttttaatggactgaaaaatttaggagcacaataatatattaaacatatattatagttcgggaggcaaaattcttaaatagtcttaataataatcatcataattattggtttttactcttttattatttgactattgagctagttaaagcattattgttaatgaaagttgatcaaacatttcattaacaatatatattgacatttttttaattataaaataacatttctatatacatagggcattttggataaaatatcaaattaatgtgtcaagttagctataattttattgggaaaataattaaaagagaattattacacaaaatgattagtgttttaacaatattctctacaacacttgaaaaatcattttatttctcatcaaatcatattttaaaaatgatattttaatatattagttactaataatttcaaataccctactaataatataatttttcaaaacattaatgggatgtaaagaaaacataaatagtaaaatactttgagattttatttatttatttatatattattatttttttcttgtataggtgagcataaacaaaagttcatcacatgggattctttgctggcatgaccctgtcttactcacaatatattccttagctgttagaagactctagtcttatctctctctctaaatatatatgagagaaatactaaaagagatcagtgatgattaatacttttttatgcatcaatattgttatcgatctaactaaatattaagtctcatataatttaatataataacttttagagagtatcatcagccaattaagcgatatatctagaggtactaaggtactcaataacaatactcaatatatataaagagaaagatatcaatagtgtcttacattgtatcaggtctcatataactaaaaataataacttttagataatatttctaaccgattgtattacatcacctttaaatagtgatagatattattggtgctgaataataatatataaatataaatatatttctcttagtgattcatcaaatatatatcttaatcaaactttatagtacatttttttccataagaatattataaccaaagcacatgcttttctctccatgatttatcatttagctactcacagctagttttggtacacctattataataattatagtattattattattattattatttaggtataaactaattattatttttatatatatgtggtgcaacttgtgacatatatataaatatatagaaaagccaaaataaatacatgttatgtgtgagagagtagtaataataagtacctaaagagagaaaaaaaaaataccatggaagctattattgataatcatcatcaacaacaacaacaagagttttcttctggtcaatcatcattttcttcatcaattcaagatcaagatcatgatcaaacatgtcaagatgtagttattaattatgatcttttattagaagagtcttggttttttggtaacctactcattaaccaaaaaccaaaaatgttaaggtgtttttctgatccttgtccttcttcttcttcttcgatttcgaatattattgccctagacaacaacaacaacaacaacaccattactcgaaatctagctcgagctccttcattgccacctaatattggaagagaagagaaagaagaagaagaagaagaagaagaaaatggtaactcgaatagggttttggttaccaaattggcaagtgatgagaaaaaagaaaggaagagtagtaaaataataaaggagcaatgttgttactcgttaccaaagcctaagaaaaatatgttagtgagaacacaaactttgccaacttcaatgagaaaagttgagattgttcaagatcatcatgatgaagataaaattaatggtgggattagcaaatcaaatcgccaaccttcacttaatcttgctgatattttgccccctagacataataaggtactatttattttttattgttatttattgattatttcatattggagtgttttcaaaattaccatttttttatgtttttatagtatatattttcaaaagtgctatttttttgtcaatgtcttgatagcatattttgataatttatacataaaaattgtaaaaatggataatttattttccatattttggtacataaaaactataagaatggtgggagtttctgagtatatataaatatatatatatatataaattttgtaactttaatttacttaacatggaaggaatatagtttagttccattttttgaataaggctattaatttaacatgtgtcatgcttcatatttcaaaagtaataatagtgaaatttgaagagtaggtacaactaatataattttgtttttttgcaaaatagagtaacaaattatgtatgtatttcacaataagatggtttttgcagaaatacaactaagaagaaaatttatataaaaatatcaatttt

SEQ ID NO: 44531 - DNA, 2677 bp, Cannabis sativa
ctacccgccattttttcttctgagtagccccaattgagaaagagagagatgatttagaagtaataagttggttaatgaaaactttgtggtctttaatctttatatatatatatatatatattaaaacacctagctagacatatattgatgattataatttgcaataagctgtttgcaaagtcatggagtctagtttgacatagtaatattctcacgtcaatgtttatacatatatatgtcaagtagacaaatataatatcagtgactgagctggagagacatcgtaataattatagagttggtgtgagttgtatcaaataatatagagaggtacgtagagtcatatttaatttattacgtatatatagtcccctacgttcatgggtcaatataaattattcgactcgggtttttaaccttaataatctatctatgaggccacgtcataaccagcgtatatatataaatatattgacttttacaaaataatggtcagaatacttatggtttataggttcttccaatcattattttctatatataaaataaagggatatgattttgtcccgtaataactagagtagagagctaactaatcttaatcgattaattgtactaacggtcaactaacaacaattctaccttgatcattaggacagtaagaaacaatagtagacagttaagaaaaaacagaacaaaattataaaaggaacaacttagaacatagaacaattctcattccaaaattctaagtaggttcaaacaatgtttgaactttgttgtagcaaacaaccatgattagcatgtctgaggggttttcaacagtagagaccttgtccaacttgacttttccatctgcaattacatctctcatgaagtgtagatgcacatcaatgtgcttggtatgctcatgaaatatttgattcttgcttaagtgcagtgtactctgactgtcactaaacacttgcatttgtgtctattttacgccaaagtcagttgccattccttttagccacaaagcttcttttactgctttagtataggctatgtgttctgcctctgttgttgatagagccactataatttgtaagttgtctttccaactaattgtacaattttttaggcaaaaaatatagccaatttgtgaccttatggtgtctaaatcaccagcataatctgagtcgacatatcttgtgatttttggtgttttagattctgaatgatactttagacccaaagtagatgttccctttagatacctcatcatctatttgacagccttccaatgctcaattcctagatttgattcgcataaacttactgaccatactcattgcataacatgtctgactgagtataaatcatgacatacataatactacctaccaaacttgtgtatggaaccttctccatgtacttggattaatcttctgttgagggtgcttgcatgttggacagtttgaaatgttgagctaatactgtggtaataggtttggcatcttgaaaaccaaatctgttgagcagctttgagatgtaccatgctcgagatagaaccaattcttttgacttctgtctctacatatctcaattccaagaattttcttggttggtccaagatttttcattttaaattctgtacaaagcatctgtttcaccttcttgatatcttccatatactttcttgcaatcaacatatcatcaacatagagtaataagtaaaatgttgactttaccttagaactcttgatgtagacacaactatcatatgcacaccttttgaaacctgatttgatcatatactcatcaaattttctgtaccattgccttggtgattgcttgagtccatatagtagcttcttgagcaagcacaaatgattctcttttccctcaacctcaaatccctctagttgcttcattagaatctcctcatctgattccccatgtaagaaagcagtcttaacatctatttattcaagttccaggtcctagattgctactattgccaagatcattcttattgatctatccttcacaaatggtgcaaaaatttcatgaaagttcaccccttctttttgtgtaatgcccttggcaaccaatctagctttgtaccttgctctctcaactcttgggatctcctctttgtatctatagacccatttacaacctattatttttctatcagaaggccttatgatctgtgaaggctcgattttgaccgagtaaacaaaaagacaaaagaaaaaaaaaagatttcataaatatggtgggacccttattttagttaataaacccctttccccctattttcccaccagacaatctctctctccctttcccacttctctttctctttctcttcaaagcttcaaagaagccataaccaccaccaccaccactttttggtgaccactcttcgcccatcatccgaccccatgtgccaaaccattcaaatcccacggcgccgacgacctcaacccccaagtggcggtaccccttttaacgtcgttagcccaggatcactagccaaagtttggaggttcaaactttgaatagattttttggcaacctctagtgtctgtttgatgagttgtcttcaccactagagttagcttcttgaggagaacaatctgcactaagccatttcacctagaccgctacttttttcagcgacgatttt

SEQ ID NO: 44532 - DNA, 2368 bp, Cannabis sativa
caactcttacaaagatgtctacaatatgtgctaaccttgtacataatcattaaatcaagaaaaatgattctaccccaaacttgttgagtctggaggacgatgaatcgcttctaatagattatctttccctgtctaaataattatttactctgccaaaacattgaatgtagtcaatgttcaagcaggttaattaggaatgaaataatatttgcatgcctgctagcagaaatgtataaaatttaattccttataagcccaagtgttttgttttgtgatgttccgaatattattgttgcagtcttacatggattcagaaatcagagcgataatggcacaatatatgccgctggacagccaaggagaagttccaaatcacgtgaacgaaaatcacacatgagaaagaattgtccatttgtactcttccaagaactcgatatgatgaaaatctggatgtgtatcatgaatagaaacaacctttcttcatcttgtcaaaatttttcgagtctcgagagtgtcgtcgtatagatgggtgtaacatatttggataataaattaatgcagatttcaacatgtccgttgtttattaggactgtaatatgcactgcaacaggagtcagaggacgacagttgaaggaagggatttgattttgtggtttgaagaggaagatttcaaagggttagggagttacttatcatccagaatttcatttccatggaacatgtttttcaatttgtatgcaaccctgtaatttacccactttgtacttttaggacaggttgaatttcttgttatcactattggtttttttttgggttgctaggatcactattgttgactcaatagagttcttttctcttgttactcataaattaaggaaccagatgcatattcaagactatatctacattagtaatggatctaataggagtggagttgaatgaaatacttacccaaaatatataataaattataatttcacacaaaatagaatgtcttctacttcctccaactatgatcctgtgaaaattcttcttgaattataacaattatttcatatatttttataacaagtaatgagtttgccaaactattaagggcactcacatcactttctttaatttatttttttaaaatatcttatcacaattttacttactctattttacttcacatatttacattatattataaatcagtttttctataactttgcactataatttaaaaatgattatttattcattttgataaataaataaataaaatactaataatttcacacatatttacataaagattttttaaaaaataatataatacttatatctcaattaacattattttttttaacatgtagttaagaattgttcatgagttaaatcttttagctataataattcatttgatggaagaacaattttttttttttaccttttacctattttacctattatattatgagtgcgcttaagtattatgaatctgtaacattaaaaataaattatcaaagatcttttggattgagagaccctaggcaacgaccccactgtcccatcctaaagacgacttgtttatatgaagacggttgataattaaaaaatgagacgaaattgagagttgagaaacgtgaagctttaaaatgatagtcaataaaattatttttttaacccaaaagcatattaaaaaaacgaagtatgtatttattaaaaaaaaagagtatacattaacacgtatttacttatgattttattttaaaaaacaactaaaataaaaacacatatattatcataaacacttttttttaaagaacaatcataaattattttaaagtcattattattttttaaattataaaagtggttataccattttattaaattataaattgaatgatataatatatatttttaaatagtataaaataatatttaaagttttatttttgataatttttttgtaatataactaatcaagtcttgtgataacatttttaaataaaattattattaaattttattttaacaaaaatagttgaggatattattttataagataaatataattttggatattgtattttgcataaattataaattggaccctctattttgttaaatgataaaatggactctgtattttttaaaatggtacaaataagacgctgaactcaattttcgataatttttttttaatataatcaacttgaaaataattcctaacgtgaaaagatgcaaaaaatttaattagttttgtcctaaggttggattattatttttttatttttttttttgaaggaaggttggattattattaagttatgttttgacaaaaaaatcagttcaacgtcctatttgtaccattttaaaa

SEQ ID NO: 44533 - DNA, 4461 bp, Cannabis sativa
  modified_base (27)..(33): a, c, t, g, unknown or other
acccatctaatgtaccacggaatacannnnnnnaaagtacatcacgggacaaaatcatatccctatttttgtaatttaactgaaaactaaattttttccctaaatgtaattatcactttaaaagacgtattaatagttcagtgtaaagtttatgcattaagatgtatttagaaaactttaatcattataaaaatcatttcatcacaaaattggaacgatgatagatctaaacgaggtcatatataggactttttttgacccactttcgctcataatatataatagaatttatgttatgaagtatattttttgtataaatatataaaaactaattatgtcacgccccattatttggtaaaggaatgattttttttattttatttttaatatacaataaaaaattgcttgtaagaaacttgacaattctacaataaataaataatattgatgaatttgtatagtagtgacagatatatatttatacatatggtcaatatattgagggttattgtgaacatattaatgcatggtgcttgttctctagtacgtacactaaataataaacacattatttagccaaaaaataaaaaataaaaaataataaacacattaataaatggacagagtttggtaaaccataatgaaagtaggcattggcttggtttgctctaattttattaacaattctaactagttatgccaccaaattcctaccaacctttttttttggtaaaccaatcaaaatcacatgtataattattttttttgccttatattattatattcattttcttgatgggtatcatataaatatatttattttttatattaaaatatgattataagaccgtttttggtttaatatacatgttttaaaattattattaatatgcaacccaatgtaaaagaaatacacaattaattagattatttacataatattaaagatataatacatcaaatatatatatatatatatttatattcttttataggatacctcaactataaaatattaaatcataataattgcaacaatcaaacaacttttttttttaaggaatacacactattttatttaaattcaatatatattaattgaattgaaaagaaaaaacatgtatgtaatcaattcctaatagtaataaaaaatacaaatttttgattatagacttagttaagtgattttacatttcttctcataaagaaaaagtctcaaattcaaattttcctcccataaagtcaaagaaaaaaaatacaaattactgtaataaatcccttagtcccatatgcatgacaataagtgagaccacatataaacaattttttttattattattacaatatatcaaagacattttgttgcagtagaaaaaacaaatctgcattttttatgttttgtcagagataagtataccaataaataccatgagaaaataaataaacataaagttattattattattatattgattaaatatttataataaacaaataatatgtaacaaatgataatatacattaagttgtaaatattttataaaatattgaaattttgtattttataattacctattaattaatttaattaattgtggaataataatattagtactaaaataattattcggtagctatgtatagaacacaactctgtaattgaagaataaatttgaaaacaaacagtgcagaaaaataaaaactcgcgaggtttttatacgtggtatcaacaattctttcagattgttactagcgtacgggatcacgcccagagataaaattcattaaataggtctcacaaatacaaagtaattgacttatgcataaatagactccctcttattatatgctgtaaagcttgatgtattactaaattttgctaaaatttcaagtgctcgaactctcttcaatcaccttgaagagtgcttcctcccgagtcaacactctcccgaaagcttgtaaccttctcccaaaagtagcactgttgctcttcttcttctgtagattgaatacagactcaagacaatacaaaatatataaacataaaggaagacaaacaccctatcctctacacaacaaagtactctctttcttacaaaatatgagtgaaatacaaagatgtgaaagagatacaatacctagttgttatataacgtgtatttataatcaatatacacattatagatagctcatacaaggtctaaaaaagaccacaactcataagaaacttccttaaaaaagatattcaatcaacccaagaattttttcttctgtacctataaaattgtgagcagtaagtgcgacgtttcttctatagaaaagaaaagtcttatttcagttttcttcccacaagatctgatcaaactaattaggaacccgtataggataataagaaatacgacttgaaaaataaagaagtgatttattcataaaagttttcaattttgtccaactttctgaatttagaatagttggacaccttttataccttaaatgaatcaatcaattaaaaataaatatatgggaataaaaaaaataactcaactgaaatccatattccctttataaaatatttttgtcaatctaaatataataaaaataaaattaacaatctccccccctttggcacattgattaaaaaagtattttataagaagaaaacctggatgaagtattagaaataaaatagtgtatagaaaatactctccctacatgaaagcatactcacattaagaaaatagatttttaatgaaaaagttcacaaaccacaaacatacaattccccttaaaataagggtttagagttgtaaccaaaaaacaaatactactctctttttgtctatcaaggagccaaagacaactaaaacatgaaaaagagtcataatcgttcaataaagcatagatattaaacaaagacttaaaaaaaattaaccacttaagcatcatcattgaactgaaagaacttcatgatgtccatcctcctaaggagcaaagcttggcttgtttgcattcttcccaagtaaaagttgaattctacaatttctgtagttgcaaaagtagaagttaaatcaacatttgtctcatctggagcaccaagggatgcaaatcgagtcttttttttttttttttgagtcttaccttgatcgaggaggtttttctggtactttaaaggtagtaccaacaataggtgcttcaatggactcattctcaagagatcaattcattttggtcaaataacatcttataaaataagagaggaaaaataagatcaatcattagttttttgcctttttgaaaagacacaatttgatcccaaatcatatcaaccaaatcaaattttgcacaagcaaaaactttatataaaaagaaagtaggttcatttaaaacatttaccaattggagcatggaagccagttggacaaagtaaaccccatgaacacgacatgatgatatgtgagttaagacacgtgcatagagcctgagagcataacatccctgtcactagtgagataccaaaacacttttgtcgatcaaactccacttcagttggttcaactccagtaggcaattgaagagcttcagccacattcttcacaataaaggattatcagtgttcctgacaaatactttcccaaacatgaaggagttttcgttgagactctctttgattatgttagcataaaattccttgataatatgatccacgtaaccatcaaaaccaatcaaagtgtccaaccattgtttttctttaacagattaagaacctcaaatggcttatgaccaagcacattaaaatttttctcatcaataaaactccttccctcgtaaaattttatatctctagtattatcactataacaaaaataatgagaatgtggcatgaagttttcaagaagaatactagtaggcctttttctcttcagatgaggagcagtttttggaggaaccatgggacatttaccttgggcttttaatatatttattaaaattactaacttagaaataaaataattataaaattaattttatatccaatgtataaattttaatctatattaatgaaaattactaacttaggtagttctgaaaataaatttatcttgggtataaatttttattttaaaataaatttctatgaaaattacttaatttaggtaggttcaaaattaataaattaactttctacccaataataaaattttcaataaaattaactttagtatcttaaatattaattatcaaaattagctttcaatatttaagtattaatttctatcaaaataaatgtataaaacaattactaacttaaatggatctaaaattaattaagaattaacttacaacttaagtattacttttctatctatttactttaatctatttattttaatattaatatatttatttaattaaaattactaatttagataaatctaaatctaaattttaatttaatattta

SEQ ID NO: 44534 - DNA, 1685 bp, Cannabis sativa
ataattcctaacttctctcttgttcccatatatcttaggcttattttataggtattttatttatgatattatatatcatatatataatgttataaatatatcattttaattaatgctttaaaattaaaaaaaatatatatctaatttgatttgaatttagaatttaaattcaagtataaatatcttataactaattaacagaaattagtgaaatctttttattttattattatctttttaattaaattaattatccaataatatatttaatttaataatttaaagataattaattaatttaatttaaattattttaaccaataaaataatcaaacaaaattaacatgagccttgatatgtcactctacacgtgtgggccatattttaaggtccaaaattaatttatcaattttatcataaataagatttattatttattctgtcaataaataataattgattaattattctcattaatctcttatttcacaaggattaaaatcaatatattttctctaaaataatatatttctctttttaatattatttaagaataatattatatttaaataataattaatatagggggaacgagctaggcattttgggccaaaatcgggccttctctcatgggttgttttagctttaaaaatgtcatttcttcaattcttcggacctcaattgctttctttttttttttcttttagaaatgctactttaatcaaatacaaataaaattaaattcaaacaaaatatgtccaacataatatatattacattaaatcaatgaaaatatttatttaaaatctaattaatttataatttttttaataaaaataatgcattttcttctctttttatttctttttctcaattataccataaatactaaaattgaatctaaataaaatattttcaacatacgaatatataacactaattttatgaaaatattatttataatttaattaattgtatttttacactattaaacatgtaatattttggcatttaacaacactaataccgctcttactaatatgttatctaataggcaatcataaaaaatatgtacgctaaacatgtatgcatgtatatccattataataaccttataccttgattctgaatttaggcgtgctagtcgacctgagtggaaactattgcttgaagattagaggccctaagttttagcttatgtaaaattggtaagtgactagctacatcacttttagagacttaaactcaaagctagaagtttctctctcaataaatagtgtggcgataccctaaatattaaggacacatgtaaactgaggctccaaaaatcacaccatcgggtgtaccgaatcctcaaacagtggactttttcctaaggttctacctagggaaacgattcatcatttcttggggaaacggtcaaccgtttgtctatagaaaacacacaaatctcaatttcaagttcgattctaccccatatcgaaccaaaatccccaaaacacctaaaaatatcatatacaaaatattttaactaaaaactatatcatcaagccgcatgatcaaatttttccattattgagctaagtttgagcttaaaaactcaaacctagctcaaactttcctaattaacaacaaccaactaactcaaaactagcttaaacaaacacaatttaatttccaagacc

SEQ ID NO: 44535 - DNA, 2635 bp, Cannabis sativa
atgagtttgagggcttggcggtgtgttgtacatgttcaggccatactagaccatgatggttgagtctactagaagaaatattttgtaatcgcagctgtttctgcttaggtcggcatgtaatgataacttgtaatattttgaaaagtttttacaggatctcgaaacaaaatgtgacattttgaatgtttgtaaagttaaataattacaagttataattttactatgtatttgttttaaagtttaaatttttgctcttagctttattaatcccagtttagcggggtcagcatatgtttagttactattcgtggcgttcttattgttggggcgttacaaatagatttattagtgtcattactggtttgaacttgattggctgttgcatctttggaattgctgtttttgttgtaacttggtgggtagctgtgaattttgtagcacttctcaatggtgtgaccgagtatgctgcaatcagtgcaaaaaattatatttcttttggaaggatgggatttgtttccttgagaatcctttttattgttgctggctttgtctccttaaaaggcaaacgccatactaggattaggttctgttgtagcactagaattccctttttgattctcttcttgtgtgaccaagtgaaaagtcctgttgacttctagtaaggagttcatgagcagtatgctacttcgaacttgggaaaaggaatttgaaagtcctgtgaggaaagacatgatgtatttcatgtggtggtattcttggattttcttgacaccaccacaagtacattcattataaacacaggtgggtttgtaattcgagagttgttcccataaggtttttagtttggtgaaatacatgctgacagtttgattatcttgactcaggttcagcaatcattttctcaagttgtatatatggggtccatttctttgttgagaatgaatttttggatcgatccaaatggcagcaacatactcatcatacaagatgctagaagaaatttctttaaaaacagaatttagtatccaagaaataactatattattatttctaagccagacattatacataacagaatcagaaggcctaggtttaaaaattgtaccatccaagaatcctagtttgttctttactgaaatggccaactgcattgccctactccaagacatgtaattgtcttgtcccgtgagtagttgagaaataagaacattacctggattgtttccatggtgaaggtagtgtgggtcagtagggtcttcaaaaggattcctttattgaatgatttgttgctggttttgatcatttcatatgattggatttgtgggatctccaatcgtaggttgtgcgacattgctcctttcttcttgtgttgatgacatttaagaacaaagaaggatcaagtagaaggacactgatcaggaaagcagagaacagtgaatcgccagaactggaacaactcaagggaaggtcatcggagaagaagcgcgacaatggaagcgacagaaacaagatcaagggaaagctttagtttctttgctctgataccatattgcgaaaaaagaaagagaaaaaaaaaaacttttattttagaagaattccataaatgaatatttaagttacagttagagcaataagagttgtatatatatacaaagagggagtaatcgagttaacttgaccgaacctataacttagcagactctactaaataataaccaaactgtggtaaaaaacaagatcctaacaactaactataataacggtatgtaaccaaaagcaacagtttgactaaaagtagagtcaaagaaaggatgaaacactagataaactatataacaccttgaccaattatccaatgattcttgttatattttaataaatttggtagtattaacctaaatctagaaatattgttgagctattacatttttaagaaaacagtttttcttaggttttcagaggggatatcaaaactatattatatcacttgtttaacaatctcattttaaatagagtatcaaaaatgtgacataaagaagaaagtgttatgaacaataaaataacaaaactttgggtacttaaaaaactttcaataattgttgtattaagagaaatgtcaagagaaacatttaagataaactactactttagtgatgctctaaaatgataattttttatttattataatgtaactaattttatgactaatttatttttaataattttattattttcatttactatattattatggtttaaacaacaaaaaaaaaagttgcattctcaataaaatattaaataattatcaataataaaaattactaaaataaattgtaaataataagttaaatttgacacaaaattattttttatacaaaatttagtacaaattttaaatcttgtattgaaaataactttttagtgtattctattatctagctataatttaataaataatataaaattttactgattaattacaaagtgcaacgtattggtattgacaccttagaatattctcaatggacaatgatggtgtttagatagagtgcttgttcatgtggtagagtatttgaaaaaagctaactattagagatgattgagtgttaagtaaagaagaaacacttggcattgg

SEQ ID NO: 44536 - DNA, 2704 bp, Cannabis sativa
gctataactgcagccgttgttaattcaaccttattatgcagaagccaccaaccctgtgtgacaaagccaacaagcatgatcaacaataacaaacaaatcaaatacaatttgccaattgcaattgaatctgataaacttgtgtaacaactcgaaaaaaaatcacaatttatggtgagctctatgcatattaaaaagaaaagaaggattaattataattagtgggaatcattcaatctctgaattcaaatacatcaaaacatgcctgaatactaaaagtgaaagggatccacactagatctccaaataccagcatgaagcctaacctctctgctattatgtcccatctataaaaaaacaatgacaacaaatgaatcaaatgtgtataatataagatacatttctgaatgacaaagcttagcaatgtaaaaagaacaggttacaaaagaagctattgtggataataaagaagaacaatctcaactaactgaatatctaggtgaccattgtggtatatatttcaaagatacaataatacacttacgtggaagtcatgtactcctcgtgaacaaagtagtccaggatataaaactggaagaaacgcatcaacagaacatcaacaatcacttaagatatgcaaaaggaaaaaccattaagtaaggagtttgggaagcagattactgtggagaataactgaaacaggatcattgacctatccaaagtcccatcttcaatacttcttgcaagaaccgacaggttgataagaagccagcccatcattccagctctaacaaagaaaaatctacagaacgaagtaccataagttgtggtagcaacaagcacttctagttgaaagaccatataacatttctcagttcttaattttcattcattgagattccctctttcttcccaaaagcagaaagaatgtgctacatgtatttatggcctaaattcttgaataatggcaaatgaagcggctaaaatatggcaactcaaaaagacttttactttaatttttaaacaacaaaacatccattaatggttaaaagctgaatttatataaaagaagtccagtaaagagcataactagaaaagataaagagaactagattacatacttgagatcaatgcccaaaaaatgaggattcagctgtattccaaaccacctagtaaggaaatgcagggtggccttgtcaatatatgtacccaaaaattgtctaaacatggaatgaagtaatgaaaatagaaatcgtgttagtgtgaaaatttacatgtccaaaaataccacccaacatttttccccctttgcatatttcaaaattttaacaagaaaaataaaaatttactagaatatgagaagaggggatactttcacccaattgagcatatatcagaacaagctcaaacaaatatctctaacttaccagtcatgtattaggtttcctgtaatatgaggcttcaaggaagagctttgacttcttgaagtgcggccagaagcatagaggagcaaagtaacctatcattaaaaattgtggattgtgaataccaatataagtgcagagactatagcattagagaatccataagtccataagtttattccagagttatcaataagtgaaaatgtcacttgcaacttaccagaacactgaacaaaaaagtagttgaaagaagatcaagacccctgtctgatatcgcctgcaaacattattacaaggttaatacaaagataaaatcaatttctcaaacaataattgcatactctatctttattcaacatctaaaaccagagtgaaatatccctgcaaaagcttcagccaatcatttggaaccaaatccatttccaggcattatgatacatttttcaattttcaggccatattaagatatccaacttccaaaccacattatgaaatagttttttgaaagccacattatgaaatagttggaatattgatgcacctcaaattcttataaattttattgaagttttttctttttttctcagatcataaaatccatatccttttcttttctttctacaatttacgaatcaaaataaaaaaaaaaaacacatggaaatagtgaaacacatacagtaagcgataagacattgatcttagccgcaaccccaataagagcaatcagcaaaagaagtgaaaccaaccctaccaataacacagcaaagaaaatatgtcaagaaacttaactcacaatatcaaaggtaaacttctacaacaaattcagtacttagagatctcaatacaaaatgtcaattgtgttctcagcattttctcagtatatcattccaataaataagaacccaaaaggaaaacaaaataaagagccactgtaacgcattttctcagaatacatgaatgaattcatatttagacatgttacatattatgtatcgaaatgtggataaactaaccgttgcagcgataagaaagacgagtgttgtcttgtaaggtaaccccaggaacaatttttccaggcaatatagatccagctattgccaagtaaacaaaaaatgctgctagtatagcaacctgagaccctcgagaggtgaaaatgcaagggcaaagcaatgaaatttaagaagaaatagagaaagggtaaaggtcagaaatggaaggaagggaatttgcagaaaaaggtaagacttacagagttccatgaaggagtaagagtgtgaagaaga

SEQ ID NO: 44537 - DNA, 1892 bp, Cannabis sativa
tgatcaccacttatgatactactacttatgctcagatggtagagaaagctctccaagacgagggtgtagtgcagtttttccagcaaccccaagggactcagagtgttagtggggttactgctcctcctactttcaatttttgtaggggtagtggtgacttaacttttgatcataaaaggaaggctccattgccatctgatggtttgagtcagaataagatgttcgaagggaattagtttcagggtggcccttggggtggctgtgaaggtcgttactcttatctaggatgttcggttggaagaaacatcatcagggtgagtacaaaggtagagcatgtttttattgtgttgtgatgggacattacaagagggactatcccaagttgaagaaagaagagaccaagaaggaagctaaacccaccctagctcaggtttttgccattacccaggtcgatattgaggctagctagtcagtggtgacatgtcaacttcttgtcaacaacattattatgtgttgtttgattctagagctaatcattcctatgttactgctagaataattgataaattgggtagaccttgtgatatttatgaactagggttcagaaccctattagctaatggagaattagttatctccaaaaggtggattaggtctatatcggttagggtggatggtagagagttgagtgctgacttagttgagctagtcatagctgattttgatattgataactctatggtatagagttatttttagtgcctttaaactaaaattattatgataagagtaatgaaagtgtgtttgtttgcttaactttaactagtttatatcttcattttctatttagtaagctagctttttaagtcttgtaaaaattgttattttagttgtgtttatttaattaaatgctgcttgtttgctgttgagaaagaagaattaaataatcaagaaaaagaaaaggatacgaggacaaagttggcataaaagctaaaactgggctatattactgaagcattgctgcaacaaattcagcattctgggcagtgatgtgaaaaaggttgaaaaaacaaatttcatttgtccacatcagcatgtacgtatcaacccctcaaaattacgccaattggctgttgtggagggaggagacaaaacctagtggaccaagattggaaatgaattgggcttctatttttagggtattatattgtaccctatttacctaacaaaaactaagtacaattaccataaagaacatgagctcaactgccatttttggaggaaagtaattgcagaaaaagaaagtaccgaagaggaagagcttaaaaagaggaaattgcctgaaaaagaagaaagaggaggatacaagctccatttgtttgaatttctattccctttcttctgttttcttccttcctttaaatacttgaagttttatttttaaattgtaaaaaaataaaacagtaaccatggttgaacaacttttagtttggattttattttctgaattgaacatgagctaagcttcttgaggcttgaatggctacgaatccctatgtttggtatgattgattttaagtattttctttagcaactttgcttttgttcattcaagtaagcttgttgttattgattgttatttcttggccatgagtaataacttacaaagctagatatggttctggaaaggctagatctagtagttacaacttggatgaagcaagtgaatacctagatttaggtttttcttagtaaatggaataggaatatttcatttaccttgtataacataagaattgatgcttaaatatttttctgcaaattcgtttgatataagaatatatttatctaggtggtagaacttaaactgtgaattttagaaaattctcata

SEQ ID NO: 44538 - DNA, 1195 bp, Cannabis sativa
acgggactattgactgtcacaaggatcgcctgatggtcgaggtcaatgagaaacttactgtggcggaggacatgcctatagaactcttggtcggtggagttttgaaagagatcaccaagggtaaacttttaaatctagagttctttgtacgaattttgccaccagataattataatttttatttctcttttcgagctaacttgaagttggcctatacttattcccgagccaagtctacagctctaaaaactagcacgaccactgatgacttacagaaagcattggaagaggccaaaaaagatgttgagtgagctaaacaaaaaactagttgttgtgaaggcattaaattttattttaatttttaaacatcttttgtatatttataacttttttttttgaaaagaaagcttcatttaaggttaagcaaaggcagatgccttacatgttcggcggaagaaccgcacagatctcacttagagatgactcaaatatcgaccaaccatgccaatactgaaaggagaaaaaagctcatggttcacgcaggagcatctacaaggataaaccgcccaaaaaggcctaaggccaacaccacaaaggagaaatggtgcaaaaaattgacaaaactaaacaaaataaaaatgacaaaccaaataaaaccataacataaaacagttttaaaggattttctcctcgcgtaaaggaggtcacgcgaaggcccaagacaagccgaccaaaggcacaaaaacgaagccatcttccgatgaaaaaagcctacactctgccatccactggggttttgaacggtgatggcgctaggataagggaagcacatccctttgggtaaaacctgagtccctccctctacatcaacaaaacttagaaagccaattgcgaactcttgtgcaccaaagccgtgatgcctgaatagttacccaagggacaaagagatctgagaaaaaaaaagaggaacaacgctccacaacccacactctcacttgagaaaggccacagtaactcgttgtccctaaaatcgaaaggtagattgcccaaagaaacccacctacgctgcctcccaccaatccaagaaactagatctacccatgaccactaacctcggacttgcgacacctcaacagagacatccatcaaccatggtcggtggtcccttacttgaaacctcgggcatcaaagagcc

SEQ ID NO: 44539 - DNA, 1477 bp, Cannabis sativa
  modified_base (1431)..(1447): a, c, t, g, unknown or other
tttaagcataaaatgtcaaatttccctttgagaacacccgactaccgttgtgataaccaataccctacaagtttctatcaaaaaaaatatattacactttgcttggcaagagggatggattgaagtctatcgattgagttaatcaattcttagcttttatgtgtttgatagggaggaaaggcttaaaggaagagaaagggtgtggattgcaaatccacttccacaaaaaaaaaaacaaggattatttacggtgaaagacaaaattttaaaataaatatcacaagtaccgctaattatttaaatgtggaatatagcgtcagttttttaatttttttaaaaaatgtgtacactaaagtggtcactctattaatttgttttgcttcagattttatcatattgttttgcattttttatttctctctcttcttatatatacacgattagtcttttttttcgcaaacaatatatttatctattttttttttatcttacttatatatatttgaaaaagtttacttaagtattttcaagctataacttcttcttcttttttatttttgtaataataacaatattcttcttaaaatgatgggagacttatcaaatattctttttcttcctttctttccttatttttttttttaaaaaaaaaaattccaagttcaattagtaattgtttagtttcaaaagttacaccatcacgacctactcttcaatatgattaatttaatatgtggaaaaaatattattttttttaccgtcactaaaaaagataattgaaataaagtaactttttaaattcttttggtttaattaataaaataaaatcaaaatataaatttaaacaaaataaaatataccaactaattaactctaatggttattaataaataaattttttttttatttaacatttacaagttacaaaactgtatgatacataagtttatgcagtattataaatacgttaaattcatcaaaccatttttataggttttttaaaaaaaaaattaagaaacaaaatattatgcttaacttttttttttctagagaatattatgcgtaactttttagtttctttccgatttagtaaaaaaaaaattaactttcaactcaacaaaatatattattaattagataaatactatgtttgatgtgatttgaaaaagcaaaatctaacacaattaaatataccgatcaattttatgagtttgtaaaaaatattttataagtttattactacaagtaaaagtatcttaaacaacaagagaacatataatgctacctaaaacaaataaaaagtaacaaaaatatctctcaaacaacaacaacacatattttaatattaaattgaaactataattttaaaattaactaaacaaataagtaactaagagtccgtaaatatataaaagggtaaataccattttnnnnnnnnnnnnnnnnnaaagttaccaattggaccctgtgttttgtt

SEQ ID NO: 44540 - DNA, 904 bp, Cannabis sativa
aaagatattcaaatttaagttaatgaggaaaattagtaataactaatttataactttttttttgaaaatgaacctcagttcgaaaagattaacaccagaaaagagtgggattcacaaggggaaatccctcccttttacaatttaaggaaccgctctgagaatgtcgagcattcttagcaagttcatcaacaaaagtgatagcatttcttctcacaaacactacattaataaaagaacaagagtgaaggagctataacattgaataaaactcccctgcaagttgccagtcaggtaacttcctggctcggatcgcatgaaccagaattttggagtctgaagcaatggtgaaatcgtcccaaccatcatcctgagcccatttaattccatgaattaccgcttccatctctgccgcgagtgcactggcgcaggaaccaaaagccgagaagtgaccccactccaaagagtcacggtctaataaaatagcaacacaaccaaacaaaccactagagaacgagtcatccaccactaccagcttcttagaggtgatgttaagagaaacctccacggtcccagaggtagagttgcttggagaaggtgaaggaggggcagagacaaattcttgataccggttagcaatgtcccttcgcgcctgatcaacactccaagaggcaattgcattgtggagaattctgttccttactttccaaatggtctcaaacagtacagcaaaacaactaagcatttgacttcttctttcagtatcaactccctcacagagtttgcacagcaactcagtgatgcttccaaaatgaattgtatccaaccttatagggtacgggcagttgaaccaaagagccaaagcaaaagggcaggatgcaaataaatgaagggggttctcagcaca

SEQ ID NO: 44541 - DNA, 3486 bp, Cannabis sativa
tttttttttttttgaacaaccaaaagagacagattttaactaataagagcacaaaaactctcactcgatccattttaatttctacactttcctcctcatcgtccagtccaccatatatgcttttcttcttcgtttttttttacatcccaagacaaagaaaaaaaaagatccttaataagtgggagagatctaattgacattaattaattaattaatgaaattattaattaattaagcacttctctccaacatttccttgaatctcctagctgactcttgtttctccaaaatgaacttggcatgacaattggcaataaacatatcagccaacttatcaatgtcgtcgttgggtacagctggcgcatccccacccgtctgattaaaatctgttgcgcacccaccggatgacttaccatgcaccttcctctcctcaagccattgtaagtacccagagagctgagaatcatcctcgtgaccatgatcaccactagtcccagtttgtataactgaattattccacgtggagtcatagtaaaaatgggtgctgccatgagccggcggcgccagctgtgataagccgtcgaaaactggggccggaacgggaagcacgtgggagtatttggaggagcaaaagttgtagtggagcctgaaagagccaaagaatatgctcttggtgctcttctttttcttgtttttgttcttcgttaaggggtgaataatcagctgcatcgtttgggcttcttttatggtgtggacgacaatggagatggtttttgatttggctgttgagagggtccggagtaagcgtcgcacgtggcaccagaccagtgtgttgacaagggttttgagcttcataatggatgatgagttatttgaagttggagaggaagaaggtgagattttgagtgagaagagttgtagaaggtggagaggtttgggattattattattatgggatgcttctccaaccatttattattattattattactattttcctcttattttattgagtgagagaaagagagatagatagagagagagcttctatgatgggatttgggactttattgaaacagattatttggatatataaagagatttgattacttatttaccccttgacttttgtttttttaaaggtttgccattgcttttgctttgtggggtttgtaaaattttctgttattctcttcttttcttttatttttactctctttattggatttgctatggatatagagctagaccacatgacttacctttgcgggtagaaattttgaagttttgtcacagatagtgtcatcactgattatatcttatatatgaccaacacaccaatttcccccatccaataagaactacaaaaatgagaaacggcgtatacctagctaaattttaaataatgtgatagtaattaataaggatgcttaataataatatacacaataaataaaacttaataagggaattataagagatcaagaggaatcttggagacacccttcgtaccttttctaccgagcatgctttctactcagatctcttcctcttcctcttcaaacaatggcgatcatcatcatgaccctctgcaactttttcgtcttcctaggcatcttttccacccttttcttggtggcgctacatttatagcgattgacactcaactgcctccacccaaggtggaggtgatgaggtcagctcaatctcgagcacaagggatcttagagcaagcgtagattggtattaatgaacatatcttaggtttgatctattttcagagtaaaatttaattattattttttttttgtatttaattttgagcatcctttcaaatcttaatttagggttagctttaattattgtgtctaccaacctagattatggatagatttagataatcccctgcttaaaccgaccatttatgactgttatccctaccgtctatggtactcgagtatacctatgatgaatagtttgtacccctttgattgatattttgctcgtgtctggctatttaagtccaaagtactagaatttttttcttaccttatttgctcacaaacacttaccttgcctcttagctcttattttatcagaaatagtagacttagcctgttctttttctacagctttgcatctcactgacacagaaaacactgtgcactcactcgttgatcatgttgatacttattaaggacttctactagctccacctctcttccatcttatagtaactttatacaccaccaaaacattcaaccataactccttgaaaaatttcctagagaagtgtaggaagggaagggaagattctctgtcagtgttaaagaaaggtcccctaactccaatttgtacctggctactttccactgtgaaggcgacaagcgaagggccatcattaatcaaccttggatctttgataaaagtcctgtccttctcaaatccctgatcctgactctgcccttgtcttggaatcaatgcgtaagatcccattctgggtccaaatccacaacatacctttcccacgtcgattcatttccttagccaagtttgttggccaaattgttgggatccttctggaaatccaaccaaccctcccttcttaaaactaggggctcttacataagagttcgcgtattatgtttgacgttaccaagaccctcccaagaggtgtcctaatcctctttttgggaatggcatcacctacctggcttgagctgaagtatgaagacctccttggtcactattacttctgcgactgcttggccgtacatgtaatggctgcgctaataatacgtgggcttctaatgagtccccacactctccaccgctcccatatgaaaatgttttgcatctcttctctttgttatggagtctagattatgtaagggttttgttgatagtcataggttaaagctgagttttgtccatagttttgaggtccctcgagtaggtttaggggggcctcttgtgtttttggactttagacttggatgtatttattactaattactctattaatcatgttcattgttatgtctctggtgtcaatttttctggttttaattttacttatttttatggggctctttgtcccactaatcgttttcatactttgcaacttcttaatagaatatgtcaatcagcttgtatttctttgtcgtagctacttatggttgattttaatagttttttgacttgggatgataaaagcaatggaaatactagaaatggaccctctgaatgctttagggattctattgacaaattccatgatgaagctcttgattttcaagggcctaggatgacttggaacaataatcatgctagtcacaggaatgtgcaggaaagattagatgggttttagctaacaaacattaattggttggatacttatctcattgcttccctcagtcatctcaatttctttggctttgactatagagccatcaacatgaagcttgataattctcccccaaatct

SEQ ID NO: 44542 - DNA, 813 bp, Cannabis sativa
aagatttgtactccgaattcgatttaatcggacactcatcgatcaattggataaattttgtgtttgggcattggacctctttcttcttacaagatagtatatcatgtggaaaacatattgaggccatcattgttatttcaatacaacatcaaacataacccagaagaaatgatcgtctcgtgtcttgttcaaaagaagaaagatagaaattcaaaatcataattattagattggcttctatcgatttacctcgagattgttggaatccacctcctctccctttctctatgtcgttttctttagatgaagaacaaccccatttcagaaatcgatttcgatggtgctgttttgatagttacagttgaatacttatttttcgcctcgatatgtaacaggtttcaaaaacagatttttcttttggtgctgttttgataggttctattgaatacttttttttcgccttttttccagaaacagatttttttttgtggagttttgatagttcatattgaaaacctattttgttggtttaaaaacatattttttttcttaataaaagttaacgattctgttaagttcacgttagttttttaatacaaaaaacaagaatcatttaaaaaaaaaaaattggaatcgttaaaccaagaattgccgttaaaccaagaattgtcgttaaataggcacttttaatatataaagataagtatcaagttcgtctctaatagattttttttgcaacaaagttattaataatttttcctattttaaaattctatattaatttgatttttatttagtttttaattacaaagt

SEQ ID NO: 44543 - DNA, 1717 bp, Cannabis sativa
attcgaatatttagtgatattacagttttcttaggtggtatttttttgtttaacttttaggtggtgttttgggtcacatgatcaatgtattagaatagatttgttattctttaagagatccaatcaagtacggtttgtttgttataacttcaaagatcattccaaatgaattacaatttatctaaactaagaatttacttgtttgccataaaagacttaaaagctaatttcatactaacaaaagttcactttgccctatcaaaccttccctaacaaataatattattgaagagtaaagagtaaaaagtaatttggtcaaaataataaaagttttattctattacatacaataccaaatgtctgtgatgctaaattgcaagctagtgaactcctttaaagctattttgcttttaatcaaattctttatcatcacaattttttttcaataccagttagaggtttgtagagcatcaatcttgagttttaatgtacacagaatgcaaccaacgaacttaaagattatcttttctaatggtttgtagagaacccacattccatcgctcaatgtctctaaagccaagtccaccttcatttttaggttggcaaatatatttccaagcgagatgtcttggccctaaaaaattagcatcaccttccccaagaaaagacctgcaaatactattaatttttccaagaatatgtttagacaaaattataatttgtgcccaatatatgtgaatagccattaaaacatatatatatagtttatcaagatccatctcgcataagaaatatgctttgaactccaatttctgattcgagctaccattttttcaattattaaatcttactctgctttagaaatttgagatgcaaaaattggtacacctaatacactgataagaatgaaaccaaagctatcaattatgaattgcacatcaaaattagacatacgggagcaataaatggttgttttacttctattagcttgcaagcctgaagtatctgagaggcgcttaaagactcttagcaacaacataaccgactaaatgtccacctttgagaagagaagaacatcagtaaaagaaaggtgattaagttggtagacttacatctcaagtggtagccaaagcctttcctattagtcatttttgagattaaacgagataaatactcctttccaataacgataaagaggggggacaaaggatttctttgtctaagttctctcttagcaacaaaaagactaaagaataccattaaaaaatagagagaaccgaggtgtgatcagacactccatcacaaggtgaattaacgaatccaaaaacttaagagccaccatcatttcttttatgaactcccaatctaccgtattataagctttttaagattcattttaatcatgcaaaaagaagaatttaccgtaatgtttaaccaaatcttgacaaatgagtatgttatggccaatgcattgaccatgaaaaaaacccccttaatttttgcaataagacttggaagaatggagcttataaccagccacaaagaattttagtgatagttttacagaccacattaaaataaggaatgggcttaaaatcactaatattataagaccatctccaatgcaaaatgtaaatattgtgctaaatttggcacaaaaaatggacaaactttatatttagcacaatatttattatgttgctccaatgcacaataa

SEQ ID NO: 44544 - DNA, 2966 bp, Cannabis sativa
ctatggaaatggctggagtggttacatatactggggctaaaattattcagaatgctcgcatactggttgagaagattggaaagccacttgagttagatacagatggtatctggtgtgcacttcctggatcttttccagagaactttactttcaaaacaaagtatgtataactcttagtattgtatcagtagtacaaggggcatgagtttgtgaaccttttttggcgcattacctacattttctttaagtccatgatatactgatattgtttatctaaagatactaactactctatgggaaacaaatgtttcagggacttgaagaagaagctgactatctcgtatccatgtgttatgttgaatgttgatgtggcagaaaacaatacaaatgatcagtaccaggtcacctttaaacgtttttttggtagtatcatgcctagtgcggttttttcaaatgtttattaatttattcatttaggaaaaaagaaacagaaagcgaatttgcaaaggagcaatttaagcttgattgtttgacaaaaacctactaacacttttctcttaacagaccttgacagatcccttggccaaatcttatacaactcatagtgaatgctcaattgaatttgaagtggatgggccatacaaggtgacatggagtgtgatatcaattatagttcaacatttccatattttgttactaatatattggtttcatgcaggcaatgattattccagcttcaaaagaagagggaattttcattaagaagcgatatgcagttttcaatgatgatgggacccttgctgaacttaaaggttttgaaattaagcgtagaggagagctgaagctcatcaaagttttccaggtatccctaccatatcctatgttttgtgtttgtacccaagtattaaatgaatttatcttcttccctatatattagtgtttctttccaggggcttgctgggttaaattatattattttcctgtactaaaaacctcacatgattctgttttttctttcgttgcgatgtctaatggttggatagcttcttttcttgcttatgattgtcatgtttgcaaagacgatctatatttatggttattagcagttgggattatatagttttccttctatcactaaattatgttcaaaatatccaatagagttattctatttataaaaaaatcatatgctttagaatcatcatgggcaagctgttttaggttctattcatgtgcttcatgtttgcttacttataaatataaaatttatcttttgcgttaattttaattttctattttcaggctgagctttttgacaagtttctccatggttcaacgttagtggaatgctattcagctgttgcttctgtggccaaccgttggcttgatctactcgatgtaggtcttccaatagactttgcttcttatgcttatgctattctgctgtcttctgtgatctttgcagataactttttctttgtttctctttccacagaatcaaggaaaggatattgcagacagcgagttgctcgattatatatctgaatcaagtaccatgagcaagtctctagcagactatggtgggcagaagtcatgtgcagtgaccactgcaaaacgtcttgctgattttcttggtgatacaatggtcaaagataaagggcttcgttgtcagtatattgttgcatgtgaacctaaggtgaattcttcttttcagccaacacttactttatcaatctttcaattgttattgccaagttttaatgcttttcattttatcttttatgctttacatgcatttttacaaccctcgcctcttattattgcatgattccttaaccaaaatttttgtgtgatatttttaatttgagtagggaacacccgtgagcgaacgtgctgttcctgttgcaatttttgaaacagatgccggtaaagtttctggtatccttctgatttatttgtttgtgcttctacttccactaaattcagcatgtttgaaatttcagaaataatgaaattttatgtgcggaagtggtgcaagatatcggatgttgacattcgatccatcattgactggtcatactacaagcagcggcttagttcatcgattcagaaaattgtcactattccagctgcaatgcaaaaggtttcactgcttctagatgtctatttactggaagaaatcaatattttctttgtttttatctctatcctttttcttccccagtttttctattatgtttaatattccggcaaacaattacttcttcaggttgcaaatcctgtccctagagtgattcatcctgattggttgcataagaaggttcgcgagaaggatgataaatttcgacagcaaaagctagctgatgtctttagttcatttaataagggtgaactgttaaaaaggaaggatgaggctgtaggagttagtagtgtaattgaggaagaggttgttggagatcttgaagacttccaaataaataagagttctgtaaagggacccagaccagtagttcgaagttatgaagttaataataagagcaattcagatgagaatgtagcacaagaatgtccgcatcaagctgatgataatgaaaaagagcagcaaatacaagattcctccacttctgagattattgacaaaaatgtcgactaccaaggatggcttgaaatgaagaagagaaaatggaaagatactctcaacaagaggaagaagcaaaggtacctgttcaaaactttaaataaaatgctaaatgaaacaagaatagagtagaagaattgattttaatagaagaataggtagaaaataacaataaaagatgaaggattaaagaaagaaagagaacgtagagaagaaatctcaaagattttataactcaataaacaatccaacacatactaaaaatagctaagcctatttatagttaggcaaataacagattctaaatgcaacatgaaatgaattctag

SEQ ID NO: 44545 - DNA, 1770 bp, Cannabis sativa
gcttgcattccctcaaaaaaaaaacatttgaaaaatttccaaattagttcactatgaaattgtacaaagaaaaatcgtacaaggctatacacaaccaataatttaagcatattttaataccacgtttacagagtctatcaatattccaataataacagatggtttctttaaactgattaaccttttgcactgcagatatatactagttgcttcttacacaaatgttctagtctaggttgttcaagaattccttctaaaaagcaaaataaaattatgttacggccattagaacaaacaatggtttaagttccgaaagaaagaacaaacacaattttaagtctcaaagcaagagtagagctgtgataaataatgacaaatttcttgcaccaataaaaaaaaggtcattatattagagtcctcatactatcccttccttctctaaaccacaaaagctgtaaaatcagtttgatgcttgaatgcttccttacaatttcaatttttcagagaacaaaaaatctatcacatagagtaattgaatagtaaggtaagggaacaaaacagtaattcagatgatttaaccttaagtactaacaacaataatggaaaatacttatcctaaaatctagtgattgttaacagaccaccatttcataaaaccacagaaccttcatacctcatcaatgtcaatcttatatgttgttacatgaggatactgctcgcttaactgtccaatgattggagatatcaacctacctagacaagaaaaagtataagtgaacaagacttcaatcaacatttcatagagaacatattagaaacaaatcaagataaactctaaacttaacattctacatggaagtgcatgattaacaacttacaaggcccacaccacactgcagtgaaatagaaaattgctggcacagactcatctgttatgataacaagtttagagacagagtgaatttaatgatttaaagctgataagattacatgtataaagcagtaccttgaacttttttaaatgcacttttaaatccctcctcggtattaatcataacaatgtttgaagaacctggatcaaactcaaagacattgtacatcatattttcctgataaaattgattttgacactttatttagttgagactttgtcgcttgcaaaaacaattatagatagaaaattataaactatgacctgaaacatatattctcctatatttgtatatgccataatgcaaaataatggtgagagaatttaatattaaaatgtcagtgcatattcaattaaaaaaaataatgacataaaacactattttttgtaaaaaatttatttttacgttcaaatattttttttttttttacactttcaaggtgttctataaaaacaacatgaaaaaaacaaaataattatataaaagtaataaaaaaataacatccaaacaatatcaaaacaacaacaaaaaataacatacaaataacaacaaattaacaataatacaacataaaaatctataaaaaaaagtattttttgtaaataaaaacataaaaatatttaaaaaattttacaaccgtatttctgtaatttttttattgttttcgtgtattttttaaataatcccttaaaaaatcctagtcaaataaaaggtttaaatccatttgtgtgtgtatttaaatccaaaagctcttactttttaaaccatttcggaattaaaatggtaggaagaagtaccacaggggacttccagtgctttgccctctattttacaaggc

SEQ ID NO: 44546 - DNA, 633 bp, Cannabis sativa
atatgctaaatattgtactaaatatatcgcgtgtattaacttcttttgtaagaatatttcaatatactcacatattttattagaaaaacgaatcaaattaaccagccaaaattagtgttttaattaacataaagtttttaaaatattattcagtccttataatcttgtgtttatgagaaaaaaaattttgaaaaaaaaaattgaaaggttttaaaaaatatataccgtcattggtgtaatgaattcaaaaactcactgtaattcttatcttcttaaatatatgtattagagctatatatttattgatttaggctacaggcggtttaattttctaaaaagattaaagccatgtaaccgaagctataggggttccatatgcattcggttcgcaagacccctttcgtttcgcttgaaatgatttcgattgcgaattttatcaaaatcaaagctaaacgcctaaaaaaacccgaagctatatgacagttttgtggtaataaataacaaacaaaaatagctagttttctacaaaatattattattctatatgaatagtaagatattgatcaaagttacactagctacttagctagttcaaatttgaacacaacgtcaaccttgcaatagtatatatat

SEQ ID NO: 44547 - DNA, 2269 bp, Cannabis sativa
atcagcgtggaccaatttatcaaaattataacctctatgttcactccatttgtacattgtttggtatcctacaaagtacaaaacccatcaaataattgatataattatacatatacgacgatgaggatgatgttgtagtggtacccacaatgaagttaacatatacataacatgtatatttttatataatatatatatatttaagtaagtgggatgtactaagtgtctaaaactacacgtattatatattataatttataagtttagagatacactaaataagagtcaatactaagaactatttattattaattccttacaaaaagaatttttgtcttaatcaaagtgatgaattagttatccattttcaaactcgaatatgacttaattggcaaaagacagaatggaaaataatgccaatatggtttaagatacgtggagacttgtatctttttcatggatatgtaacaaaaaacaatatcaattcattttatatatttcttaaagatcctatttgtatgtgaggccatcaataatagcaccccctaaattgtataaccacaagcccaaaattattaaatagtataattacatatttaaccatatgtgaaatgagagttcctttaagagaataaataaaaaaccaacaaacatttctagaaccaaagaccaacgtttgaaatttgaatatgaggttgttcatgttaataaaatgataccaaactaatgtggaaaggcttaagacaagaagcactatacataacacaaaattagtcaaattagtattgaagacacaaggcaacccacaaaacttggcccaaaaaacagcataatgcaccatatgatcccaccttgcactatatccttaaactttagtctcaagcctatatatcaaaatcttcttgatgttaaggaaagcaacttttaaagtagtgactaatggaagagatattagtatttgagaagattcttagagtatctcatggaaaagatttccttccaaaatcgaatggattgctaacgtctaagtttagtaaagtagctgattttctaacaaataatggtaactagaacactcaaaaattgaactgcatgtttgacaaaaaaattattgctgctatcttaaaagggggcagactttcaggccagagggaaaaacattgggtctagaccaaggaaagtaatggtcgattctctagtaaatcgacttatttaatccaagctctgcaacaggctccctattgtgaggttgccccatctatctggaataggctctagaatatcaaaatcattgaacaccataagattttttagtggagtattatttctagtactttcccaatttaatctgttatgaacaagagattccacattgatgatataagttttcctattgtggggtagagaaatctatggagcacctgttcctcacttgtaattttggcttttcacttgtggcgttccttctcgtggtgtattttttctgtctctgaaccaagtactctaatgtgagactagattaaattcatttggagcttaagaaaaaaaagcttcaatattgatgaggtctttcttcatacatttattgttatcaacactatatggcgagctcaaaatgatggtacacaataacaatctggataatgtgaaacattacattaactctattgcttactcttatacagattacagagcttcttttattcctactcctctaaatcctattagatgagtgacgtcctcctccccaaaattggcttaaattgaacagtaatgttaaagtgaggatggagaacatgtgtattgtggttgttgctagagactaccatagtgtagtggcttgggtgactactccaaggttagattttttttatgctatttgtggcgaggatactgcttattgtttggctttggaaacgacaaaggataagggttgcaagtttgtaattgtggaaagcgactaaagagtaatgatcaacactcaatggagaggactctagatgaaaaattgtgaactattctagcttttgtaaaagaattgcttcatcttttgttggttgtttatttcctagttctgtaacgacttataactttatgatctataatatggctaagtaaacttttacccataatcgggtatggttgtttaaatgtttcttccatacttataaatctcttttgtaatgatcgtgaggtctagtttcatctttctatgaacattttatttcaaaaaaaaaaaaaaatcttcttgatgtttagaaccaatgaa

SEQ ID NO: 44548 - DNA, 917 bp, Cannabis sativa
acatacttgtgagtagatctaggatcctggtaaaataatttccaacaagatgtccctcccttttcggccgcatctgctttcggatcttgttagtctaattgcactgcaaacatggagttgtgagttcaaaaaagaccagatccaggaagaagaagaccagatccagtacgaagaagaccagatccatgacggagaagaccagatccaggacggagaagaccagatccgggataaagaagactagatccatgaaggtgtttgcttgtcgtaaccagatccaggacagagaagaccagatccatgacggagaagatcagatcaaggatggagaagaccagatccatgaaggtatttgcttgccataagtagcgccggcatcatagccattgacgctggcaaagcatctgctgaggatgtaaccgagatcgcagtttgctctgttatttgaaattctgatatcagagggatagtgtttagttgattttaatttgattattttgttccctgccgtttattgatttttttccccttattactttgtttatgtggttaatttatgcattttttatattttaagctgttcataatatgaggaccaagaaatctagtattggaaaatgaagaaggtggtgacaatctagtaatgggtaaagaagaatgatatgtcagatccttttagattgaacggaaaacccgattatgtggtgagttttgttcttgaattaaatcttccattcttttagatattcatgtgagatatgatttttagaaatattttttgaatccaaaactttaaacctctaaagttttttggaccgtgagaccccattttcccataggcggtggatatctataacgtagtatcaattttcctctagtttttcttattttttatttttgtgtcacagattgtatat

SEQ ID NO: 44549 - DNA, 2939 bp, Cannabis sativa
gttaattattttttcattaaaaaaaaaataaaaattataagattacttttgattcctaacattttattcggtaaaaatatcttatccttcccttcccatgtatcaaacttataaagtataacaaattattataaaggcttttagcaaaattaaagtagatcattattttaagtgtaactcataagtaaaatatttccagtttcttaataagctattttagaagtctatcaaaatttatttataaattaagtatacaattggaatacaatcttgtaacctctcaatataaaataattaaatactttatagtaatttatagttgtttgatatattgaatttttgtttaaagattttaaaaaatgattaatggttaactaaataaaaaagaaactattatattacttttgattttggtcatcttcaataatagctaaaaaaatatatactttttgcatattataataatcaccttaaaaagtagattgaaatagtataatttttgagactaaacgattataattgtagtatgaaaaatattttaaactcatcaaaaatataaaaatgaaagagaaatatttttttaatacactgatacttcaaacatttaaatagacaacgacaaatctataaattatttagtattaaggtcacttggcgtaatttactctaaacaaaatgcgtctaatgtaaatgttgattatacacatagctatttgaagcattattgtgaataggcttttatctaaatcaagaagcaacgatatagactcgaactaagcctacaaattggaatccaaacctatgcaaagtgattgttagttcaagaaactcttttactaaatctaataaactcaatgatgacgatttggtcctattttgttacatctgcatcacaatgtctaaagctctgttttggtacaaaactcaagatcatcatcaccacctacagcctacagtgctagcgaccttgagaaaaagttcgctatttgaagatgcttagtaacaccatgttggacttggttcactctatgcccctggatgttgcaaataatatcacttttaattttttttacgtagtgattagaattactcgtgaatttaagatttattgtctaattgaagggtatcccttcccgaactatgagctgctaaagtaagcgagtcacatgggacaaaattgccccaaaaaatttaggtaataaatctataatgtaatcaaacaatgcatcagaagagctagagtttcagcttgtaatccttaaatattacttgagacttctcaaaaacaaaacaccaaaaaaaaaaaaaaattgcattagaatggttatctacgaacaaaataatacatcaataaaatactaagttctaaatctctatcacttgattcaatcaaataaaaccaaacctaatgaaacaaaattacacaaaattaaaaactacctagccaaaggtgttttgctttggctacttgagaaccatcaattgacaaaactgtctgaaaaatttagacaatatagttataagaacagtagctagcaacgctacacaactatcatgacaattccataaaatatctacaaagcagaataaaaataaaagatgacttagcatcataataatgatattaataaataaaccgaagaagaaaattctcaaaaatttatataaaaacatctctccaacacatttgattaaaaataaactaataggcaaagtctccgtaatcataaactttcccaaaaaaaccccaaaataaaataaaaaactctattcccacaatttaataataaaagtagataatgtcaaaaaattatactaaaaataatccaaattataatatataaaaataagaaataaataaaaaattaaattcttatatgttaataacagaagaaatgttgaggtagaagccatgagcacaagatgagccagtagcaataaaatagtctacaaaatggcctcgctctagttacgacaatgacagaaatccccactgtagcttcaaagacatgttgtgaggaccaattctcttggccatggcggttggggtcatcccccaaatttaaatagaccatacagaaagactagtctaaacaattaggaccaaagccatagttattagtatacaaaagccttgaaaggcatcaaaagtatctaacctttaataattattcataaattctcatgatgcaaaaatgcttccaagtctatactatcaaattgaaaactacaccttaaaaattacaattaataaataaatcaacttaacaatcttcaaaagctaataaaaaaaccattcatattataaaagaaaataatgtgttgaccttgtttttagttaatgatgtagaattaataaaatgataatataagtatttgaataataaaaataataaagaactgtgagtatttaaaaatataatattgtaatgatgtaaataaattatagaaaagctgatatatgatatattatagatatttgatgtaaaatagagaaagtaaaattttaataatatattttaaaagatagtaaagataaaatgggagtggatttagctacaagtagagaaatattattcattgagttataaattttatattaattttttaaaacctctatttttacatgtaaaacacttttaatatatgttgttattagtattattttatttatttacattttttaaaatgaataaaatatattataataaataacttttaaatggtatagaaaagatacatagaagatttgatgtaatgtaaagatatgaagtaaaataaaaaaagtaaggttttagtgaagtattttgaatgatagagtagtaaggctaatgtagctgctctatctattggaacattttagaataaaaataccaaaaataatgtagaagagaaataaaataaaaggtaaatagcggcatatgtacctaaagttttga

SEQ ID NO: 44550 - DNA, 6756 bp, Cannabis sativa
aattaatagttatgataatcataataattttatactgttgctataaattatattaataatagggccgaacccgcgcgaagcgcggcttagtcccctagttaagtataattgaaatgataattaagaaaatttagcaaacaaaaaaaactcataaatatatgttaacatataactgaggtaacttaaaagctcgtacatataattaattattaattagtgaagcaaagaccaatctcttctagggtttaagctacaactagccaaatgtccaaagccaaaagagttaaaattgtagctataatgtggtaaattagggacagttgttaaaaataaaggatgattgtaccaaattttaaaacaaaattaattaaatccctacaatatatagcttttcccaaaactaaaataattatataatttgtggaaaaaaaataagtagtaactatctaattgaagttggttgtataatatagagaatgaggtgttatgttattagtataattaagtattgaattttacacattttaatttaataattattataaaaaaaatactaattatttataaggcgtcacatcatcattagcgaaaccagtcacaaatgttagggggcaaaacattttttttttcaaaaataggcattaataaaaagatatatatatatattgaagaagaaaatataaactttatagcacaaaaataaatttttttgagaataaatataaaaatatgtgaacattaaaatgagaaatataaatttataagggtaaaaatgaaaatatggctcgcgataattaatcaaaataaaagaccgtagggttagtgctcgactggaatcataaatgctttgatgatcttttatatgtagaactattgtgagtagtttaaacttcgacctcgcaggtgaaaataacaaaactaaaaaaaaaaatcggggaattacattatatattatttttaacttttttttaaaaaaaaaaaattacgatttggttgctccgttagtttctatgtaggttgctatgtgaattttagttgtgatttaagttgctctgttagttgctatgtgaatttctatgtaaatttccgtaaaaatacaaaaaaaaaatattttaaagtgtaaaaataaaaaaaaaataaaaaaataaaaaaaaatccttagatttatgggggtcgggtaacaaccgtggtgtttaacaccacctaaaatattatattgatattgatgcaattaaatatcggtctcatatttatagagcattgctattgggcactagtactgtctagcacttctagacatgttgttttgcgattggctagcgatactctctaaaagctattatattaaactacatgtgacctgatacttaattatattaataatgatagtaatatatacgaaagtgctaggtactactagtgccttttagcatttctcatatttatatatgtaaatataacacttaaaagtagggttgagcaaaaaatctaaaaaaaccaaaaaaattgagtacatcgaaaaaaactaacaccgaaaaattgaaaaccgaaaaaattacctctggttaaaactgtctttgcacggttggttttaatgtcaataacaaaccgaccgaacatatatagaatacactatacatatataatataattatttttgtacgtatttaatatacaattttattagaatagttttactttttatcttttacattcaaagtctcacttctctattattttattttattataatttgatgtacttatataatatgtattatacacacacattcataaagtaatatgagttttttaatataactcattactatactagcagcacaaataatttgaataaatttaaaaaaaaaaaattattttacattatttatttaactaagaaaatttttgtttttaaattatatgatatttgatataatactctaatttttttagtttccaaataattatagtaaatttaaatatttgttttttttaagagaaaaaaaagacgaagctcgatttggttgatttaaaccgaccaaaccatggattaaaataatcaaatttttttatatttatataatggttagttaatttttgaattataactataacaattaaaagttaaattctaatttttctagtgtaaaaaagcgaccaaactaaccattacttacccctagtttgaagtgacatttatgaaagattaaaagtttgatgagtggattcttcggaccacaaataatagcttccctaagctaagagaggacaactatacacgtggtctgagtgtggaccaaagccaagaatctatgctagtggaccatttacttactctaaataaatcatattttattttgttttttataacatttatgaaaagtaaaaccattttttatttattaattcttggtaatataacccatatcctaaaaattcacgttgaaatttgaaactcttttagttaatactaaaaattctgcaccaaataatgtgcctcaatcttagtttacttttaaaataaataataaatatagaattgttttttgattttctaggttccctcctccatgccaataggactattttaattgtatgatgagtcttccaacatagtaagcttttttttttcttgaaataaacacaaagttttgggagaggcaaaaagaaaatagttaaaaaatattatttgtgtctagtacctttttcaatgttatactgttattaatataattaagtatcatattttataagaaaatagctttaaaaaaatattactaaccaattgtgaaacgatacttacagaatataataagtactactgatatctaataacaatgctcaagaaaaaaatgattatatttaataaaaaaaataatattactataaaatattttatcgttagtatgattaaatatcaaatctaagaatcaataattcatatggagttttagacataagtagtttctataataatattttgaaaaacattttctttaaatgtcatgtgtatatctataattttattagtgttattaattagattaataattcgtttgtcaactttattgattttgtaggtattcttttttatttttggtgaatgtgaataagtttagtgaaattattgatgtttatagctatatttatattctaaatttccaaaaaaataaataaataaatattgagttattcataaaacaccaacaattaacaactatgaagataacaaatacaagactttttttacatgtatatatatttttacattatagttcaaaaaaaaaaaaagcaaatgtaccaaacattcaaatagatcttacatacaaactacacacaacatatttaggcaacttgttttcttgctaaccaagaaatcatttcattattaatgataaaagcttttataacatatctatgttcttgcaagttttgaaagattataaatgtttatggtactttgtgttttcataattcatttacaactctcaaattgatttgagacctcttgttgtaaagctaagaatggtaatttttcttcactatataatgtagaatcaccaaaagacaccatcaacaatacaacttctttttgtatcaaattttgatcttaagacatccataaaattgaaagttgccaatgatttaaggaaactagctagtatttcgtctcaggaagagaaaccgagttgcctatttacttgtctccaatagccaaccgatgaaaagaagattggacggcgtttctagctgcctcttgctctgatgcagtggcaaggccgagcagcattcgaagaatctcggttgtgtcttccaagtagtatttagccttgctcggtttttggccaacagtgcaagcaaacacctcggctactggggagagagagtccttcgcgctcattatcacctcgaacatgtcctcatctgacctatcatccccaatgcagagtacaaaatctggaagaatcgatttctgtttcattgttgaaaggagacgctctgctatgagacccttgttgacaccctaaaccaaaacaagaaaaaacaggttaattcgaagaaatttgtgtgtaaattttgtcaattctaagtcttaataataaccctgtgatcaagttttggtaattggattaaagctatcaaaataagacattaacctgaggtttaacttccacaatgtgtggaccacttttcacagaaactggctcattggcaagaacactttctaagtgatcaagaagctccttggcttggcatgacccgaaatcaggatcggcatgctggtaattccacaccagagcactctctttcgcctctatgctagaaccatcagttgtttcggcgtaaagctgcatcactggctcagcaatttgcttccaatcaaagtctggaattgacacacaagtatcccaatcatcatcatcatttgtcctgcaaaaatggaaaaagccttaacctttataatcacatcaataacaaaatgagttctttaactaaacatcaaaagcatccacaaagatttattaaaagggtgtaatgtaaaggtttgtacctcagaaaataaccatgttcagctgcaagaccaagcttttcacatgaagaaaaccattcaactaatgtgttcctgtctttcccactaacaagaaaaacaatatttttggggtctttgcacaaactgtccaatatttcaacagcttcactgttaggagttgcactaatcgaactcgacatcatcaaagcaccatcataatccaacaagattgctcggttcttagttctcttataagccgaaacaatatgctcaacaccaagctttctgaaatttggatccaaggcaatcaccctgaaccccaaaccgaaaccaatgccccaacaccttctcctcacatgatctctacaagtgcgttcgagatcttgtaaaaagcttttcgcccaataagcaacatcatgtgtgatcacatacttataatgcttctcatgcctcatctgtttctcagaatcagaatagatcaatgcagattccattgcttcagccacagcatcaacattccatggattaactcgaatcgccccactaagggacggggagcaaccaatgaactcagacacaacaagcatactcttcttaggagttgtttgatcaagtcctaaggttttatcaagttttgtgttcccttgtctgcatattatgtactcataaggtataaggttcattccatccctaactgctgtaacaagacagcattcggcgatcacataataagcgattctctcgaaaaactgaagcggggaatcgatcaaaacaacgggatcataacccggttttccaaatgtcttgttgatcctagacacagttgcataagtttcagattgaacctcctgcacatcttttcctcggcctctagcagggttggcgatttgaaccaaaacaacactaccccttttatcaggatgttggagaagcaattgttccatagccaaaagctttaagctaatgcccttaaagatatccatgtcatcaacaccaagcaacacagtttgaccccgaaatcgagattgcaactctgcaaccttcaattcagtctcaggaagattcaaaacaagttctagttggcgaatatgtatcccaacaggaagaatcttaatgcttacagttctaccataatactcaagaccaatataacctctcttagattgataagaaacacctaacattctactacaacaagaaagaaaatgtcttgcataatcaaaagtatgaaacccaataagatcagcattcaaaagagctctcaaaagctcttctctaacaggaagtgtcctgtaaatttcagaagaaggaaaaggactatgaaggaaaaacccaagtttaactctattaaaccttttcctcaaaaaagttgggagaaccattaaatggtaatcatgaacccaaacataatcatcatctgggctaatcacttccataactttatcagcaaaaatcttgttaacagataaataagcttgccataatgacctatcaaaccttccacccaaatcaggtgacaaaggaagcatgtaatgaaacaaaggccacaagtgttgtttacaaaaaccatgatagaatttgctgaaaagatcagttgggataaaagctggaacacacttgaatttctcaagtaaagtttgagctatgtcatcttgatcaattgggtcaatttcttctttaagacaacctatatagatcacttcaaaatcttctcctaaaccatctttaagctgtagaaggagtgagtcttcatcccaactgaaatcccattcaccattttcatttttgttcactctaagtggaagctggtttccaacaatgatcattctctcttgggcaactgatgagggagcatctgagttgacactgttgctgttgtcatcatcgtattctgataaaactccggccactgttgccactctaggcaacctccttctctctcggccaaaactcagtgagtcaccagaagcgagatctagtaagtttgagtaagaccttgaaaccattttttttgtgtgtgtaaaggtaacaactttttcaactcaaatcacttaatgcttcttgttcgattcaggttgagttctgcaatgaaatacccattaaagaaaacagaatcaaaagctataataacccatcaaaactattatctttatatataaacatgcaataatatcaaagaagagattttttttaagaacattgtgaaaatctacttttcataaa

SEQ ID NO: 44551 - DNA, 1436 bp, Cannabis sativa
aaaatatgtccatttaaatattatttattttctgggatattacaccacactatcaacctatcacaagaaaattacctcaagaaggtacttgacaagcttggcatgaaagatgtcaaacttgtaaccacccccttgctcaacatttcaaactgtctcagaatcaatcaccaaagatagatgttgagaggaaacatatggagagcataccctatgcaaatggagttggcagcctcatgtatgctatggggtgtaccgaacctaatctggcacacaacatgagtgttgtaagcagattcattagtgatcctggtgatgaacactggaagggattaaaatggatcctaagatacatcaaaggttcacttaagactggtctggtgtttggaaatgacagcaactatgatgacaatgtcactggttttgttgattcagattatgctgggaatttggacaccaaaagatctttatctcgttttgtatttactgtttttgggggttgtgttagttggaaagcaaacttacaaaaggttgttgtcttgtcctccacagaagcatagtacatggttgcaacagaagctgttaaagaagccatttggctaaagggcttgacatcaaaaattgggatcaaagctaaaaattagttcatacactgtgacaaccaaagtgcaatccatcttatgaagaaccctatgtatcatgaaaggtccgaacatattaacattaagctacacttcattttccagcaagttcgtcaaagtaaagaagatcaatactcatgagaatccagctgatatgttcaccaagtgtgttactggtgaaaagtttaggctatgcctaaaactattgaacattgaagattgttgatccttcattcttgaaggaaaaccttattgatggaacggttttgcctatattcttttgctacgagtcttaacttgcataaatttataaaccaggtggaatttgtggggtttatacactggtgcaagtgactatttttggacagttttggtagttgaattagttagttaattctgttaagtttgttgggttcttgtactctttgtatcggtctatatatacaaagatcattttggtgattcattagtgggtgaacttggtgtgagttgagagtgattattgctgtaaagagcatgagagttcataactcatgtctctcgagtgaacctggtttttgggtaggagaaagactccattcaattctgttattgtccataattgtatcctttctaagcatcatcttcaagtaataaaggcaaagcccaaggcagatcctcccaaggattcgatccaagtgttacaacttgtggttaaaccttgtcactcattgtgttcacctactctattttttttcttgctgttattggttttctagtttatatttttactgttttaattgttagaaattattttac

SEQ ID NO: 44552 - DNA, 1757 bp, Cannabis sativa
aacgtcttaaagagagcgacattgtccgcgactcagccagattattctatcggtaattcgttccaatttcactgtatttaatttcggtataacatatatggattggaatgcttcgactacaaggaaaaaactcactttacataaatataataactatcaaaaaaaacataggatttagttcacataatatatttcttattttctgagaatataaagtgaccaccaaatattccatatatgtatttatatttttttaatttatatatacatgatatttaattaattattatgagatgccaagcttatataaatatttataattgaaattaggtgtatatatataaatgcatgttgagaaattcttaataaataactttatcttttctcaaagtctctattttcaaaagttgcaaaaaataataaatgatttgataatgcacaggagatttgtcaaatatttatatacttatagagagagaactgatctgttatatatatatgtttatcaactaattttaatatccattccataatataaatttatatatatataatattagaaataatatagtatatatgttcagtcataattttttatatggggttgagtttctgagaaattagggtttgttgcattattccagttaattaattaacttttacataaatatatattaattcaatattctccttttaaattactttgtgatcaaatcataaaaagtacaaattaaagtatgttacttatatataaaaaaaatataattaaagtttgtaggaaaattaaagactgcagtcatacaactactttacagaacatacatattatatatgtatatataatttatgtacatattgatcatatatatgtacatgagcaacctaggaaaatccaaacagatcccatgattttttttaaagaaaaaaagttattactagctatataattcctaccaactccaatattaatgaccaaaaatcaacttattatttaactataaatataatctaaaattaaatgagagaaatttatatatctttataataagtaatttccggcgtaaatacttaaatttaactctcagttatagacaaatatttaattttaatttttgaagataataatacttaagttataagtctctttgaactttcgtaagtatgtacttaaatgttaagtgtcaagtcctaatccacgtgtcatttttttattagtatatatttaaattaatttttaaataaaaaataaaaatttaatgagctgaaccaattaaagactgtcacgtgatcattaacttgacaattataacaatcacgtatatctacagacattatataaatataagttaagtattattatcatcaaaatataaacttaaatatttataatatgcaaggagttaaaaaaataagaaaaggaaattcatgatagggtttaacctatggtataaatgagtagtctttggtatttttaagacattatcattatgaacccacaatgatatgatcatcagtttttacttgtatagaaagcaaaattatgaaatataatttataaattaataatatatatgtataatagctagtagatatatatagatatatttatacgtacatggtaattataattaagcccatgcacacgttataaatttattagaggaatgtcgatgaataaatatacataatttataacctacacattcttaattattcccctattaataaataataaaaaaaacctttttctttaaaaa

SEQ ID NO: 44553 - DNA, 3908 bp, Cannabis sativa
caaaaatagaatatgtcgattacaaaatgcacaacacaatttaatagattggctaggttggccgtaggaattgtgccagctgattttagcaagaaagaaaaatatatggatgggttgaatcccaagattaaacatgacttgatgatcacaatggctgatgcgactacctatgatgatatggtagggaaggcactgcgggctgagggtgcagtggagtgtactaatgagccccgagggacttctagtgttttgtggggccactgctcctcttacctttggttatggaggggtggtagtgactcaacctcagatcaaaaaagaaaggatcctttttcatctggtggctcaagccagaataagaggtttagggagaaacaaggccgaggcaactaatagggtgggtttaagaaccagtacacctatctagaatgccctaattgtaagaagcatcatttggacaagtgtagaggccaaggatgtttccaatgcagagtaaccagacattacaaaagagactacccacagctaaagaaagaagagcaaaagaccaaaacaaaacccgctccaataagggtgtgtgctcttactcagttgaatgttgaggccagtccttaagttgttccaagtcagctatcggttaacaactcttactattctattttatttgactttgtggccattcattcgtatgtggcagccagagtagttgataagtttggtagaccgtatgattggtatgaaacggggtttggaaccctattgcctggaggaaaattagttatctccaaaaggtgggttaggtctatgccgattagaattgaagatagggagttgagtgctgacctagtggaattaggtttagaagattttgatattatacttggaatggatttcttgtccaagtatgctgctagtatcgattgtaagcgaaagatagtgatcttccaacctgagggtgcggaatcgtttatttttatgggatcaattcagggattctaaatcccagttatctcagtattgaaggccaaagatctattataagaaggttacttaaggtttctggcagtggtgttggataccgcttggcctgagtttgttcggcccaaagacattatagtggttcaagaatttttgtatgtgcttcttgaagaactttcgagattaccaccgtagtgagagatagattttgtaattgacttaacacctggaacagagctagtttctaaggcaccttatagaatggctcctgcaatacttaaggaattaatgattcaacttcagggaatgcttaatttagggtttttctcgacccagtgtgtcgccttggggagctccggtgttactcgttaagaagaaggattgatcactttgcatgtgtattgactacaaagaattaaacaagttaactatcaaaaacaagtaccctctaccaatgatcgatgatttatttgatcaagttcaggggaagacagtttctctaagattgatctccgctcgggctatcatcagttgagaatctgggaagaggacattccaaagactgtctttcgtactaggtatggtcactatgaattcttagttatgtcttcgaattaactaattctctcacagcttttatagatctgatgaataaagtattcaagaatttccttgatatatgtgttatttttatcgatgacattcttgtgtactcttagtcagaagcggagcatgagcagcatctttagatggttttgcagtgactacgagaacacaacctctatgccaagtttaagaaatatgaattatggctgtctcaagtgtcattcttaggacacattgtcagtaaggatgggatcaaagttgatttagaaaagattgactctatcagagttcaaattcgaagagtgagaaaatttcctcgtcaattaatttattaaaaattatttactatagaaatgtttctcctacctacctttcctgattttaactattctgtttcttgtcttcaaacttggaaaattgaagtaacaaacacaactaataatatatgataattcaatctgtgtctgtaatttttgaagtaatttttaaatatttaaatttattacaattagttctaactagcgtaaattgattaagctctcgtattataattatatgtggcttatgaccacatcaataaattattttaaaaaatgatggaaaaattataattattttcaaaaaaaaattatcaaaaaaataattcatgaggtaaaattctacaaagtgtagagataaagatcttattattaaaaaaaagaatgggcatcaatagaaatagtaataaatttgcatatgattgtttttgacattcttttacctattttattttatatatagtttttacatatataatgtttatatctttccctctccatcatttttacatttgaaacacataaagtaatgtaaagaaattgttgaaaatggtcaattagaagtgaataaatagaaattttacccctcaaacatgacagataaaattttgttcttcaattatatttttgtataacactccttgaactttggataaaattacaatttgctccttcaattgaattcattcattttgcattcaatttcttcatgcaaaaccacaccagagctattctttaatttgagagttcaaacaaaagaataattgcctatataacattctaacaataaaacataaaatgtttatccataattctagaattaatatttaaatgttaaagttattatgcttagttccaactaatttttttttaaaaaaaaaaaagataaaaattttcattaatagtccattatatgataatatattactcaaaagcataattaataagataggcataacatatcgtatacaaaaatagcaataagaaagagattattaacaactaaaggtgggagagaatgaatcttctactattctctctgttcgtccccttttccttcttttcttgctttagttgacctcaggttgtccctcgttggttctcctttccttttgtcctttgtgttctttgttgtctgtttgtctcttgctgggaaaatttgtggagtgagtttgtgggatcctaagtcctcttcctgtcccttgtttttgtgatctctttttgtcaactgtggggtccttttgtctctgtgttgggtggttattccttgtgtttgttttttggtcttcagtgtttattgctttgtgggttggtaggttggtgtgtggtccctggaaggttgtttctgtcttggtttggggctatattaacgtccatggacgatgttggtgactctactagtggtattaatggtagatgcctctctttaaaggagatgtccattgctcttgccccaagtgtagtgactacaaaaatcctttccaaactttgcctttttggcaaaatagtttcatccagaacttttactgctaaggatgtggaacatgcttgctccatcttacgaaaaactcggtttcgtgtggagccaactgatggtgttcttgctagttccaatacttttcggttcatttttgatactggcacggtttgtagacggatcctagagcaaggtctgtgatgcgtcaaaggtgatatgttggtgctcctctcgtggtcctctgggtttggggccaaggaactgttgttcaactcgatccgttttggatccaaattcatttactgccccatgactactactcaagaactaatgccaatgtgctgagggctttggtgggtaaagtggtgacgatggagcttgaggaatctaagcttgttacttggaagaattggattcaggttctagtggaggtggacgttaacagacctctttgttgtggttgtttctttaaggtcaccaatggagataacaagtggattcaattaaaatatgagaagcttggaattttt

SEQ ID NO: 44554 - DNA, 750 bp, Cannabis sativa
ctctaatttattatgtactgaggtttcttcaatactagatgatattatctgtaatagccatggtgtataatttacttttatgtatatgaaaggtttcttttttaaaggaacaaatctaaagtatccttgatgttatatgttgtagtagtagtagtaagttggatatgaaatgatgatgattatcaaaatcaagacaagtgggaaataataagttaataaatggtgtaaaggttgaatcaaatgaaacctagattggagtagtactagtaatggtgggaatttcatgtatgtataaatgagtaagaaagattaagagaattagagacaaaagaggggatggtgaaagtgtgaggtgcagtgtgttttggggacaagaagaaaaggggtcttaatcgttggttcttggaattcaaattacccaacattatgtcatgtacaccatgtgccttagacatggtacaatttcaacatctccatatggggccacaccacaatccacatatttattaaactccatcctctctccctccatctctaattgtttcctctaattaagttacatgtttaattctacacattttgattactaacgagctatattaatatggtgttagacatagtaatgttgtttaactatctacttctctatattcacacacacatattatttattctttgtttttcttatgaataataatatgtatacacataattctaagtagaaatatttcatttttataccttaaaaca

SEQ ID NO: 44555 - DNA, 1208 bp, Cannabis sativa
ggcagagtgatgatggtgacgtgatcgattgtgttgatatatacaagcaacctgcttttgatcatcctcttctcaagaaccacaccatagaggtttttgctcactcttatcataattgtgtgtatataatttattttaaataaattatgtgagttttgttttggtatatataattacctaatttagatgattcctcatttgtacagccaagttcaattaaaataaataatcaagtaaaaggagaaaaggattatgcactgaaggagttacaaggatggcttaagtttggagaatgcccagaaggaacagtgcccatagttcgaacaccaacaacatttgctaaatatggtccaaaaacccatttaaaatctcattattacagtaaactcattcaaccttataatcagcgcaatgcttcacctagtgatgatggtcatgaggtaatatacttattcaagcatagttatgaattggcacataagttttatataatatattataattcttgtattgaactttttcttttttgtttggtggaatatatatatatatatatataaacagtatgctgaagtatcaatctttggtggtccatattttggagctaaagcaaatatcaacttatggagtccagatcctcacggaacaatgagtatttctcaaatttgggtagcatcatcatcggataattatgatgaacttaatactatagaagctggttgggtagtaagtagttcttgtacattaatgtaacattatcttaatgtacatcatatgtatatatatataagtttaaataaatttgggaattctttttgcagattggtactggtgatccaagaacacgattctttatttattggacagtaagttatatatgtagctatacatatatgatctgttacctgtatataaatttatgcagcgtgtatattatgtatattgaacaattaattaacccacttgagctagcatataaagggttgatcatttgtctttaattatcagagtgatggctatagaagcacaggttgtaaaaattttgattgtcccggttttgtacaagtaagcagaatggctgctataggttctgtattggagcctatttccaattatgacgggaagcaaatctttataaatgttacaatagaacaggtatttacatatataattatataatttctacaatactcttttttttttttttt

SEQ ID NO: 44556 - DNA, 2348 bp, Cannabis sativa
  modified_base (168)..(171): a, c, t, g, unknown or other
tataaaagtgtcccacattataaattttgacattgttgttggtgtatttaattatcgttcatcatatattttaatttaataacataataaaaaaattatattagtgtacgtagtattgagcatctaatatgattattataaaactgtaaaacaacaaaacagaacaannnnaacaacaatggaacaactaaaaaataaccgtagaacaaccatgaaaactaaatacagtacacattatttttgaaaaaaattctatcctacagttaaaattaaaaaagttaaaaatgtcagtatgtaatgaaaaatcccatttttttaatccttttctataattaactattattagtttttgggtttgagttggataaatggtcctaactagtataccaacatatttgacacaaaattattacttttctacctctattatattttttatgaagtctaccattattattttctgttgagaatctaatactaagactagtactcacatcaatttcttcaacataattttatatgtaaaaattcagctaaaaattgtcaaatggcttatacatcaaatgagctactctaaaattattttaaataatttctttaaatgtagctacaactattcattgagctatatttattttattattatttctctctcactcctctctcataccatctctttatttattttattgatttttctctataattttatataaatgtatattaaaaataataatatttaaatgatatggagataaaaatagagattctgatatatgatgtaatgtaaaaatttgaggtaaaataaaaaaaattaaattttaataatgtattataaaggatagaatagagaaactattgagagtcttctaaataattaaaccatttcatttatgatataattatattatttatgatatttatatgctttgatgcattaatacactttattattttttaattctgtacatggaacaaataatgttcttactgatattttaagtataaccatgccattgttgactaatagaaattatcataaattgtatgctaaaaacaaaaataatttaagataaacaaactacttgattgatttataaatattattaatacaattttgaagtaatcacacaaatataaaaataataccattaatatgaaactatagtcactgattatgtctattacatgtattaatttcctttaagctacttcaaatcgacacaaaggacaaaatttacttgtttgtagccatttgactatacattcttcatgatacttgtgtttgcaaggtaatttggtagcttcataaccagctaaaatattctcgaaacataccgagcatgaaactacttcaccatccttaatacgatctttctccaatctctcaatcgattgcttacttgctgccacgaaattgataggaatactttccatatcatccatgtcatcaatgtatacatcgtcatattcttcttcataatcatcttcatcgtcactactatgctgttgaacaggtaattcatcgacaaaaacattaatatccactgccacactcaaaacaagatgttcgtcactccacattttttgaccataactaataatttcatcacttaaaaaaaacgcagaagaaggaaggttaactttcgcaagcgagtcttctaaaatttctttagcaccggtgttgttatttatcaacatgtcgtatgaaagcaccgtggtatatgtacaagtagtagaagtttcttcattttcaccttgcatagtatacaacgaagaccacagagtaaaatttgcaaataagtgaattacaaatatagggttgataccttgaattctaataggattgtatgggagtatagtgtaacaaggattgctaataatttgagaagaagccatagtgaattgaaaaagagattaagaaagaaaagaataaaaattatgaacgattagaaactaagaaggatgaaattgattttcaaataggaaactaaggaattaatagtttagattttaattttgattaggaaggaattaattagggttggtttatttatagtttatgaaagtttaaatttttgtataagggtcacgagaagtaaataccaaatgttgaagaaggattgtatatatatactaattccattagtcctaattgtattagtattatgaaataaaaaaaaaaaagaataaaaagatttatttttaaaaactccataacaatataacagtgcaaccaattaattatgtttaagaaaacaaattttcaaatattaaatacagattttttaagttatttatcgaacaaataaatatcatttaaagaaactttttcagaaaaaaaaaaa

SEQ ID NO: 44557 - DNA, 924 bp, Cannabis sativa
caagggcgcctataaaaacaaatcaatatcagtccctacacgtaagattttcaaccttgtataccgggttcgtttggaaattagtattaagttgtattatattttattaaattaaatttgattatatattatattttttatataatatatattatgttaaattttaatttataataaaatattatatatttaaatttttataaaaattaataccgtatatacgcgttctaaacgaacttgtataaacatgtacaaggttaaaaatctatacacaactctcttaaaaaaaataataataataaataaaaaatatatatatctatacacaacttgtacaacaagtacacagtagtcaaaattaataaagtatctaagatccgtttccaaattttcttgggaaaaaaatccatatgcggttgatccttgtgataaaatttattaaatgtatgtttttaaaaatatttatcatatctctcttataacgatttcattactattatctttcttaattcttcgcctcctcttaaaacctatacacgaaaaacatagagctttgctaaacaaaccgaacaaaaagtgttcacctgtattattaatattagttaataatattatagaatattaaattattcgaataataatatagccaaatttctctccttccatttttgaaagaatacaaacaacaatgagacgacaaagtatgtatgatgaagtcaaaatagggcttcctctatgtttattttcctagtcatacgaaaaggattggacaaatcatacaaagacaatgcatgttctttttggggtttattttaactaaaactttcatttaatatatttattattatttggaagactgacttgtacaagtattgtactaagtcatagtaaggccccaccacagttaattaatattacaacctt

SEQ ID NO: 44558 - DNA, 1647 bp, Cannabis sativa
  modified_base (1098)..(1100): a, c, t, g, unknown or other
tagttttatattcagtgtgaaattcggagaaataagagtatttttcgccatgagtttgttgaaattttacaagtttgtgtaatatcttctttaaaatatttgaagtttcccttttattttttggactgtcaataatgaattaatattttttattctttctttgtttggttaaatattaaagttctaaactattctttttatgattattccttaattttttaaagaaaatacatattaaattttattgatcaattcaatttttatttttatttatattcttattcttttgtttttattacttctaaccaaacatataaaacaaaaaatattacatttagtcacaataaaatttgtgactaaaagtgaaaaaatgtgattaattataaattagcattcttatgttatgactaaaaggttcgtagctaaaggtattagtcaattaggttaatgtcgatgctgcagtttttgaaggatcacaaggctatgactttggtgttgtttctaggaatgaattcggttatctaattgaggttgtcacacgctcttatttagggggtggttagacctgagcttgcagaggcgattggagttcgtgaggctttaagttggatcaaagccaatggctggcagcaggtgactctagaatccgactacttgttggtcatacaagcaattcgaagcccattgataatgatttttagctttggttcagttattcaggagtgtaaggcttttctcttggaattgggtaatgttttaatttattttgtaaaatgttcatcaaactcagtagctcattcatttgcaagagcttttagtttctatcctgatcgtattttcagtatggaggatgtcccaactgagtttgctgccttgtttggtagtagagattgaagtttaaaaaaaattctgattattttcttcaaaaaatatataaataataaataaattagtatgtcaaattgtaacatataaatatgaaagtgtaaattatgatataaaaggacttataaatcatttatattcatgatcataaaattggtaactcatctatataatcactataaaaatcggctacttttagtgacaattttttannnacaacataaattttttgtgactaactgtgatttttagtcacaacaaaaagttacttgtgtctatttacttgtgactaaaacatcgtatttagacacaagtggtcactaatttagttttagtcacaatactcacaacaagtattgtgactaaaaacacatttagtcacaacaatttataatttttttaattaatacttctagccacggactttttagtcacaacataggaatagtaatttataattagtcacaactgttttagtttagccacaagttttgttgtgactaaaagtaagattttttgtagtgaattattattctttaattagtaaattgagttatcatgaatataattaaatggtagttataaaaaaggcattttacaattttgtacacattattttaattaattacaaattaatatgtccaaaaaaatttattacaattttctcatatttttatatataattaaaaaaaaaaattcaattcttttataatatatatggtaataattattgattattatatatatagtaatattggctat

SEQ ID NO: 44559 - DNA, 4503 bp, Cannabis sativa
  modified_base (2304)..(2304): a, c, t, g, unknown or other
aactagactcttcctaggaggcccccttgatttgtctccttaaatttcttactcaaattctgtttaactgtattttcaacaatagaggaatgaaaaattggtggagtagggtctttacctgtcttaatctgaccttcacatctcatggttgcctccaagaaattcatgaaatcagtttgcaactccacttgatccaactgtttgagtgtagaccttggagaaacacttcagccacatcttctattgttcttatcgtttgtggaaccatcagaaacatgctcgtcttttcatcatcttcaaaaaaatttgacatcaatagagcatcaacacctagtacctccgccattgacttggttttgagtacaagatccaaagacggtgcccttactttttgctcgtaatctttagcttcccttgaattttcgagtcgttgctagtttattgcttagcaccgaagaagaagctttgagtgggcggccctgacccaccatggtagtagagaaccctctaaagtgaagcaaagaacctctgaagcaaaaccccttattggaaccctagtagagctttcccccttttcagtcatagtttacttttcttatctcataaaatgagataattatcacttttaattcccaaatgatgtaactccttaaaagtcacattttcttttctcaaaatcactatttggaaaatgaattccaattctctttatttacaaaataaatgataataatctccacatcaatagtaataaatattatttcattactattaatattattattatattatataactcatacattaatgcaatatatgtaaaacatataaacattctattcatcaccattattatcatatgcactaaatatgataagttacaaatatatattattatgtaaagtaatatatatgactcccatgcataaaaattgtatgctaattattatattacgtatgttactatcatctcacatataacatacacataatatatattaattaattataatactatatatattacaaaattcacacatatctaacataaatatacacttaatatacatgcatgatatatatacacaatacatattatatatacatgtcatttaaacatataggaaataattatttttttcatatttaatctcttaatatatattatgctcaacatatataatacacataactcatacacattattaactcagaaatcttgacgagacttctaagcgacacttgctcgctggattgacgagaatgaaaagtagtaaagtaattataagagagacaacaaatttatagtagtttactccctgcattgcgattgtaatgtagttacatctactttgagtttttatttctcacgagatggtattgcagaaatatattaagagtcagaagctccaatttctagagagagaaactctgaccttgtggttagtttttctgaatgtgaaaaatgagctaagggagctctctttttattggtaacagaggcccaaaaaaataggaaaaaaaaataaaaattagatatttttgaccgaagatgataatataacgatgaaaattaacttgtggtggtgatggccatttttcggagcccgacaggacacattgcgagtaacttggagcttcttttggtaactcctttggggtagaatttggtgttgatagcttcaaaattacaattggggtatcaaacatgacttgatagagtattgaattagcttcgaaactcaagttgaatcgcaccaatcggatcaatattgatagagcattgaattaggggtgatggatcctagttatggcccttcaaaagtattgtttaatcttaaaaaatagttgaatcttaatcttttctaaaaatagagaagatgctcagaagagttcttgaaaaacatcatcaaaattagctcaggttgacaaaatgtcaacctgggcactaggccttatttttgatgaagacaaaaaagatacaaaagtcagatcatcgatttgatacttggaaagtgcccagattcagaaattatcaacttgggcactagggtgttggggccccgggtgctcaaaaataagcttactctgaatttgattcatatgcctcacatatatctgtggtatgcctagtagatgtctcaatgcatgttttgacccatttgcactaagattatcccagaaactaaaaccctaatggggaatatcaacctaggttctgggtgaaaccctaggtgcccatgttggcttttgggttgcaagttcatgtaattttagatcccagggcttggattaggttgctcnatgtcttcatggtacataatactgaaagatagtgaattggatttaagttgttaaagtatgaacttccatcccagagctcccaaagtcaacttgggtgtaaggctagggtccccttcccaagtcaactgctatgactgcacgtgtcaaacattatgtccacattgctagaaaaaatttttgggttaacacaaattctatatattatatatctcatatatatcttatataaaacatgttataaatttaaataccatgttatatacaactatatattaaatatgatataaacgcatgaacatatatatgccacatatacattactatcatatatatcgtaaatatatcactatcatataaaatagtaaattataaaaatacaccatcatactcacccatgaatggctatatctcttacccttgtgttagctggatttttagccaaccgacgcagagtcgtaataaatgagatttaaaccaaaaactatcaataaatatgaataatgacagtgtattagcaataaatgtaaacaaatacaccataatttaaagagattcaactataaatgtcggtaatagcctacttcctttgtgttttatcgatcaaagttgcaatatcaagaacacactcttgaatgcaaaaagcaacaatgcaaaagtcatttttctctaagtactcaaatttttggacatccctttcccaagtcatggttgaccctttatataggagaaaaggtcggtgcttctcgctttaagagacacgaccaaagtggagctatctcaactgtctccttagtttttggaggtggttgaaatctgattctcatggtagtatctcgctatttttgcaggttcataaccatcttgtaacttcttgagggatttgaataaatgaaataatcattgacgatgaggatcccccaagggtgtggtatgatcgttaaccccctttgggagtagaagctaatacttaaaggtgacaaccccaagacccaatgtgaaggggtgatagttgtcctatcggggtggtaccctcgagaccccttccacttaaccttcgatggtgtgtgggtagccttggtgtcatgaagatgcactatatcaaccatgtctcatgtaggtggaatgtgtgacttggaccatgaaggtggtatggggtatacccctaaactaaccctttagggggtaaggggtgtacctctagattaaccctttagggggtaaggggtgtacccctagactaacctcttaggggataaggggtgtactcctatactaaccccatgtagatcattacatttgaggtaggggtagtagtatatatccctagttggtttgactcccgtagatgtgtggtgatcgtttatcccgtttacgagggcgctagtccactgtccccctgggcgtagccaccttgctcaagctagggggaaaggtgaccgtcagacttctcttccaatggtcatgacaaccgatcatgaccaacagtcatgaatttacacattcttcatcaatttagtcctagtatcctcatgccacgtgtcatcatttttaccttgttaaaatttgggtaaacatttatcccttaagtttttggcagtatgactatacggtagaaacttttggtgtagcatgtagttcaatttagttattgataacttagtggtacggtgcgaagaattaatgccaagcttatactagaactacatttcaaactcaaaaataattctcccattttttatatttttacaacatatcccaataataatttttttcatttgcgagcagaagtaaattacaaggaaaataaattatttacaacaaaaataatctaaatatttacaaagacaaaataaataaattacttatagcattataatgatccttggaagctttgagctttccatcttcattgtgggtaagttctccatatttcctcttataatttccttactttaaatttgaaatttgatgaagtttttgggacttcttctaggtagttttttccatggccaaaaatggcattgaatcattgggttttgagtttttgatgaaatgtgagtgtttagtgattgggttttgtagcataggctatgggtaatgtgtttttggctatgatttgatgaaattttgtgatggaatgattgattttaaaacttttggttcaaagtgctcttcagctttagaagaacatcaagaaca

SEQ ID NO: 44560 - DNA, 2391 bp, Cannabis sativa
tatatatcaaaatttgatctgctttcaattttggaagtactatgaaatctcttcctttattcggaaaacaattcaaagtactattgttacatgttcttaacttcacataatatttggaaagaaaatttagtaattatcaaagttgatctctagactaggatgataagggtaatataaaagttttactttattaaatttattttaggaggtgatctttgtctattttcaaaaaataaaactttactttaggaatcgaattgtcattatagaagttttactttattaaatttattttagggtaagattaaagtttctttttcgataaaaaaaaaaaattgataattttttaattgagataccaaacacaatacaaacattcattgataagctaaaataggaaatcatttcccaaaaagtctgagcaaatgataattaggctaatagaatgatataaactttgaaatatcaaaaattggaacaaacagaataaatcatgccaaaacaacacaaaccaaaacaataatagaaagaagagcttagatctaaaacaaaacaaaaaagagtaatctcataaagtagagccaggcagaatcagcagagcaatcctgccattagctccaagccatcaacgccgaagaagccacgaaagcatgaccaccaccctctctatgatcgagaggaccccggacccatgcaacaccagataccaaattccttaagagcaaaaacactcatcactgcaccaattgccccaaagccctttgccctcccaacaactgtgaacctcaccacacaagagaaccaaagttgccatccaagctaccccatgttgtgaaacaagaaaagtccgagcttctccaccacaaccacccaccgagaagcccaaaacagcccaccctcgacgagattcacaaaggaagagaaccctcccaagtgagatccacatagaagctcgagccccaccaccacatccacatcgacatcccaggagtccaagcaacacaccctcaacgagatccactaagaaatagagccccacacaatctaggagcaccaccaccctatcgaaggatggcgtgccgacaacaccccatgcatgaacataaaccctataaaatttaggagaggcaagaatttcatcatcgttgatggtattttacattccattccaaagtacatagcagctcattatgattaatgatgaattgaatatggtggttgattaatgacaccataatcattatcatcattccttttcactttttccaaactagcaggggttgtggttgcataagtaatactaatgagaggccctaagtagcccttttcaagttatttcaattccattaagcaaaaaagttgtttctcttcctagaaggaaaagtaaacaaaaagcttttggactcttaagagtactaatggtaaaaaaaaatgcatcaaagtgtgattcattaacttttatgcaaatttgtttgtttgttcattttaccttttcgaatgaagctttagatatccttttggcttttgattattagttaagacttaagtagtcagatgtgactttgttaagatttttcatgttattaaactcaattaatatatacttagtgggtaatccaccgccggccgacaaaaaatcaagcgagccgttcccctaactctctagtagtagacaataatataggctttagttaaagatgaaagtagtaataataataataatacttagattctaacaagcctttatttttttttctcctaatctttctaatgattcagtaacatgaccgaccaagtgggcagtaaagagatcaattataatatttgtattaattaatcactactatattggtcgtgcctctaaagccaaagtaagactttattaatagagtttttagaccaaaaaggtcctaattgtgaggacacactcttgcaaaagatactgattgtgataacaagacaagttgtagattgtttatatgtatagtattagttaattaggatttttgcttctgaagtttgacatgtactaaatcgtgtttcttgaactttttatgctgttaaaaattcttcctgaactattaagattgttggatttaagaattttcgtccaattttaataacatatgcctaatgtggatgaaagttcatgggacacgaatcacgattcggtatgtgtcaaatttttggggtagtaggtcacgatttgatacatatcaaagtttgagaggcacaatttgatacatggacgatcactacgttagtaaaattgaatgaaattggacagaagttctcgaattcaatattcttaatagtttaaggggaatttaaacggtttgaaaatacatgtaaaagttgagagctaacaaattctaattagcttaaaatata

SEQ ID NO: 44561 - DNA, 1451 bp, Cannabis sativa
tttcaatatggaaaaatttgaaaggtgaccagacattaggtaaattaccttggacccaagtaactaaatggagtaattaactgttcatggagaacctgttttaagtgattagttagggctttatgtaccaaggtatccagctttgttcagtgtcattgtggttggacagatttccagtgttgactctaagtactgaatagaaagttattctagttttgccattcccatatggaatcagtgaccttctgtagcgtaggtttcatgtagaagcttggttaattcattgatcatattgatgatcactgttatgtttactgttatatattgacaattaactagtttatttttcaaacaaaaacaaaaaattaactagtttatttatagtattcttgtataatttatcattataggagcaacccccagttcaccatcagtttccactcaagtggctgtagcagctgtgacagtagcaattgcggcagcgatggtgatgagagtgggaacaacaacaggcatagtggtagccacaatattgggggtgctgctgattgttcttggggcatattggtggtctggctgcattggtggtgttcgtgtcaaaaatcgagttaatgacctaggtttgagttcacaataagtcgtaccacaacaattttaataagctttaaaaatgtaggaactgaatgattgattatattcattcactaatggcaaattcatagatctgctattaaagattgcatcatacatttctttgggagtacaatttttcagtgtaatgggtagaaaagaaatgttctggagggaatctttattgtgagctctggtcatgtgcctgatgtagggagtcaaatggtatgacaatatgttgggtatgatagcctaagttgacaggtcaaacattgcatgatttgcgttatttcttaatggtatcatatgtagtcatgacattcttttgatattttttagtaattgagagggagtggtttactgaagtacatagccatgatagagttcaacagtgtgagataattttgctagctaactaagttgtaggagtttaatctctttccattctctctcatcaggttgatgggagactggttcaagattacttatgaaactattaaaaacaaaccagagaatttccctgtggtccaaatttagattcaaatgttttgagatatggattataatgtgcaatatccaaattagcgaatcttcaatgcaattagaattgtaagtaaagctcttattggtaagttaaagttgatgactgtgcagttgtactagctttatctgtaaccacaactttgttgaaacttactattcatcttgtactgatttgtgattttgaaaggtctctcttgtattttaagattagctgttgatataaatggttgctggtatcctctgggatgataaaatcctgcaaattgcaatttttccat

SEQ ID NO: 44562 - DNA, 2082 bp, Cannabis sativa
aaaaaaaaaaaaaaaaaaaaaactttctattttttattcaatcatacttacattaaattgaataaaattaatcaatggcaactaactcaggatacaaaatacccttttagatagtacgatttgaggagaaacaaaaaatttgtacttaataaacgattttatttacagatcttttaacaaaataaataaaaacaaaagacaagcatttaagtaaagtcttataattagaaacaatataactaaattaaaaaagagtgaagatgtattttataatagcttgaacacaaactaaactcactaactcgaagacaacattatttcatgtaaaactctcatgagaaaaaaaaaattaattctaaaaactaaatcgagcgggactataatatattaataaaatttgaaggagtttgtagtaaaatccaataatgtatttaaaaatagaataagaaagacaaagaaaagagtatctcttcccaaaagtaggcacaaagctcaagtcatactgagtcaaaatgtggtaactcgttaccttttaagtactgagttcacaactcggaagctattaaaacctacctccttacctcccatgtcagattcttacaaacaactccaatgacctccttccatacccatcatctttctcttcctctttccccaatccaaatccattcctcttccaaactcaaaccactaccaccttcttcttcttccttattcagactcaaccatcactaccattcaactcttcaatggaatctcaaaagacaaggactctgtagagcagctgaactctctcacgatgcccctttcgccgttgctattggtgcctctatagtttcttccctcttttttccggtcaccggaaaagaggatgaagatgatggagattctggtcttgattctactgattcaagattggctgttatgagcatcatcagcttcattccatacttcaattggctggtatatcaatcaaaaccaaacaaatttattttcaattttgataaacaaaatcagtaaaaaaaattgaaacttgttcttgtttttgattgatttgattgaattcagagttgggtttttgcttggcttgatagtggtgagaaacgttatgcagtttactccttagtgtatttggttccatacttcaggtaccttcattcatttttgtttgtttgtttacttagtttatgatgaaattccagttgttgtttttgtttcaagttcattatgatcaaaactcagttattgggtttgtttcattgttgtctaagaggatattttcgacataagtaatcgaagttttgagtttataagtggcgtaaatacttaatgttagtaagattgtagttttcgttcagttttgtcaagtatcttaaatttgtaaacagacttagtttttgaatttgttgaaagaagatttagaaataagtgatactacacgttttcattcacttgatgatttagaatttggctttaaatgtgtcttgttttactaataaagtttgtactgacgaatctggataaaaattatgatgttactgactcaaaattttaagtatttatactgtaaatatctcgctaaatatttgaacattgcaaacaagattttatttttgatggtataaaagtacttcagagtaaatgagtttctgatattcaaatacaaaattggaactttctttgcattatgagggaatctgtactaatgattaagagtatatttccattcccctcctttccagaaaagggtttattctaataagagaagacgaatgattttcacttgatgaattaggtcgaatttgtcgttgtcaccggatgagagttggctgcctattgctagcattattctcggcattattcatattcaggtacattctctttcaatgatagattgttataatctcgagctcttttcattgttggtttatgaatcctttctttattctaatctgtagctggaaatgagtataagaaatggggatatccagacctttcgattgttcggtgaggcttcaaagagtgtttcaaaaccatctaaacacaacgattcgttaaaaaatgattttcaacgaaccgctg

SEQ ID NO: 44563 - DNA, 1289 bp, Cannabis sativa
attattattattattttgtttttaactactattctattgagaaaagaaaaaatctagtttttattaaataattttgatatttttggtagggtattaattgtgatttgcttaacaaatattatattatcttgtacattatacgacatattaacgtaacatctctctcaatccacgtatgactcctaatattttgcatacacattgctttttattattatttcattatttttaattatagttttcttgtgcaatttgacttgcttttttttcttccacaatagattatcatccactaaatttatattgaataatgaaaattttgtctggtgattagaatttaaaactaatcatgcatggttataccctttaaaaacaaggtctattttataaaatattatatttaattattctaaattcataaactatgtcgattatatactttttccattaacattattatattatcaagatctgtgtcaactataaagatctaattaatatcataatataataaagcaacattgttaaggtgtttaacactatactaattaatatttttatctctagaactttgacatatacttaatcatatcttctgaattttgaagagtgttaaaaattttccctaaactgttgagattgttgaatttaaagacttttgtctaattttagtaagaaaagtctaacatgaatgaaagttcggaagtatgatttaacacatgttaaagttcgagaggcataatttagtaaatattaaagtcttggaattatgatttagtacatgaacaatcactgaattggtttaaaataaaatgagataaaagtcttaaatctaacaatttcaatagtttagagaaaaattttaacgaccagaaaattaaattcaaggggcataatttagtacatgtcaaagttcaggaattttttttttttaattaaccttttataattattaaattaatttatataaaacccgatattaaaatatacctataagaataatataacatctcttttagtatttaacacctaacataacgatacttttcaaactgattgatcatattcataaccgaaagcatgaaaacataccacattgtaacacttaacatgttatatattttttaatctatagtttcattatatcatattatatttcttttgagaaaaatattatactatgtttgaatttagttagcttggtgccatggtgtactcttttttaattgctggccacatatattatgaaggaagaaaaaaagtgttatggaatcagacacttttatcaa

SEQ ID NO: 44564 - DNA, 4235 bp, Cannabis sativa
tttttttttttttttgtaatgaatatagtttgaccttgcataaagcttatatagtttcttgttggtcaaggaaattcttagccaataaagtcaagatttaggttaaatggttactttctgctatgtgttttaggtcaaaaactcccactttggtttgtgcaactaaaattaagataggcattttttaatttactcctggttgtatattaatttgtaaaaactttttagttggaaagcaaatttgctctctattggggagaagaggtcatgtttaatgttgtttataccaattcatccacacttactgattgaacatgtttagctcctttatgctcttgtgtatgaaattcataagctttgcacttgattttggtgtggaggtgatgatgctaaaaagaaaatatattggtgcatgtcagcataaaaatgttggaggttttggttttggtgacttaattcatgttcaatcaaaagctcttgacttgggtcttgaccaagcaagtgtacgtggcatttacattcacacctgacttcacttgtgggaaagctaataaaagggttctactagccttttaagtctttcatgcaaatcaacaagtattttgatgagtttttcttatatttggagaagcatattattcattgacatgttgatagtggttctaatatacatattcatttatagggattgatggatcccttggggttctggtcatgcttatctcccttgaaatgtaatgtttggtagtcttcgatttcaatggtaaatgtaggaaactcattaaccaatcttttatcaaggaagaagctcaagcaatactcattatttcgctgtcgatttctagtagaagggatagtggcatcaagagagcttagagcactctcatcaaatgaggtaaacttaagctcattctttaaaatatcaaaaaattatagtaaaagtatttttcatcaaatgagctaaatttgagctataaattatggtaaagtattttaaagaatagagtaaagaaattgatatgagtgctctcacacgttatactactgtgaaaatgtcatatctagttaaattgagtcatcttatagtagaactaagtctaagctaagcgaactaggcctaaggcctaacaaaaatacatttttttttattagtagtttttttttttaaaagagaaatgctcaaggcatccctggtgtttaacactttttttggtattgatgtgattaagtatcgagttccatataacttaagaaaatagattttagggaatatcactaaccaatcatagggcaccacctataaaaggtactgggcactattgatgtccaatatcaatgctcttttttaaaggctatttggaatttttgtcccttgaactatgatgtattattgtgtcccctgaattttttagcctgttataaatcatccttgaactattcacagtgttataaattaatcattctgtcaaattttttcacaagcagcaaacaaaataatgatgtggatgtttagattattgtcatgtcaatgccacatatgaaatcaatttgaaaaaaataatttaaaaaggtttaaaaataatgctcagtgttccaatttctctttgtggcacaagagactagcacatccttctgctagagttgtacaacatgtaacatctctatgtaatattgccaattctaataaagctatcaatgatttttgtgatgcttgttgcaagggcaaaattcacaaatttcctttctctagctctcaaacagtgtacacgaaaccacttgaactcatcctcattgatctttggggtccttccccgaaactctcatcatctggttataggtattacgttcacttcattgatgcgtatagcagatacacttgggtgtttttacttaaaataaagtctgaagcactacctacttttattaatttcaagactcaagtggagaaagaatttgaatgctctaataaagccctacagtctgattgcggtggtgagtaccaagcccttgaacctcacctgttgactcatggcattgcccacaaagtctcttgtccaacaacacactaacaaaagggtgttgctaagagaaaacacagacacttaatcgagtttgctcttactctccttgctcaggcctctatgcctttgtccttttgagatgaggttgttagagcctctgcctatgtattaatagactctcatcccctgtcatacatcactctacaccctttaaggttctctttcataaagaccctaactacagccaacttaaagtgtttgggtgtgcttgctaccctaacataaggccctacaacaaacataagttgtaatttaggtctgttcagtttgtgtttctaggttacaaccttaaacataaagggtataagtgcctttcacaaacaggtagaatctacatctctggagatgtcatttttaatgaacaccaatttccatactctaccatgttttcccctaccaccacttccactgctactacttctactacatctgccactgtccccatcagtttatccacacatactctccccatatcaccttcttcatctctttccccctccaccaccaatctccaatcccctgcctctagctctagttccataccaggcttaacttctggtgcttcagacacaatttttgtcacaccaacacctgttgaacaacctgcactagcccctcctgctcctacaaataaacatcccatggtaattagggcaaaggcgagggtgttaaagccaaaagtcctagtagcatccaaggaaccactaaccttagttgttgctctcaaggatcccaagtggcttgctactatgcaaattgaaatcaaagctcttactcaaaagaaaacttgggtgaaggttcccttacctcctggtagaaaagccatagaatgtaagtaggtctacaaagagaagcaaaattcagatgggagtgttacacaatacaaagcaaggttagtggctaaagggttcctccaacaatatggttttcacttcacagaaacttatagtccagtggtgaagactgctataattaaaattgttatcacaattgccctatcctacaactagtctataagacaactagatgtgaacaatgtatttttaaatggggatctccaagaagaggtgtttatggctcaaccttctggttttattgatccaaaagctccccatctagtctgcaaactgaccaaagcaatttatggtccgagacaaggccctagggtctgcaatcctttggtttctgttgtgctaaagctgatacatctctgttctatagacacactgatgttcactcaaaatttcttctagtctatgtagatgacattttggtgactagtagttcctaagcagctgtcacagaactcatctccagtcttaatcacatgtttgccttgaaagatttgggccctatcaattacttccttggcattcaagtgtctcacacaacagaagggttgcacttgtccctaaagaaatacattatggatttgcttgctaaaaccaagatggacaatgctaaccccttaccaacaccaatgacaagaggtgaaaaattatctgcaacaggcagtgatccctttgcagacctaacatactacagaagcattgtgggtgccctgcagtatgcaactatcctatgcagtcaataaagtttctcggttcatgcaaacacctctcgaggctcactggaaaacagtcaagaaaattctgaggtatctaaatggcacactagattatgctctgcacatgaagccttctacatcactcaccttaacaggtttttgtgatgcagattgggcttcagatccagatgacaagcgctcaacatcagggatttgtgtctatctgggttccaacattgtctcatggtcctcaaagaaacaaatgacagtttttaggtccagcacagaagcagagtaccctagcttagcacaaacaacaacagaggtcatctgggttcaagctcttctttctgagattggggtcaaaataccaaagccaccaactatatggtgtgacaatcaaagcactgtcttgatggcagctaaaccccattctccatgcaagaacaacgcatatcgaattggacctctatttttttcgagaaagggtagtcaacaaacaactctttgttcaacacacactagcttgtgatcaaatagctgacatcctcacaaaggtcttctcctctacacggtttcatatgctt

SEQ ID NO: 44565 - DNA, 2541 bp, Cannabis sativa
taggcaatatataaatatatatatatatgatcatattataatttcatattattatattattatagatatgtctaaggtggttgtatgagcaaggggtgagttttgtggtgaagagcttcaacaaggaaagaatgaaacaaaatattgatatattggattggagtctgagcagtgaagagttggaaatgattgaccaaattccacagcaaaaagggaatccagctattagcttcatctcaaatcaaggccctttcaagtctgttgaagacctatgggatggtgaaatttaagtgtgtttgtaataagagctatatttacatattgtatggatttttatatgatgtgtgcaaaattataactttattgaattgttttaaaaatatttatttatttagggcacaattttataacttttatatatgaaataaataaaatacatttgagtaatctataaagttgattgatactatagtgagttttgattaagttaaaaataaattgtttattggtaattaaatataaaagaaactaaatgtttagattttattccagtcattttctccgctgacgacaaaaatatatatatatatatattttccacatattaaaaatgattatcttaaaaaatagatcatgatcatagtataaatttcaagatcaaataattactcgtgtagttgaaaaggtattttaaaattttgaaaagataaagagagaaattgacagtgtacgtgtgtaaaatataaaatgaaatgaaaaaatattgactacatcaactaaaaagaaagtaaaaagtggaatataagatttcatttagagttctcggtatacatgtttaaagctcaaaaaaaaagtcaacgttttgaataataaaataatatgtaatatttatgtaaataaattaaaattaacgttgtcagatgttatttgtaactgacacttcaaatttacaaacattagtaaaattagggaaatattgccaccaaaaacaaatcaaaaggttaattgtatacaaattaaactataaggggatttaaccacaaattactctatttttaaaactcaataaccttttttcttattctaatgtaaaagaggaggaggctaccgggtgtggcttctatctctaggcatgagcggagagttccaactcttctcacatatgtttggtaagacctttgagcacctgataggttagttttaggttcattttataaattattttagaggagtgttttaattgattatgttcattttgtgtagaattatattttctacttgtttcaagtttaaattgtaaaaatcataatatgaaataaaaatgagaagaaatatgttaaatgacatgaatatgatcaatttatcatggaatttgaagttctaagatataatgagtgaaaaattctaagttttggatgctcaacatgttccgtttgtgatcgaaaatcaaatctgaaactacaagctaatttttgactatgatgcgttcactttcaagaaaaactctgtgaataaaagttttagatctctctttcagcttctgaaatcatattgaatcgtcagatttcaagcaatatcgaaagacttatggccaaaacgttatcaatcgtcgcaccaagaagctcgctgcccaaaaaccaagtacccgagccgcgacattgaaagggctactgcctgcttttagaggcccagagggttttaaaacctaatttcgaaaaagaagaggggttttttgatggggacttttgggatgacgaaaatagagacagaaatcgactacaaccattgattttcaaagggtttccatcttttatctttatttttatgtttttaattagtcttaatcaattgttcacaatgacaatgagtagcgaaatttctaattagggtgttaatggacatcgattgatatatctttatggtttaatacaattttagttcttcctcaatttcttatgtgtatctattttatttgtacttaatttttttaattgtctgatcatcaattaattatttatgatttcaatggaaaatctaaaaagtgaatgttgattattctattatacaatagacatagatttcaaaagagcattgctattaggcactagtggtgcctaacacctttgcgacatggcgcgttgcgattggctagcgatactccctaaaaactattatattaaattatatggaacccgatacttagttgtaccaatagcgatattgacacataagaaggtgttaggcaccactggtgccctttagcatttctcatttcaaaattagataagagtacctatatatttaagattttcatatttaatgcaaattgtatgactaatttatcgtagaactttacaatacaatttaaattctatatatcctaataataaaaatgtagattgaaatagttactccgttatcacataaaaattagaataaaaactaaaattttattaaaccatagaaaattgatacaatcaaaattaattgctctaattatattcattgttattagtccttatttttattgctttcaattta

SEQ ID NO: 44566 - DNA, 2207 bp, Cannabis sativa
atatatataaatatatgatgaactattatattgacacgcttagttgacataaaagcaccatttgtattattaaaatacataaataaataatgacagcttaaaaaaaggagaataaataataataataattgaaaaaaaaccctttgttgcagtgtgtacaccatgttgacatttttctttgctagttcatatttgacttgtaatcatatcttttttttgttctatccaatccatacagctcttttataagttcaccaaaaatccattatgtataacctaatacactctttcttatttgaaaagcaacattaaacaattgcaaaaatacaataatgagagaaaacattcttatttgagagtttacatttttaagtttagggttttggttttggaattttagtttgttcatagaagaagaattgggatgcaagtaagccttgtaagtaaagtactcctttaaaataagggtaaagttgtacttttcaaacttaccaagaaaaagggtaaagttgtaaataaaaataataatgtattttttcttttatttttatttgcattagaataagtacactctaattttataatttaattttatataaaatatatatatttaatttgtactattttttttctcatattcttaaaaaaaaaatacctataaaataaaaataaaatatattttaaatattaagacaaaaaattaaattaaaattatatgaaattttatttaaaaaaataaaaaaaattaatacatgatttcgtgaaaataaaataaattaagaaaataatgtgaaaaaaaattctaaaattgattttaaaaaaaataatttaatttaaataatttttaatattaaagtgccccctttttttaatgaatagtgggtgttattttataataaaaaatataaaataaaatctgtagtagtcaacctctagaagcaaagcatatggaatacaaatgtaatttaattctttttttttttttttcattttcatgtctactccatagactactttattagtattaaattaattatccactaaatttagctacactctttattctccctacccctccataaaattcaaattttttaaacacatgttctaccacctttacttaattgttaattgttctaaattagttcataaataaaaatttagctaatttataagatcttccaatcaccatccattgttttatttttcaacctttttgttttcttgataaaaactccccataaatcaaggtactttttaatctaatgtgtatagatatatatattttaaaaaaagaattagatccatttacatccacaactactacaatatggttcctaattaaaaccaaaattttctttataaataccattcaacaacatattcttgcaccaattgttttaggtggctgaccttaaggcatttttgacaaaaatagcaagaaattttttgaatttagtccccacccaaatttaaagagaaaaattaaaataaaggaatatattattttgtctcttttttgtactgggtatctatttatatatatatataatattataaaaaaaaaaatagtcaaaattcaaaactcatggtcttactactataagcaaaatggtaaaaaaaaaataagaaatataaaagctactattaattaatagtgtttaatatctttctctttctctgtattaatattgttattggtttaagtaaatatcaaattttatatagtttaatataataatttttaagaaactcgttagtcaatcgtaagatgacatgtttaaaagtgttaaacctactggtacttaataacattaataacaaatactcgtaaggaaaaataacaatacagaacaacaaacaaaatgtaactctttttcttttcttttattttgatttgatttgatttatttttagaggaagaacaaattgaaaaccactttctttgtacaactttcccaccccgcccaattggctcacatcaaaacaataattttagaattcaaagctatctatctatctatctatgttactaatccaaatccaatccaaaacctttttttttttacctttttgactaaaacaatttctatatacaatttatgggatagttctccggtgggggctaccaaaaagttctaggattgtttttcatttatagtatttaaagaaattatatgtcttaacacaatgttgaacttatagcc

SEQ ID NO: 44567 - DNA, 3335 bp, Cannabis sativa
tattatatatataaatatatctttttgccacgagggatatcagaatataatataattttttttatatagatatatatttaaatggacggctggatataacaccatatatatgaggcaaaattttttcttggaaaataaaaataaatcgtagcactcattcaatattataaaaattaattaattaagtaaatagtaggatgctttgttaattatttatttattttaattattctcttataatatttatataatttaattttaaaaggatcgagtaaaagaatacgtgtaacgtatagatagttttgccataaatatggtataataattaataatatgtataaatttttaattttgtataaattaaccaccaaacatatactatgtctccttccttattatatataatggaccacgttaattattgtagattttccaataattatttatagtaaaagaatataaatatataataagtacgacctctcccatataaaaaaatattaactttcttttattaacttaaaaactaatttgtaggatacatcaatatttaatttttactataataatacttaaattatatatttttagaatttttataaatacttagacattaagttcaacttaatggccacaagagagtttttgattgattattaaattttattttttatttaaaaattaatttaaatgtgaataataacttaacacttaacagttaagtatttacagaaattccagaaatataacttatgtattattattataaaaaagtaaactaattaagagaattaatcttaagtatttatgttgtaaattactcttaaattctagaccctccattatatataggataaatacatttttagcccctatgttttaataaatgataaagtggactctgtattttttaaaattataaaaataggacttatgagctcaatttttgataattttttaataatataactaattgaaaaacaattcctaacacgaacagaagcaaaaatgtaatcataattttattgacacctctaaatcaggttaagttttattttgacaaaaaaattaatttatggtcttatttatatcattttgaaaattataagatttattttgtcatttaataaaatagagagttcatttaattatttttccaaaactacacaaaatctaaaataatatctaactcgttatatatatatatatatattataaataataataacatagggtttttatttttcatatttaatatatatgtatatcatgataacataaagacacacgcttatacatataaaatatacatatacatattgacttaataatcggtcaaaagattataaatctaaaaattactacgtaaatatatattatatatataatcatagaagtagtcaagagtgaacgtttcctctttgttcttattctttcccataaatatatattatatataaatatgttattatttaattattgaatataatcacggtttgaacatttctcatgagtacgtacttaagatcataatgatgatgatcaatatttaatcatttctgtgtctattttttcaagatcgatatatatgatataatgatagtgatcactatatatgaaaaatataatatggaattagtctgcatgcactgtgattagatgcaataaaatatataaatattaatataatactaatttttttaaaatttaaatatatgtgttcataccatacacatatatttgaaattcaaactcattaattaatacgagaagtcctaataataattataatcaattagttttgcaaagattttatatttcgatcaccatatacaaaatttttattgcaagatgttaaatattagttgaaataatatagcaacaatactgaaatatcttaatttattgatctttatttagatgagattgcagctcacaagtcttaaatttattccacatgtactataatgtattaattaattatgtgatatgattcaacttctaaatataaatgatatatatatttgtgtattatagatgataaacaatatcacattagatggagactagtatagggttacttgatccctaatcctggggggctgtggataagcatgttaggtttgtatctagagccaattttcttttcttttaaaattatatatttaaaaatattttttttttctatcgccccattatatgttgatcccacttaattttttttttccaaatatatatatatattaattattgaatttttataactacgctcttattttaatataagtatttaaatttacgtttttgtaaataatttttaaaattcttttaaagtaaaaaattttgtttgtagattgctaaacaaaaaacacattgtttaactcgataaaatcaacttatacaatatcattaataaaaaatccgacaccatgtgaacaaagctttttctcattgtttgaaccacgttttgttgggaatgcaaccaaagttccacattggctaggaataggaagaattatgggtatataagggaagaattatgggtatataaggatgaacactactccattagtatcaggccttttaggaagatgcccaaaaataaaaccgtgagggcttaggtccaaagcggacaatatcatactaatgtgggagtcagtgaggtagcggtccgacaaggtggaagagcggggcccaacacgtttaaacaatcaatctccacaacaacattattagactatcctttttcctcttaatccaacttaattaatacttcatacttagtcttataataaattaagtttaattaattaagattataattatcttaatcatcactcgcttaataatatatacactcaagtacttgattagtatggatttattcaaatattgactaaggcctaattcaacattaaaagaaagccatagtcaattcaaataactacttttgaacatagtgtgagttttttctcattccctatttataataataataacaacaaagagagagagaaagaaagatatttatatatataatatatatatattgtaataataaaaatgcatttggccttttgtacatctttgactttaattttgtttaatttgcaaattgtaatgagatgatttgaagaattggttttagtgaatgaatgaataataagctgatgatcattgatcaccacaaatatctatatcatcaattacattagttaggctgtaacaagttgttgtgtagccaatttgactatatatatatatgggtgtgctcttaatggttattacccatgaatgagtatttaattatggaccattagatttaatcaaatgga

SEQ ID NO: 44568 - DNA, 825 bp, Cannabis sativa
cctgaaatttattggttttctagggttttcattagtattcattgtctatttgtacttgtacctgttgaagaagtttagggaggctaggaaaaacttcttaaggttatttagagctgtttagaagttgtttgaactgttttgggtggttttagcaaaagttatgcaagtttgagttcaaagaactcaaaccagacttggttatgataacttaaattttgttgcgaattgggttaagatttcttcataaaaaatgttcactatgatgtttttaggtactctaagaaatttggtaagagtttgcttataatcgaatgagtcatgcaatttttaaaattaggcagtggagttgaggaccgtctgatttaggcaaaatttaggagtccgtttttaaaatggatcgtctattttgagacttttcttgggaccccaattgagtgttttcttaatacttagggtattttcatgatatctatcaatagaaaaacttttacttttgaatttaagtcccccaaagtgttatggcaacacttatcagtttttttttttagaattgtgacttagagcctccgattaccagcagctatttccacttaggttgactgacacacctaaaattgaaattaaggtaagactagtataactcacatacatatgttcatgtttatggttttcagatgtatgacatatctgttagaacgatagttgatgtatatatgattgcatcttgatatcgtgaatatatgttttagcaattcataaagtatgaactaatgctaccaacactagtacgctagagtactaagtgcatgtggtattatagttggt

SEQ ID NO: 44569 - DNA, 3196 bp, Cannabis sativa
aattaaaatcgaaagccctaacttttattcattgttaatttgcctattaatttacttgcttcctgatttttattgttcttattgtttcctaatttaaattttctcttaaattttatttagtcaaatataagtaagagtttaattttaacgtacttaactacaatccttgtggaatcaacctcactctttgcgagtaatacttgttcaaacgagacgtatacttgcgtgttgcaaaataccacaacatgctggtttggggtaggtttaatctacctaaacatagtgtcatactatggactgctatgcataaaaaattgagaacaaaagaacgattgcataagtttggcattattgataatgctgattgtgttttctgctcaagtggaatcaaaagagcatttatttttcaattgtagctggacattacagtgttgtacaggtgtggcacactggctgcaatggaggtgttcaacccttgacttagcaggtataactaggtggattcagagggtgcgaatgagtagattcaaaaggggagtgatggcagctgcccttgctagcctagtttacaatgtttggagaagtagaaatgaattgatatggcaaaacaaaatccccaatgctgaacaggtggtgaatcagattaaaagaaatgttaaacaaagactacttcttatttggccaaggaaaataagcaaggaagatgtaatgtggtttaataatttgtaaatttgtatagatacacactgaggcctcccttattgggtgtggtgctcttagtttgtatagaaaatgattttgtgcaatgaatggctgattttccaaaaaaaaataccacaacatgagacagaaattaaaattttacatataacacaataagtatattctaatatttagattaatatgagtggaaaaaaatacatgatttcgaatcaagcagaacaataccagttgacgttgaaaattcaaagacagtattgcatagaaaatgcaacgaaatgctgataaaataatgtgtgagaggtcaatgcaaaaaaaaatagagaaccgaacctagtttatttctttaaccaatgagacccaatatacctatatttttttttcaattagtttagatttatgtagtgtatcttagaataaatatcagaatttaaaagtaaattttcattatcatagtaaattatcttaaaatagaaattaactgcaaatacgaaaaacttgacacgtaaatttttatttaattataataaagattattagattaaattatttttttaataatataatttataatatatattcccacaatatcaaaagtttgttaagttatcaccttcgagttttttggatgacaaatatcaatatatctatatataaatataaaagaaagaacaaaagagtttatgtggcattctagattttttttcattgtatttttaaaatttggtgatattttcatattttatttagaaataaacaactacacatacaaacatcaagtctcgcatagtttgaaaacacttaaggtattgtccacgtaagttataaataacacttttgttatgctactttcctttgtccaagaaatatttttaagggtaattgatttatgtcttacccaataaattttaaattttattcaataaataatttatcattcacatttttataaataattatatatctttaataattaaggaagattacttgatacagagaattaaaatgtaagaatatttattccagatttgagatttaaagagcaagattacttggtacagatttgagttttataaagtaagaatacttattacagatttaacttttaaggtttaatgttaggattatgttggttcctttgtctgttatttcagttagtgtttaactgttttttagctgtgcagtttgccagctgttgtaaccactttctgttatctcattcatctatataaaggctttggtctcatcagtttcagatgagcctttttccatttctttcattcttccatttctctctctgttaatattcttacatggtatcagcttgccattcatggcgttgaatggagcaaattcctccagtacccaaggccaagtcgacggtaatggcgctcctacgaatgctccaccaccgaatcctcctgcgaatgaggctccaccagcaggactacccaacaacaacttgcttccgctaaatctccgcttagatcgatcgaactacacattttggaggtctgtggttcttactgcagtcagggcatataatctcgatggatacatcttaggaacacttcatcagccgcctcaatttcttgaaggtaacatttctaatccagaatatcttcaatggttgaggtttgatccgttccttatgcattggcttatgaaacctgtttctgaacctatgcttggacacattatcaattgccaatcttctcacgagatctggagtacttttgctcaagtctttgcttcaagatcaagggccagaataatgcaagttcgtggcctcttacaagcaaccaagaaaggttcatcctccattgatgattatttcttgaagatgaaaagctatggtgatgcacttgctgcggctggacaacaactctctgacgatgatctcattctgtacattcttgaaggattgggacaagaatatgaagctgttatagtcaacattactgctcgtgaaaatcctctcagccttcaagaagtacaattcatgttacatagtcttgaactgcgtattcagcaacaaacaacagattctttagctaatgtccaagctaatatagccaatttctccagtaatcacaattcaagaggtggctatactggccgtggcaacagaggacacaatcgaggaggccgtggttactctggaaacagaggaggtcgtggcaattgccctatgtgccagctatgtggaagagctggacatacggcccaaaaatgctatcaccggttcgatatcaccttcactggaccatcttcttctgcacctgctaccagtgacaccagcaatgaaaatcctcaagcaaatttggccgagacccccaccaatagtgatattactggagcatggttcttagataccggggctagtcaccacatgaccacagactcacagaacttagatatttaattttcaatttaaataaatgtattaaattcaggaaataaataattaagtata

SEQ ID NO: 44570 - DNA, 1732 bp, Cannabis sativa
aaaacctaaaaatgcaaacttggcctcgcggggtccatgaaagcttgctctctttttttaaactcattaattcttgttgttccatatagctggactggaaatgttgttacgtacgtttttgtgctttagtctgacgtgggttttttctttggtgctcgtttttctcttttgtttatttatataattcttcttattataaattattaatacaatttttatttattttcaacaatcatctaattaattaacaggtgaagtggatgagagtactgtattccgatttcatggcattcaccaaagaccaagagtttctcatctctttgcatggacaacctagtccccaaaaattcgactatgtggagggttttgttattgtagatgacagccttattaacagttggaggtcttcttttttgtcaccactaaatccaatcaaactttcttccgttaatcctgacggaggtgtgttatattgcttggagataaccaaaaactatgctgaatccgatgctcacaccgttgatgaggtacgtccattgatctcgttcgcctctttttatagagtataactaattaattagtagtataattacatgtttatctatatatcatgaattcaaattaagtaagtggcaactgaatatatatatatatatatatattgattaggcggtggggtgacattaataaaagctactgtactgtagtctgtcttctaaataagactatatttgcaagctgtaatatcacctgtacaactacctttcattctttgtagcaatcacctaattatttctcaattataataacagcttagaaaaatccatgattcaattattttttttcaaaaaaataaagaagacaaaaatccctaattatggaaagtctttaattttgagccagctttccaaccacccggtgttaaaattctttggcttttcttcaagcaggatatatatatttatatacatatactagttatataaacgtattagtatataacccttatccttgatctctatattataaaccaatgggtcctataattacatatgtgggatcccacaaagcctagatatattacatgattgagatgagtgttaagtatataaatataattcatattatctacctataaaatatactaaagaaaacattttgaaagatatttcgccatctatgattatctcccctccgaagtcctaagattgtaatcaaatttttctatagtttttattaattataatattccaatattacaaaatctaagcctttccaccaaataattattctctataaatatattttataactaattaatgaattagaaaaatactttggaattgaacttatccttacaaaagcgacattgacaggtagcagctttcttattatttttgttttctctgtgtagtactatttttattgtgtttactagtttgattgtataaatatatagaataattagtaatttgtttctctcaattttcaaaaatatttatttgagtccttaaaatatacaatttattaattttttttttctgaactgttacatttacaaaaatttatagtccttctgttattagctacatttcgtctcgttccgtttaaatgatgatgtatttttgtcaattagtataatcttgccccctaaactttgacaactatcaaaccgtacccttttaaaacaaaaatgagaaagatttaatatttttttttagtaaatcttaaa

SEQ ID NO: 44571 - DNA, 2483 bp, Cannabis sativa
aaaaatgtacatttattattaaatctcataactatattgttggaggattccacacaaattaaataacaaaaatacaatgacagagatgaaaggaatcaaatctatttcctaacgtattattccatattttgatggcaatatattcaaatacaaaaggaaaaaaaaaactcatagcaagtgttagaagttttccaaaaaaaaaaaaaataataaaaatatacacataacaatcttgtaaaccaaaactaaaaaaaaatctatgttacctattttaaaaagaaaaaagaaatttttcaaaaaaaaaaaaaaagaaaaagaaaaaaaaaatctatgttattattccttatttgatgacaattatatcttaatgcaaaaacaaaaaagaaaatatcatacccattgttagaaattttccacacaaaatcttgtaaactaaaattggaatcaaatctatgttacttaatttcttaattgaggacaacatattgcaaaaatgtaagaaatataataaaaacaaattttgattaattacctttttcatcagctcaccaaatagttgtgatgactagtgaaaccctcatgtgcacatatatatattgagtgtcaaaaccattttaacaaatactacttacattttagcaaaagcaacacatttcaattcaaatatgcatagtacaaagcttcgagactttatatttttcattctttcattcatttttctctcacaactttgttcatcaacccctttaaacgagttcctaaaatgcttccaaaaaaactctaataataactccatgctaaacattatcacacctcaaaactccacattcaaatccatgctactctcacgcatccacaacaaaagatacgccacactccaaacccctaaaccccttgccatcttacaacccaaccacgagacccaaattaaaagcataatattatgcgccaaacaacacaatcttcagcttaggattcgaagttgcggtcatgactttgagtgcctatcatcggtgtctaccgtccccttcatcatcctcgacatgcttaactttcgatccattgacataaactatagtgatgaaacttcttggattgaagctggtgccagccttggcgagctttactataagttagggatgactagtccaatccatgggttctcggcctcagtatgtcctggggtttgcactggtggacacattagtggcggaggatatggaacaatgatgagaatgcatggactcacggttgataatgtcttagatgctcgaatgatggatgttaatggtgacatacttgataggaaatcaatgggagaggatgtgttttgggccattagaggaggaggtggtgccagttttggtgttatcatttcatggaagatcaaattgagtcgtgtcccacctaaagtaacagtttttagagtaaaaaggactgaagaacaaggctcctttgaggctttccatcgttggcaatatgtggctcctaacttgcctaaggagatattcattagagcagagttggatgtggtaaacaaaacaattgtggtgtctttcattggacattacttgggccaagcccaagagcttctttcccttctagaacagagatttcctgaattgcatttgaataaaaaagagtgttttgaaatgagttgggcggaatccactgtcttttggatcgatggtcaccctgctgaaaacataacatcattggatgagttgcttgttcagccaaatgggccaggagagtttttcaagttaaaatctgattacatgaaaaaaccttttacaaagcaagcattgaagaaattatggacaatgatgatcaagattggtcgtgtttggatgaaatggaatccttatggagggagaatgagcgagattccagaatgggaaacgcctttccctcatagggctggaaatttggctttgttgcaatattacgtattttggaatgaggatggaaataatgtaacaaatcattacatgaatctttccagacaattgtacgagaagatggctccctatgtttcgagaaatcctagagaaacattcttgaattatagggatcttgatattggtgaaaatccaaataatgagacgttgttcaagaattcccttgtttatggaagaaaatattttaagggtaattttgataggttggttaaagcaaaaacattggtggatcctggcaatttctttcgaaacgagcaaagtattccacctcttcagacaacgaatttagtttaaactaattttaagcatttcttccgaggaaaaaaaatattatagactactttatcattattaataataatgtatatgctgttttttaacaaaataacaatgatatatacaattcgaaattatgcttttgagctttcttttttaactttttatgataatgaagttatgcttttagttttattttattttttaaaagaataatgcttgatataggaaaaatgctctcgcacc

SEQ ID NO: 44572 - DNA, 2376 bp, Cannabis sativa
aaaaatgacatttgggcattattggattaatatttattacacattttatatgttatttcagggaaattatgcatgccatgtggaagcctcaaaagttcaagtacatatacttgttagcaactctatatgttttcacactcacacttccttcagctgcatgtgtttattgggcatttggtgatgaactccttaaccattccaatgcctttagtcttctccccaagaatggttttcgagatgctgctgttatcctaatgcttattcatcaggtttgctttttcttgtttcttttttcaatctatatatatatatatcaacacagttagaagtaggggaatgaattgaatgaatttcatgtttcatgtatgtgcagtttatcacatttggtttcgcatgtaccccattgtactttgtgtgggagaaggtgatagggatgcatgatactaaaagcatatgtttgagggctttggctaggttgccagttgtgataccaatatggtttttggccattatatttcctttctttgggcccattaattcagctgttggggctctactcgtcagcttcactgtctacattatcccatctctagctcatatgctcacttatagaacagcctcagctcgccaggtaaagaaaaaaaaaatatatgtcaacattgacattcttatattttatttgtgtgtgtaagtaataaagagataaaagtggtctattggggtgtggttggtggggacatgtggtaatttatcttattttttaaagggtattttggtaatttgaaatgtttaggagaagagattgtgtgagataggtgaagagtccttttcgtttagttatacactacagagtcatgtattgtgtccaatgagctggctgatttgactctctttcaaccttgtccttttaaataaaataaaacatatgaatattctaaaattaactttagaggtgtcatgttatgatatgttatgttaaattaaattattttttggtcacattttcatgagatctaacttgtttgtttgtaaatttttttaaaaaaaaaacagaacgcagcagagaagcctccattctttatgccaagctggactgcaatgtatgttctcaatgccttcattgtggtttgggtgttcgtggttggattcgggttcggtggatgggctagtgtcacgaatttcgttaggcaaatcgactcgtttggactctttgccaagtgctaccaatgcaaacccgccgttcccccgggaaacgccacagctgcctccgccccaccgcaccatcttcattgaagaattaaaagaaaatttagaaaagaaaaaaatgaacaaaaaaaattacttcatattttgtaccatacatggggcaatagtaatatttcccctacatgtaatgtgtgttgttttttgtttttggggggtcattttgatttttttttttttaaattagttgatataagtaaaatagtgtgttgcattgtgatgatgatttcctttgctataaaagcatataggctatctaattaaattaatgatatatatatgtttttagggtttttttttttttttggtattatttattttagtgggatattttatataagattttgttgttcatgttgcttgtaccttgcaatgtcattattacttagcatgtttccaaagtggattataaaaatgggaaaaggggtatgggcttgtctgagttttttttaatgcatgttggttgatatatatttatatataatttatataaatggattatatatggacaattttctcttatggcactagatatttttttttttttttgaccctcttttgatttccaatacatatgaggaggagttgtttgtgggtccaaatcctaatcccacatgggttcccttgctggctgtcacgtgccactctttactcctagatactctatgtttattctcacatgtgtaagatacatgaacctcttttatggtttcatactcaaaatcaaaacaattcacttaaaaagagtttcccataaaacttaggaacccaaaacaaaattatacttgtacactctttactccctttattattattattattcatattagggttcattgaattataaactaagatgattaacaacatagagaaaaaaaaaaaaaaaaaaagcagcaaaagtgattctatgtttgctttcacaaaaaggttattacttaatcaaattatgccagaacatttaattaaagttagtcttccctttttagaaaacagatgagagaaagttggtaagacttttctttttttctttctttttgctggaaagtggataagaaagttgattaaggccattccatatttctttccaaaatatctatattacttacttctttt

SEQ ID NO: 44573 - DNA, 1850 bp, Cannabis sativa
atccacataattattaatatttataacatgctttactttattttttttttttttgaaatcatatgctttaccaattaataatgaccatgaaagtctttcatatgtaactagataaaggaaaataactgaatggtggttggtttttatgacaaaaataattaaggaaagaattcatttgagaaaatggtattaattttgaaaaagttactatatattgtaggttaattgttttttattttcttttacaacggctaattttagaattattgtagattataataattattttgagagtaatttttcaacaataaagattagtaaaatttatatcattattagaaaatgaaaatgtacaagaataattgtcctaatgttaaaaaactccttggaaagttttgttttaaatcaaacctagctatatggagctgttacatatgtgtaagaacttcttagaaggaaaaaaatgacaaaattatgaaaatattagttaaaatataaaaataaaaataattggtaggataggatggcatgaacatggttaatttaatgaaaagaaaatgcatagtcttaatatttgagagcttaacactacataagatgatatctcaaatttttaacttgaagtatcttattgattaatctctcaaaaagattaaaaaataatcaaaaaacaagcatacaaaatatacacaaagctattattagtacaagaaatccaactaattgaaaacatattagaaatttacatgatttgaatgcaagatccttcaattagatggtctattttgatggaggatcaatatttaagttgacaatcttaaaacaaatgaacctttattatatttatcgataaaaaagagtaaatactatttcggatcttgtattttgtaaattttattgattggataatttattttgttaaatgacaaattcgactttgtagtttttaaaatagtactaaataataccttgaattatttttatcaaaataaaatttaataatgatttgatgtaggagtattatgataaaatttgttatgttttttacatctgttcgtattatgaattgtcttcaaattgattatattaaaaagattgtcgaaaattgaactcaaggtcatatttatactattttaaaaaatacaaaatctattttatcatttaacaaaacagaatatctaatcaataattcttctaaaatacaagatttaaaattgtcttaatcctaaaaaatatggtcacctcatctatcaatgtttacactaccaacaacacaatgacaactttaaagctccatttagaaagttattatgtaattaaaattgagtataattaaaagtaattaatagatttagcatatttatttaaacacaaaaatcacttctcatatctccttataagagtgtatttgattttgaatagtcatcctacaattggaattgagtatagattgccgacaactatttccaaacacacactaataattgtatcaatgaaaattattttaatattttaaaataaaataagtaaaattgcaattatatattagtaatgtctaacaacattataaagtggagttttgtgaatggttgaaaatattcttggaaaaatatattgtatgatccttaaaagaaaaacgttttttttttagtaatgatgtatgttgtaatttttttaatctataaatttttcataaaatttaaatggtttataatgctaaaaataagaaaaaatagtctcacatgtaataaaatatttaaacttatattttcgacactataaaattatttaattttttttacaaatttataaataattctagataattataatgtatagagaaaaataaa

SEQ ID NO: 44574 - DNA, 3600 bp, Cannabis sativa
ggtgtaaaggcaatacttcccttgttcaatgtggcactctgactacgccatctagttgagggccagccaatgcgctcgttagtccctcaacgactactcacattggacacctcctactaattcactctccctaatcttgctgagaatcttgatgataataatggatggaggggagatccatcgctcccgctgctccccctcatcaagaacttaaggctcggtagcccccccagaacgtggtctacactaaccactgaaggctgaccaagcctagtcaagggttgtctagcctcatcgtattagcctagagggctgttgagaataaaagaacatgtcttgtattgtcccctcttgacaggtacaacctcctcaacctcaaactcactgtccgagctctccacatctttgtcagctataggcacctttgcttgccaaacatcaggctctctgccatccaaaggttgtgcaacctccttaattacaccgactctacccttagtttccagctttgcaatgtgagggtcaaacagtggctccctgcgacaagtctatttgatcttagccaagatggaccactataagtctcaagatcactcgagaagctacttaaagaacggactggacactagtccacaaagggaagaccaacttaatctttgtcgatgcggttatcacctcccccaaattgttactcaagatcacctacacagaagagacaaggggaggtgagaaaccagacaatgcgaagggtacttgctaaaaaatctcatcatacaaggctgagtatcagtgaagtaccatcccaagtatagaaacttggacatatcttcagttaagcattcgactataatagactcgccattaagttttgtatagaatttttaagggaacaacatatgacactaaggttgtacatgcctactaggccttaacgagatgctttccgagatcaaaagaggatagaagactggccgcccacttggaacctagggttaggccgcataaggttagctatgagtgggtcgaccagtgtcccatgacccaaccaagaatcagccagggtccaaggcccatgcatgggttggccagtccactagggtgaacccatatggccagccagatcccatgaaaagaccctatggttggccaagtcttaaattagacctctatggccggccatggattataatgtatcaaaatgtgtgattttcaaaaactcaaagtgttctttgtgttttttttttctcgaagagtcaaaaatcacaacgatggtcaaaatcaaatatttttcgtatgaaaatcacacattatgcattctaaaactatcatgcgaatcaaaataccaaaaagactacaatctaaagttagaatcaaagaatgttcaaagtgaagtaaagcttcaaagcaacgatggaaaatctaaataaacaagtgaagaacgggatttgaaagcttatctcctagtagaaactattgaggaaaatggtggaaagcatggatcattgatataacacaaaaatctttggagttggaagacaaagggtcatccacctcaatggaagtgaagagctttcctaacttattttcttgaagagagggaatgaaatgtgggaaaagagaagagagttactcccaaaagcttatatagcttctgtgggaccctttctcacttgccatgcagcatacatcaaaaaacctgcataaatgtaatgttatcagctctttgccaaggaatgtaataagacaagcaagagaaattatttcaaaggctaaataataatgcaagatttgtttggttaagactacatctgtcgaaactagactgcaaaaagtccctatgtatagacgtctacacagtgacgatttttgccgacctgacgtggcgtgtccacgtagccaagatcaatacgacatgtgtgtatagctcattagtaagaaggccaagtcatctacgcaacacttcaactaacacgaggtccgggtacttaggagggacgataaattaacaaacaagcctacaccttgcaaatgcatggccagccagccattacatggcaggcctttggtgcacaaccttcatccgtggaaagcaagctaagttgggagtcgggccttaacaacccacgaaaataggagaaaatatcagcagcttccctatttttgagggataattaagtcatttgaagtttattatttaatcatgtaaatatagctttatttaactatttctaagggatattagtggttaatcatgatgtaatctctactatacaaatggcattagttaaaccctaattccctaagtcttaagttctgagtctctaagctctcaagctctaagtctaaaactcaactctctatcccttctcactcacacgccataggcatattctctttctcgcttgagatttgtcaagttgattctcatgttgtaatcttaagagggctactttagattccacaacacttgtgatttgagtggtattatcattggtattaatacaactaaaaggagagtaggtcattctgactgactaagggggtcgaacctctataaaatcttatgtctcatttacttttctattcttattgtataacacatgggcaagcatcaattgttaaatacggactccgttgtcggttggccaaatctaaggtcaatagaagatatatctcatatttctagaagtgcacatttaaaatttagagaaaaatttcacaattttttattttttttaagaaaagaaggctaaataaactaagtgtagaatatggtaatgaattataaattataattttcatcaggaatagtcttagttaattaaatattaaactaataatattgtgtcaaaattaattatatatataaagccttctttcaaattttatcataggcctctcgcgagcttgagactacctacactaaaagtaagtttttttttattttaattttgggaaatttacagggtatactaacttttgtcattttttttacaaaaatactgccagacggtattttttactttttaactgtatttttttttataaattctataatgcagtatactgtgttaagttttcactggtgttctacttgtgttttttagttgttctactgctgttttgagttgttctgttttttgttctacgggtattttataaaaacacagtatttttaaaacttttttgtgtgacagtatttttgtaaaaattaacccaaattttagtatttttgtaaatttctcttaatttttgggacgggtgtcaaatgggttacttaatcaatttattattatttcattttaataaattttattattttattactttagaattattttattaatttctttctttaacaaaaaggatagcatagagtacaaaaattcagtcaacaaaattttatataatatactacaaattaaaaaaaaaaaaaaagtaaaatacgtcaacacaaaaaatatttatttttatgctcttaaaatttttatggttaattggtaatttttcccttcgaattttggcatgtactaaatcgtgtcccctaaacttttttggccgttaaaaattccccccgaactgttaagattgttaaattta

SEQ ID NO: 44575 - DNA, 1086 bp, Cannabis sativa
tattctgtcatctcttgatgagtacattcttatatttttctcttatttctcaatcagcttttggacgtccttcttccactcctcaaggaactctctgagcagaaagatgtcagacctgcactctatgaaagattccacatgcctgaatggtttcaaaagcatggaattccttcacctggtcgtatatcagcagatgggtgataagaaaaagtttccactcttttctgcaatcctctacagttattctgttagaagcggtaactctccattggactcaagttttgtacagcgtaaatttgttcacgggagatgttaattaaggctcatccttctaaaaggtttaagcctgtcccgccgcatcctgtgattatatataggcacaccatttatctatgtacatttgttaagaactctgattcttgtgaaactttgtctataggcctgcaattctcttggatgtgcttgtactttgttgaaactttgcataattgttatcagtaattattggcagtttacacgtttcttgtatccttattttgttctttatcttctgtccatttcatgcatgttaaatgttcttataagttaaaattcttaatccaactaagttcggttttttttatcacaatgttcagcaatagtcactagccagaacttgctagatgaaatgagtgctgcattaattgtcatctgtgtgcagagttaatgaattaacgaactctaaattagtccactatcgtcctgttcgttagatctatgtcatagattatcacttttatttaagaggtgtaattatgatttgtaagctcttgtattaattaaaacggctgagccatattccccaataaaatttatacattagtgagctaagaggacatattgtctggtggcctctgttaatggaagcacagcacaactcacaagtaagtggctaaactctttgtttaagtagaaaatcttatcttttgacaccaataatatgtgtcaacaaattcagattatcagctaaacattttacagcttttcatgtccccaaaagcttggtttgcatacataaacaaaaagcaacagtttaaaggggggctt

SEQ ID NO: 44576 - DNA, 1257 bp, Cannabis sativa
taagaatgttagcgaagatattattgaaggaaagattggaaaagtatacattccagatcaaaaggtaagaaggggtggttctaatctctaattatatagttattttccttcttgttgttattaattccatgcatgggcatgttagatttttaactctataatatatttccaaatttggggatttaggttggggagactgctttaccttacaaagcaaagggagttaagagagaacgccgagaagcgaaatcgaaaaatgctgaggagagggagcaagcatcaaaaaagcagaaggaagattccacaattgaatagagaccaaatggagaaagagatcaaatgtttaatctatagattacagcataacttacccaagtttttcagtaatatttgtttgtaaccacctattttgattgatggtggtgaatggtattagtattcctctttttgaaacttgtgcttttctgtgtaacatattcaattttgcatctattgaaagcaaatcatctcattgttgagcttaaggtctcgaggagagaactaaaacaatcgcgactactattggaatttttgaatgctcagatgaatgagttacgcaagaaatgaatttgagaaaataggcttgctcataattagttcagtactcgagtgttgtggattttgaaagaaggaaacatgatcaaattgcaggtagccaattcaaattaaatattacaattagcatggggtgcaaaattctactatgtaaacaaataatattgttttaaactctaattaattagtatttcacatttatatttttgtttttttttttttttgaaatgcgactttttattcacaagaacaagcaactacaccatgtcggcttcatctgctatgacaacagctgcagcaccatgatccgtgaccaaaccaagtttgaagaaggggcagcccattttgctattgaatgagctctactatattacaaattcttgggagaaaagacaatgtatgtacaaccaaaaagaatattcaaagctttgatatcatcaagaacaagcacccaatctcaaaattcctcaaaccatgggtggcaacaagagaattagaagccaaaataaaatccaagctatgttgcatgagctgcaatccaatgcgctgttgtgatattttgcacacgcaagtgtacgtatcgttacaagtagtaaactcaccaggagtgagatcgatcccacagggattgtagttaagtacgttgaaattaaaattttactt

SEQ ID NO: 44577 - DNA, 880 bp, Cannabis sativa
aatatattgttttatataataccaattttataaaagaattttttatttttactttttaaaacaatttttttttataattttatagaattctacatagaaatttttattgcaactaacagagcaacctgaattgcaaccaaaatatatataacaacccacatagagactactagagaatccaccttaaaaactcaaaccgtaaattttaaaaaaatatatatatatagtataaaaaataatttatcttttataaattgaataaaagagtatcaccaaatttcctaaaggcatgtttggattgtaattgtatgtaattagaggtaattatataatttagtatgtttgtcatattattgtcagatcatgtaattatactataagtatgtaaatagaggtaattgagggtaacaattacactatctaactctcacggtcttcataaaaaattgtaatgacaatctaacactttaatatgcaaccaaataaacgaatagaatagaattatttcctttcgattctatttcattatctacaatcaaaacaccaccttaattactatatttcttaaatgaatattagacaatatctttaaaaggaataatatgtacaacaaatacttaaatccaccctaacaatattataataatttttttttgtaaggaacaatatcataatcatattttgatagttaagtaaatacttaaagtatttttctttttttgacatctcacaactatttcttttttctcaaacacagttattctaacttgatgagttaaataactgacaattttttttttttgaataaaaagtttcattaaaatcaggcctcagcctgaacaatgtcacacaagaaagaaggagcattcagctcattaaa

SEQ ID NO: 44578 - DNA, 1527 bp, Cannabis sativa
tttttttatgtggggtttaatgatttttaatctcaaattaaattaagaaaagaaaaaagaactaaatttgcttaattaatcttcctagagaacccaaccgcaggtgcttacttgttcatgttctattaattgtttaatgcgttacactgttcagtgttgtcaggcatatttatttgaacatttaaaaaagctgagtcgtctcaacggctatatatttatttgaccgttaaaatcggaggtgccttaggatccttaatcaccggcccattgttttgatgggtttctcttttgggcttcccacgtgccaatcagcccattggctcttccctctaccgaccacgcttcataacatatacatgtggatttttttgtctaataaatatatattatattagcaaaggatgtcggcaagggaagatgaatttgcagtttcttttttttttccttctataaacatatgagtatacttgtatgcaaaattgatgtttgacagaaagtcaacggcttatattgataaataatctatgcagctttgattatagggtgaaatgtagcaacgattaaaatgtaatttgtattgtactaattaatgcctaatgcatttggtgtgtaagttgtaactggatttttgctctaattgtctattagcatcacttttcttttttctatggagaagagaaaaaggattaaccaagttcagttattagatctcatattgtactatatatatcgatttaaagcctaattaattaattagtgttagctgtgtactttgtatttggtgaactaattacaaatattcaatgaacatttagcttcatatgccctaactcccaatcttaaaattgatacatatcttatccacttttcttaaattcaaatcagactttgtatcaaatacgtcataactcatatggaaaatatacgtggtcaattcaggcatatcttgagaccaataagaagggaaatgacttgggattgtacatcccaaacatacttatatttaagtacgtagtagtcttcatgtttgattttgtgtggttctaataacaagtcagtttccaccaaacaaaacacacaaaaagctaacacagaagtttgtttgtttggacaagccattacagaaagtcaattttcgctccttcgaagtgatacacaattggttggcaagtgttagggatattagaaaagtcttagtttgtgtttattttgtttacttgagtatattgaaaaaaatgtaaactcggatgacgtaattaagcttgttaggccatgtatatatatacctaataacagattgagtataaactaaagaagtaaaccaaaatagttaattgatgattttcaaacggccaaaataattatgtcatgatagtatgatatattaatttgttcttacacgacttctcatctatatatatatttatatgggtgtacttttaatgaatattaccatgaataggtaatattaaaaaaaattgaatttttatacttaattttttaatttaattacaaaaatttctcatt

SEQ ID NO: 44579 - DNA, 1817 bp, Cannabis sativa
tgaaaaaagtattgacttccagactgagaacttttgtttcagtatttgtttgttgtgtatattgtagaatttgatcgtctgatttcaattttgggttggtgttttttaagggtttaactaccgggcgattttcaaccaattttgggaatttggtgttttgcaaacctgcatcactaaagagaaatcagctgttgccttgggcgaaattcgaattgaattgttcaattgatagagagatggacttgagcacttcaactttgatcgatggtgtttcagattccttaaatggtttgtatgtggttcttgtgtgatggtcctgcagtcatgctcagtatttgttttgtctagtttttgctcttttaaactgttatatatataatccataacagatattgagctgaaagagccgagcatatcaactatgctaatgaattttggagacaagtttgatccttatgaagcaatcagtactccactgtatcaaacagccacttttaagcaggtatatctaaaagagtagaaaattcattattttttattttcatgtaattcttactttctaagcttcattgtaacttgattgttctatgccttaagtgcagccttcagcaacagaaaatggtccttatgattatactagaagtggaaatcctacacgagatgttcttgaaaggtctgatttcttttggtactaatatgagtcgaagtaattgtggttgtgatcatctcaaataatgctactttttcctttttctgggagttgttttatgctgagctttattctattgtatagccttttggccaagctcgataaagcagaccgtgctctttgcttcactagcggaatggctgctctgtcagctgtagcccatcttgttggaactggtacatccctcctctccccccacccccctttttccgttggtatcaaaaacatgtctattcttgatcaattttcaaacattaaatgcaaaatacttgtccatcatatgagctggatttggatcctttgctttatataacaaatttaccatgaagatgtatctcttgggctgtggatggtttataatagactaggttatcatttaagcctttatggcccttggtggaatttgtagctgtcttattgaacttttttcttaagatataataatgtgattttaggtgaagagattgttgctggagatgacatttatggtggttctgataggttgctgtccaaagtaattccaaagacaggggtcttggtgaagtaagtgcagctcactttccaaatatattatgcagctcaagcctcagagtaaaatctgaaagtatcatgcttatactgtgtagacgagtagatacaactaatttagatgaaatagcatctgcaattggtccccgcacaaagcttgtctggctggagagtcctacaaatcctcgacaaatggtttctaatattcgtgtaagatatctggctactatatttctcagtccttttattttcactctttttttaatgttacttttggtaaatgcttaaaagaatcagagtagtcaaatcaatgcccaaatatggcacttgtatccttggcattatatgtatctggaattatcattctcaaaaggctgatatataattactcggatatctattgtaacccaggtagagaacaatcttttccggctgtcagatattgcttagacattaaacttgtttttgatagaatcaataaaaagaattaagttgttattcagttctttgttgccaaaaatgtcatacgttttaaaagtgcagttatttttccttgtttattttgtgcatgttcaggaaa

SEQ ID NO: 44580 - DNA, 1170 bp, Cannabis sativa
gcgatattctcattcctacaaggacagtatgacatctttgtagatttagatattttagagataattatagaaacgacttgttgtccctaaaatacaaataaatttgttcaacctttaggaatgacaggttaaaccatccaatgtgttgatttaagtccgccttgtaggtgttgttcccaaaaatctcttttcttgtagtgaaaagcttgtgaatattttttcgataatcctaataaaaacatctctccacgaagtttggcccgtcgtaattttaatttttcggccctttaaatttcaagtctagctctgtctctgtatacatgaaataaattaattaatatttaaataatatgtattacttacagtgttacctaccatcacaaacaccaagtgggataaaagaattgagaaaaattgcattggaaaatttgagaggagatggaaaaggagagaggaagaagaatgaaagagtttatgattatgatgtgtataatgatctcggacaaccggacaacaatgatgacctaaaaagacctgttcttggcggatcaaaagaattcccttatcctaggcgttgtagaaccggacggcctccaactgaaactggtaaattattatatatacatgtcatattcttatatattattaatataaagttcattgtcaattagttttgagataaaaacatacattttacttgtacatatacatatatatatatatattctaaagtattgttttttttaaaaaaaaaattaagataatattattttgtaccatttgtttttattaaataatattttttaggccatatatgattccacatcttgtaaattgattaaataaaaaataaattatacattgagttttaatatgtgcaaaaatatgatattttttgaaaaaagtttattcatgaaaaaaatgaagaaaattaaaaataatgaaaaaaaatagctaaaaatatataacaagttaccttatattgctttgcttgtattattaacttttttttttcttttttaattttctcataaaatgaacattattattttttttttggaaaattaaaactgtaaatattttagccgtcaatattctttattttaatttaaaaaattccgaagaatcttattaacaattaatcacatataattttaaaatgattctaaa

SEQ ID NO: 44581 - DNA, 2263 bp, Cannabis sativa
aattactagcaagattacacttaaaaaattgtctgatgagcaatgttggttcatcattagacaactagtatttgtagagggagaagaaaatgagatcaaattattagaagaaattggaagaaaaattgctagtaagtgtaagggcttacctcttgttgcaaaggttttaggaggtctcatgtactatagaaagagtttgagtcagtggaatgatatcttgcaaaacaaattgtgggattcaaaggttgtcgaggaagagatatttgctccactgttgttaagttattatgacttgtctcctttggaaaagtgttgtttctcttactgttcgctctttccaaaagactatatatttgaaagagatatgttgatcgaaatgtggatgtcacaaggttatgttggtgattcaagaacaggtcaagagtgtttcgagagcttagtcatgcgatcattttttgatgattatattcaagaatttaatgcatttggtgtttttgatccaagacattattaccaaatgcatgatatagtgcatgattttacccaatttttagccaaaagtaaaactattgtcattgaatgcgacattaataccaaattgaagtctttggagcacaaaatctgtcatttgaatttgctaaatgtaaaatcaaattcctcatacaaagttctcactttgaaggaaatcaaaagggaaattcaaagaaaattgcgtacacttctcatttccacagaggaaattgaggtagtacttgattttgatttccttttctctaatctaagaggtcttcgagtgctaagtctaccagctcttggtgtgaccaatctgccccaacatattgccactttgatacatttgagatatcttgatctttcaaacaattccaatttgagagaattgcctgaatcattgtgtgatttatgtaacctacaaactttaaaagtagataattgttataatcttcaaaagctaccagaaggaattggaaaggtggctaagttgagatgtctttacaactacggttgttctgagttaaaagggttaccaaaaggctttggaaaattgaccagtcttcaaaagatacatatgattcccatacccaaagaaaacaaagaagcatatttcccatttggggatttgaagaatccaaacgtctatgatcattttcaagggtttcttcgtattaaaaggtgtgtgaatttagccaatgtgggtgaagctgaaaagttaagccttggaaagatgaaagagcttgaagagctgagtctgaactttagagtatttgatggaagtagtgttgttgaagaggaagcaaagccacaaaatgaaggtatgatacttgaagccctaaaaccacatccaaacttgaaccttttaacaatcagtcagtaccatggagttaaattcccaagttggattacttcattgatcaacttgaaatgtcttactcttgtggggttcgataattgtgaaactctacctcctttagggaaattgccatgtttggaatcacttcagttatccataatgacaagtgtgaaatatgttggcattgagttttggggaataactcgtgaagaagaaaactcattcccgaagttgaagagcctttggtttaattacttttcccaatggaaaaaatgggaagggagtgaagaagcagcattagcagcgagaagttcaaaagttatgccgtgtctacgttcgctacgaattacgtattgtcgtaatttggaaggacttcctgggtttctgcgaatgacgccattggaggagttgagaattggtgactgtggcatcctagaacaatgttgcttaaatgaatggcttcacatcccaaatattgaaattaactactgtcgtgtacaaaaggatggcataaggatttagtcaacactccaccattatagaaattcagtcacatccagaggtgtgtatgtaactatttaatgattttttttttttttgtaatgaactatttaataatcttttgttcaaaaatatttttaaaaaaaagggtttctaataatatgacgttctctcaatatatatagggattttttcatatatatatatccttattagggtcaaattttacatttttattactataagagaaaataaaccaaattagaaaaactaaagtttttttttaaaaaaatacgggagtcttcttccccaaaaaacttctccttcttaaaagagcaaaataaagtgagttgttcttcattggaggcaacactccacccaaacaatcaagtg

SEQ ID NO: 44582 - DNA, 1764 bp, Cannabis sativa
tggaaccgcgattaggtttcttacggatcgttcgctttatcaggcaacgatagtgacatacgcaactcatggataacgagtggtgaggtttgcaaatggtcattaccattatcagtaattactcctgaaaccgcggataggtttcttacttattgttggctgtatcgggcaatgatagtgacatatgtagctcgtggtttacgagtggtaagggtactttattatgaagtatcgggattgtgtgattacgatgatgtgaaatgaattaagcatgtttttatgacatgagttgtaatcagatacgtctttgttataatgtgactgaatggattttatattgcttatgaagttagtctcttttttgcagagtctcactgactcacgggatgtaagaatacgtgttataggaatgtaagattacaatgctttatgaagcgtggaaatgtgtgattatgtattgattaaataagctactaaacaagctctgaatcaaaatctaccgttaaagagccaaacttgagttccaaaactcaaagcttgctcaaacctaatgacagccaccaaaatcagttcaaaacaacagatttcaccataattaaacttcagaaacacataccaaacttactccacaactcagaaccctaaataatcaaaatcatgcataattctaaaattaaaacctttaaactaaagaagttgctagggactttaccttgacttgggtacacttaaagcttgttggaaattactggaattgatgaataaaaatcagaaccctagctgggttctatggtggtcgaaagagagagaattttggagagagtatgttttatgtgattcttcaaatttgataaatttgttgtgtcagtcaacccccaacgacatgtcctcattgaatgtcattggggatttattggctgatataaggaaaatgctcgagcccccttcttctcattttcattttcccatttttcacaccattctttcccaaaaaaacctacatcctcttcatgaaaaaaaaaccttcatcctcttcatcagcccccgacccactgctgccgcctcctgagacgtcgccatcctttaggtaatattatttcatccctcatactcttttctttaatatatgttatatataaatatttatgtttatatgtatatatagtgttggtattcatagtggagccaccacaaacaacttagacaaaccgctcatatatcggagtagccacactgttagtttttttatttcttatactcttattcattatatgtaaaaaaaaattaatttataaaatatattatgtttataatataaattttaatattttgaaaatgttatttgtgattatatgagatttttttttctttttaatatatgtattaatattctgaaaatattatatgtgattttttttttattttttaaatgttaataaattatttgatttattgtgaaaatatgtaatatttgaaaatctatgatatattttaatttttggagtgtttcgaacatgttttaaaatctttggctagtttaaaatataaatgttattctactgaaatttttttaaaattttagatgataaaaatatacatgttaatttaataatttataacaagttagtaatttttttaaaaattgttaacaagttatatttaaaatgggaaattttttacattaataattatttaaaaaatttaatgaaattaattctaaatttaagtaatttaactaaattttttcttgtatatttcttgtat

SEQ ID NO: 44583 - DNA, 2622 bp, Cannabis sativa
  modified_base (2267)..(2270): a, c, t, g, unknown or other
catgtgtttttgaacgtgaaagttgactaagaagttgtaatagaaggttaacggtaacactcctctttttttaatagagaaatttatgtacatatagtattaatattaaatattatttaaaatttataacttacactagattagtatttaacatagataattaaactaagttatctatactttatatatataaaacctaagaaatgtcaaaggattccgatggttaataccacaaacttttagaaatggtaagagacactccgatcaatttcagttttagccccacacgtttcagtttgacaaatgctaagaggcactcccatcattttttatactccatgctttacaatacattaaaaaaaatttactttctctattctacctcaaatttttataatacattgagtataatattttttatgtgatgtgagtgctctaaagaatactcatagtgcctagaattttttatgagatatcatatcactaatagtataatatatcaaaccatacttgttttattttaataatgattatagtaaaccactaattattaatagagtaccacttcataatagggttacaatgctaatacaatgctcgtataagttaacctatccaccaaaaaatcctgtggtggactgagttttcgaaaaactaaggaaatgaacttagcttttttggcaaaatgggggtagaatctgttaactaggagccagactctttcctgcagaattttgaaagcaaagtacctgaaaaataaagattttctttcctgcaagtacaaagattatgattcgtggttttcgaagaacgtggtgaaggaaaatgctattttgaggaaaggggcatgtaaatgatcatggatggaaaagataggagaatttgggaggatccctggatcacccatggcagggagttctatccataggcgaaaggtgttagagcgatggatcatggcaaagtggctaatctccttactgattatggggattgggatattcaaaaattaaattatttttttataatgaatttgtttcagccatcctaaaaaggggtaaaccctctggccagggtacggataggtggatttagactaaggagagtaatggccgattcacgtgtaaatctgcctatcttatccaagcctttaaagggctcctcattatgatatagctccttccctatggaacaaaatatgaaatagtaacattttggaacgccataagatgatgtggtgatgcattctctctaaagtccttcccgttcgcgctattctttctaagagattccatattgaggatatgtcctgcccattatgtggggatggtaagcaaatcttggagcacttatttctcacttttaattgggcgtctcatttgtggcgatcgtctccatgggtgatttttctcatttctgattctggccattcgtttgtgggattgggtcaagttcatttgaggactagaaaaacaaggcatttacacagatgaagtatttctgtttggttcgatagttgtcgatacaatttggcagacgcggaatgacaaggtacacaatagaagtttgtccaacattaaccagtgtgttgactatatttattactcttatgcagattacagagattccttttcacccactccatcaccgtgtctggaagaaggttggcttccaccccctcttgggtgggtcaagctaaactgtgatgttaaagttgggatggaaaacatatccattgcagttgtggttagaaattatcttggagtggtttgtggggttcatacagctagattggaattctttgatgctctctgtggtgaagcggctacttgctgtttggcgttgaaagtggctaaagaagaaagcttgaagtatattagtatagagagtgactctagggtggttatctggattttcgttgggaaattgaaaactatgctaaattttgtataacactctctcagttgtttgattgttgtaatttttattttgttaaaagatcttgtaattttatggcccataatatggccaagtgggctttcacaaacaatcggtatggtcgattgtgtgttttttctatcccaaacaatatcctttgtaatgaccgtgagatctaatttctatctatacacgtttcattaaaaaaaaaacctatccaccaaactaaattttttattattagttactatctttaattaatatatctaaaattaattaaaagacatttaagggctcgtttggtacgccatataagggtcgtattgtattannnnataaataacactatgtttggataaaacaatgtattctattaaaaatcacgactaaatttattaatacaatgtatgttgtattatttaatacataataaatggtccgtattagcttgtattataatatttacaaagaatttagagtaaacatcaatctctgactcaaatccgaacccggacctggactcgggacccaagacccgagacccggatccggacccgaatccgacacgagacccgggcctagactcggacctgaacctgggacccggacccgagacccaaacccggacccgaacccgaacccggactagggacttggactcagaaccagaactagattcgggacccg

SEQ ID NO: 44584 - DNA, 1830 bp, Cannabis sativa
attcttttttatccattttgatactcaatcatacaaaagaataaatacgatattgatcagttaacccttgtaagagggatttattgaggatccttttttggtatgtttgtctaaattgcaacttgcagattactattcctcatttagaagtgctttcttttggcgtaatgttttcatgtttagttctctaaggtgtttattcattttccattcatatgagaaaaaatttccgaactttaaaatatatgtttgctgtaacttctcaggctggtacagcagactgtagctgtggtggaaaaataatgaaaggtttatccgtgaaaccaattaaaggagatgccgttctcttctggagcatggtttgttttctaattaattctttggaaattagcttatcttgatgagtcacctctaaagttttagggcctatagtttaaagtctagaaaatcttaaggattagtatttgctgaactctacttctggtgctagtgaaaaaatgatacacgccctccatctcactaactatagcaacttgtgcttttttttttttaatttaagcgtttatatattacacaatgcataatctgagactcgaacccaagatctccaacacacacgcactctcttatggccacttgaactagcctcaagtggtttagctccttgtgcttcataagtagttttaaaatgtttcgggtttgtttcactttgtttttgtattatttatgagcttgaagaagcaaggagtagaacacatatactgaaaccctgatcaggctgtatccctcttcctcttgatccttttagttacagatgaggggccagctttcctttagttttggaacacaattattaatacaaattaaattacgataagggaatttcgtttcatttatctttttatgtttacttggcatatttcagggtcttgatggacaatctgatccaaatagcatacatggcggttgtgaagtactttcaggggaaaagtggtcagctacaaaatggatgaggcaaaaagttacctcttgaagtaaatttggcaaagtttatagatattctttacaaatgcagtcagtactcagtccagcttagaggtgtacaggcagaattacatcttttacataaccacccttgctgtaagataggagagcgtacaactcttttctactgaggcttcggttaaattatatgcttttctttctttgtcaagtctcagaagagaaactatagggtagactagtggtagttgatgttgaagttggttatagaaagtatgtataacttacattagaattttcagtggagtgctcccatgaaaaaaatgaaaaacttgtagtagagaacatgctttatcctctccttttggctttatacttgggttttttttgggaatcaaattcttcactgaatttggaaattgttaggtatatgctgtactaacaaacaaatgaaaaattatgagagtatgggatgaaaaaattatacttgactaatatgttcccactgtgttccctcagatacaacaaattaacttaaaactgttaactaacattaacatacttttattcatttatatgtatgctttgctaggatttctttcttaaccttagctgccgatacttttgaccagggcttgtcggccgctcatggccttgggcgtggctctggttaggaatcgagtgatttctttgatgggtttgatttttcctatgtgcttcattcctttctttcatgttttgtttatgttcgttggcaatttatctcttgtcattgggttgtgtggggttgatgggtttgggtttgcttctccggcggcctttatctag

SEQ ID NO: 44585 - DNA, 2216 bp, Cannabis sativa
gcaacataatattattcacaagttaagtttcagttaacagaaagcatgcaagtgaacaagaacaaaatcgaaatgaaagtacattaacatataaatttaaactaacaaaatccacaacaaactttgtacaattgtatcatcaagaaatgttgagaaaacaatcataaacaaaattaattgtgacatttataaatcaatgccatactaagtagtcatctttaattttgtattatgagaaataaggtattctgaaaatgtcagaatatcatccaacaaaacataagaaacctagataaacaataacataaatgactgcaaatgataaaaggggactcaccatttccaaacagctgcaactgatttgaagtatttgtttgatattggaaacgattctcgtcaaggaacacaggaagaacaggattaccgttgtttcctcccaacataatttttactaaaggcaagaagataatctaccttaacttgtattgcttttaaagtatgtggttaaaataaacagaaagtttccacctacaagagagaaaaaaggatcaaatctcaatccaacgaaagtatgatggaagaagtaaaacacctaacacctataaacaatgcccttatgactaatgaaccagaaacattcataatgtcatttaaatcaaacaagaggcatgcttattgcacgtcttgcattatttagacgcaaataaaacaaaaatttataaggaataaaacgtttatttcgaaagcccacaaaaaatggagaaaatcaggaaatattgattgcatgtgtttaatctaagcatggaagacaattcattttttattttatttatttatttttcaacagtgagagattggaaactatactgatataatgggaatctccatattgggatagaagttaatttctgttcctaaaagcaaacaaagacaattacaagtttcaaatattcaccattttataaaggtaattgcgtttaatttctttgaagcacagaatccattacaaaaaattgtcagttacgaacacttaataagaaccacccaattggctgaataaaatttagcagggagaaaaaaaaatggtttggatgaatcaaacacaaaatccaatataaaaaatcgaaagaaaaaaccattggagatgaaatcagacatacccagaaagttaaataaatcaatatataaaagggtagtgaagaaacaaggatattacccaaaaatctgtcttggatcagaaataagagaatctagaatatcaagtttcagtataataagcctaagaacaagaagctaacaaaaagcagagagagaaaaaaaaaacaagaaggcaagcctgtgatcgttctagataccttcctatctctaccaacatagaatatttctcaaaaaacaacattattttttcaaaaataaaaaaggaaaggaaagaacgggaaatagaacaacaaattacctggaaatagcaaaggtactttgattgagtttgaagaaaagctaaagctttcacctacccagatcctgcaaatcccagataacaaagtcgaaaaatcaaaaccatgaaaaccaaagcaaacccaatttataaaagacaagaaaaaaagaaaagtcatatacctcaaaaataacaatgctttatagataaggcaaaggagaatcgatcatcatctacaaccttccattaaaacgatccacaacaagcttaccttacccaccaccagcaccactcaaatgccaaataaaaataaataaataaaaataaataaatatttatttattgtctcagaaaccaagagataaatctgcttaataataatggtaaccgaagaagaagaagaaagcaagaattaatattccaaaaaagaaaaagtggggtgagagtgggagagagagacagaaggacgggtatgaagaagtggccaaattattattagtgtgtgtgtatgtgtatgtatatgtgtatatgaaatatgaatgaatgaattaaaacggtggtatcgttacgctaactgatgatatctctttctttttcttttttctttttcgctctcttgtcctaaccatcaaaaaaaactaacagaaaaaataattagataataataatggtaaatacttttggaaaattttatgggtatattaatacacccctatctgttttagcatccgaaataattttttggtaaaattttttctcatagtcatgtacgttatagtta

SEQ ID NO: 44586 - DNA, 2344 bp, Cannabis sativa
tttttttttttttataaaaagtgtataacggtggtgttaaagggtgtgatttatggtaaaatgtgttaagtgtatatgtggtattttaatttaggtgtcaaaatgtaagaggttgggtcatgaattgggacagacaatttggctccaaagtttttagtgtaaacaagccactctaacactatttggcctaaatatgtgaatttttttcctgtgtctttacaattttactaaaatatttagggacaaaacatgaagtgactgttataagaaataaaatgaaaaaaaaaataaagtcatccgactccactgtaagttttcatatgtatttttgttaagtcaaatctttttattaaagtacattaacagaaacaatagtatatgtttgaaattgggataaggtgaaaaaagttttatttaaaaattaattggtaatgagatgagtagtctatttatttgataatttatttttacacattaaaaatatgagactaactctaatagtataccaaaatattagtattaattaacgaaatacgttgcaatatatttgatggttttattttatgcattgtattttaatgtgaataattaccaatttgctagagaaacaatagtataccgaaatgctttcaaaaaaaaaaaaatatatagtataccgaaaaatcaatattaattaatttaaatatcaaactttatttacttattttctaattaattatagtattaatactaaaatagtaaattttatttacttattttctaattaattatgtcgagattttttttatttaaatatatttttaataaattttttcagaaaaactctctctctctctctctctctctctctctctctattcttacagctcttgagctggtgcaatggcaaaaacaagatccagagggcaggagaaggtgattcaaagcatagtgtccaagaagacaggtcctaattcgagctctgatgtgaggaaaacaagatctatggattccattcttggaatcaaaccaattaatttttcggatgctgaagaagaagagcagtatcgttctcgagaagtgcttgatcagaacctacttccagaaatccaggaggcaattcctgagcccctttcacccaaatcttcattgcgattgatcaaacaacatgaggagattaggaaggattttgttcacttcctagatgcctcgaaccgatgctctaggagcatttctcaaggtaatttccttgttccacctgttcttcgatttggttcagtgatgagaaacctgaaaaattcattttcgaattcatctactcgtagcaaagtcaagattattaatgatgatattaaagaagaaatcgatttctggaacccttctatagtttgctatgtgttgggtgctaatcccccattatcaatcttagaaggatttgttaggagaatgtgaagtgataaagtacaaaagggttagaatgctttcttatggtatttttctcataaggtttaactcaaatgaagatagagatgagatccttagaggaggatatatattcttcagcagaaggccaattatgatctgaaaccatgggatcccaaaatcaatttcaagaaagaggatgttagggtggttcctatgatgaccttgacttgaaatattggggtaaaaaatctctcttcaagatcattgggcaagttggaaagcctattatggtggatgatgctacaaaaaatagagacaaactcagctatcctagagttttgataaaagttgaaatgcagcaggattttctaaagactatagattttgagaatgaaaatggtaacaataccacgatgtcaatatcctatgaatggaagccaattatgtatggacactgccatggtatgggacataacacggctgattgtaggaacaaacactgaaggaaaacatgtatggattgtgaaaaaaccagaacagaagtctaaaatggaaaggaaaaatactgcattagtggatgaagatggtttcaaaccagtcttgaaaggctggaaacctaaggaaatcaaaggtatcaagcctgctcaaaccaacaatcactttcaagctttagaggatgttgttgaaactagttcccttagagaagggactgaggtgagtatgcagaaacaggatcaagaagttaacacaggagaggaggcagttccctctcttgctaatggatagaattatgtcatagaatgtctgagggatcgatagccaacaaaagcaactttcaatcaagaaattgattgaaagtgaaaaagtagggctagttggtctccttgagacgagagataaagctcagaaccttggtacctaatatgtaagaatgtttttt

SEQ ID NO: 44587 - DNA, 4216 bp, Cannabis sativa
tttaaattacttgaggggcatatatatgtgtgtatgttaactagaattaatctagaagtacatattatattgcaaacctattttttatttttttttcacaaagtgtttcacaaagaaaaggataattggttaatattatatatggacaatataaagtctaaaaagtgaagaacctcttctttagataggaaaatcaaagtagcagttgtaaatgagatcaactcataaaaaaacacaaagctacacgagaagctgaatatttaatagctcgcattattccggtatgtattataaaagaggcatgacaatgccttgaaaaataatacttaacctaaaatatgaatagaagatctactattcatatgagcaatcaaaaaatatacaaaatagttcctaaagtgaattattcaaagtatttttaagttatatatggcagatttaaactgctcatataatatttggtagattgtaaactactcgtgtataataagacagactataactgctgatgaatcggaaaacatacacagagtataactgttcacacacatatatagtagattaataactacttaaatgtatcaaaggaaaagaaagaaaaatagaaatgcttaataaatatatcttcagttggatcaaaatataaatgtttacattgtaaattaaaacgcaaataaataaaaatattaagttcaacataagatacaagataactaaagtaaagataaatgcataaggagcaaagttggtcatccaacagtgcaaaattgtctttacaaaaaataatgccacaaggggcaactattgtcttggccagaaggccatctttctaaacaaaaaataaagaacaaaaaccaagtctacatggtgagagacttggatggatcttcttcttcctcctcggagtccactacctcttcttctttggttcgcttgcaataagccaaaacttcttcgacaccttcacccaagaagctcaagtccatgctggggtcgttggccaactaggctctatatatggatcgctttgcaacattgttccacctttccttagcatcaacctcggctccatcaagcttcacactggctgcattgagttcttcctagagtttctggcaggccccacgtttgtcctttgcttctttttgagctacctcaagttcagctttgtggttcctctttgactcctcagcatccttggtcaatcgcgtgatctccgtctgagatcattccatttttttggcaacaacttcgcgttgttcaatggatttgcgaaggtcagttaccaattgtttgtcctctggagaccccaacgctgagccatatgagataaaaaggatgcctacgaagggaaaatatacatatgattttcttctatatgtaagttcaaaagaaagataaataacaaagaaaagaagaagggaacaaaccgagagggtaaagatgagactccttttgaacattttctcagggctaccattgttaatcaaaccccagtcgccagactggaaggatttgaaatggtgccagcaggaggtggtaaattgcgagtagtactccgagccagtgttccccgcttcgtttggcaaggggcaagaaggttcaagtagagccattttaggccctttacccgaagacgcagtagcatgatgagtcgaaccttcagcttgttcttcagcgtgtacaatggctagagtatggacttgaacctgatcttctaaaaactcaagatttatgggttgcgatgcacatttcttgttcgctgtggttttcctggatctcttcgtaggtttcatattcacccctaatgaggtttccgaggcaacaatcctcttcttcccttttttgccagaattgttgagaaggttttctagatccatatctgcgaggccaatagatacatcaacacttaatcaagaataaataaaaaggagaatatggaataaactcccacttaaagaaagttaccataatcatcagatcatgaagagggaggactatagtgattactaaactccctagactctatgatcatgaatatatcataagggtttattggatctagatcccaatttgaatctgggtggcatgccctatccaattttttctcgtactgctcggcaatcccataatatgagctagtgcaactaagctggacatagaacctaggataccaactattaaacctatgtgttatacaatctatgaggaaattattctaagtatcgaagttatattggctatcctgaaaagttaatagcaaggtacactctgccctaagtattataagtgaccatccacattaattacctcgagatacttcttcttcagcttaccaaggggttactttctagagataatgtacacgagctacataatcatggctctcttcattagctggaactgggaccttctcccacaaagagtactttggaacattgtagtcacaagtaaactcgtccgagccaagaaggccaacagtcctcagattggcttcattcaaaagaaagtctactgatcgcgcagtccgaatgggagacctagcaggattttgtgatgctcgaccatctcaggggtgggaattggtcttctagagactgctgccaacacaacaaatgtaataagtcagcgacctcaaatccataaatatgaaaataactcaagaccaagttttgagacaaaaattacttacgtataatgcaaaatgcagttgtgttgataaaatctccctgaacatcgcttcctcgtgggaactgctttaatggagtagaaataaactagttcaaggggagtgggacactccaagcctaaaatattgtacaaaacttttaggcctgccagaattctataagaacttggaatcagcttaaagggggcaattccaagataattacataattctttgaagtactctcttagggggagaaatgctccagccctgatgtgctcgaggctccaagcgcctatcctagacgagctactagtacttgcttcaccacattcctcgcgaataacccgttgtggtggaaagtaattgaattctctaggagcaacagatctaatgtgacatcctcgtctttgcttgatgccacaagtttttaatacaccaccaacgtaatctttgatggcccttattttagactcattgagctagacttcaaaagttacagtgggtctttgatttacgaggcttggtagacataatttcaaaatcatggtcacctgatgaaaagcaacagtgactctgggtaaaaacaagggtttaactaaaggaatagacgataaagatagaggtttaggccaggttgcatctcgcaagtagtgacgtttaccctcagttatctcttgtagaaaacgcctatagcgaccaacaacttcatcatgattggttttaattaaatggtccctaatttttacatcatttatctcaggtttggattgaggtttctggattttgagtttgaatggaagggccgattccttaggacattgtatttctatgaattctagattgaaattttaaaaccaaattgggacattttttttacaaaaagaataatctcaatttttggaagaaatttatttaaactagaagcttatgaatacgataaacctaaattttttctctgttaaaccctagaaattaattacaaacgtagtgaataatgatgcaattaattacaaaataagaatacaaacttaggaaagtgaaatataccaaaaaaggagtaaaccacttactattcagagatggatttttgcacaaagaagaactctgtaactggggatgagatgagtgacttggtatattctgagaactcctaaggttgaagattaaatccgaagagattcacaaaaaataggttaacgatcaagagggcatggaagggtttggaatgtcgagaatggttttttgcagaaaagtttgaaagttttgtaaatcagaaatggcaaaatggtggttcttcttaagttttataccttgagaatgatcactgttagattaaagaataaagatctagcgaatgggaacaagagagaattggaaaagatgggtaattaatgctaatgatgtgcctcaagatcatgaaccaccaaaactcaaagcattcaatttttcaaatcgggattaagacaaaaataccattgtaatcatttaaaaaactctttttattgaaaaagaacattttaaggggaaattgttatacccgaaatt

SEQ ID NO: 44588 - DNA, 1036 bp, Cannabis sativa
ttgcaattcatgcaggcagttaggaggatgaaaacctctccactcactgcagaagaggtagcttgtattcaggaggtaattttgtttagaagctacatgctatttatatattcctattggtaatacttatataaatgtaattatttagcattgtattcccatgaaacttagacctgtatgatttgtaatccttatcattcaggcaattagggtatacaagtatgactggaggtctatatggcaattcattgtcccacatagagatccatccttattgcctcgacagtggcgagtggctcttggaactcagaaatcatataagcttgatgctgataaaaaggagaaacggagactatatgaattcaacaaaagaaaattcaaatcttcagcatcagcaatgtggcaaaataaagaggtctggataatatttatttatttattattattatcattattttttatctctgaacacattaatcaactaagtatttaatttttcttttcttcatgattgtttgagaggtgcatggttggtaatataggtgtggttgttggtttatgagcaattgaatgcctagaacttttctatcaaaaaaccatatttactctacattatattttacttgctgggccgcaaaggacttcttgagattatctatgggcgggtggagctagtaattctggttaatgggtgaccggaggtattttctgtggatggtaattgtacttacaagtttagtattgatgcaggattctcaggttgaaaattctggtggagacaataacacagatggttgtgtagataatgggggcaaaacttatgttcatgaggcctttttggcagactggagaccaagtgattacgttggacaatcttgctcagatattgcaagaaatcctcacaacggtatgctatcacaggaggctgttcaggaacagctacaaaataatggttgtgggatggctcgtcaacctctggctgttagcatgcagcagtttccatcaatgtatcagcatccctcatttcattttgctg

SEQ ID NO: 44589 - DNA, 1045 bp, Cannabis sativa
  modified_base (48)..(57): a, c, t, g, unknown or other
gtttatttcattattttagaaagtcatattaggatgttaatgaaacannnnnnnnnntaaatctagatcctggtaaaattaatttcaacagtgtctggcctgttcaacctccttctgacagatttcattatcttattatttgagaaatgtgttatttgagtattgagataataattatgtttttacttaccacatgccaaccttccacctgcattgcctgtagacaaactaagctcatgcccacctacaaattggaggaccaaatgagttaggaaagagtcaaaagttcaaaaaaacatctctccgagatcatccaaaaaaaagtgatatttacaataaagaaaggaacttggagggtggattgtaaaacttggctatacattgtctctaactttaaacttctatttacgtctcttgaattcaaattgacattcttttttataagataaaccctatgctgttttatgtgtaagagaggataagttcaaaatttgggagggttattacctggtacaaattcaacactgtttattgcaccctaattaaaaattataaaaattgtagaataaaaataagtgtaatctttttttttttgtctaaataaaatttcttatgattgacagtatatgtgaaactagttacagttagagttacattttagttagaaactgatatatttcatttaattagattattatttgatatgagggcttcttcccagactttatatgtataatatgaaaaagtggtcatatatgcaatcaccaaattaaccaactttgccttcttaaatctacatttatatagaggagttttccctgctttggaatgttctagggtcttttctggtattttccaattttctcccagttctcttctagttcacttctacttcccaaccgtcgtttttcttcttctctttctctaattaatgcatcttcattataccctgcatatcatcattgtttttctttaatgcagcccccgttttccctctaccgagactaccattaatgcttgctcagataacctttggctctccttc

SEQ ID NO: 44590 - DNA, 1111 bp, Cannabis sativa
  modified_base (37)..(44): a, c, t, g, unknown or other
  modified_base (71)..(78): a, c, t, g, unknown or other
  modified_base (105)..(112): a, c, t, g, unknown or other
  modified_base (139)..(146): a, c, t, g, unknown or other
tttttttatttcgggcccccggaaagtgtgggccctnnnnnnnnccccggaaagtgtgggccctaggcacnnnnnnnncggaaagtgtgggccctaggcacgggnnnnnnnnaagtgtgggccctaggcacgggcctannnnnnnnatgcctagggccggccctgggtgggggtatatattataggatctatatagataaatatatataaattaaataaatatatatataaattaaataaataattatataaattaaataaataataataataataataataataaactagctagttgcatttatttgagaattgttaaaaagaatttgctttatttatttaagcattaaatagtccttgcaagtggccatgggggggagcggagagccgtcactatatttccacactcatattaagatttattttattatatgtttaattagttaattaattaagttttggcttttgtttgatttgattttgtaatttttaaattatagtataatataaaataaataattttagatagagaagtacgaagtatctgaattaatacatggaagaagccattgtaaataaatataaaattaaaactagctattaataaatatatattatgtatattttgattcaatataaagttttacatatatatttacattaatttttaattttttgtaatttataaatacagccaacaataatatagagaaaaatagtttatttttaaggaataaatagtacttaagggaggcgtggccccttagtagccatgtcccctttaattattattatttaatatttaatttgttttagtatatatgcttagaagaattaattagctgctcatgtgcacatacatgcattcaagttatttatttctatataatatgatacacgtataaattaataaaatatgataatttattttttttttgggagaattatcctatatactattttgtttattttattttttttttttcaaatttacggttttagtttttaaagtagttttttcgataatttctgctatacgattttttgttgcaatttaagttgcagcgttagatgtaataaaagtttatatgtagaaatccataaaaataca

SEQ ID NO: 44591 - DNA, 1611 bp, Cannabis sativa
atatatatataaatattaggtctttttataaaatttgtagattttcttctctctttccctattatttcctttatgaaattttctttggtaaaatccaaattcaaacaagggcttagtatatgataagtaagccatcatcaccttaatttcctcactattcattttttatattttgagatggttgtgttggaaaattcaatgcaatgcacacacaaagataaattcattttacaccagatataggaatagatctgtcattacagctttgtttttattggggcaatatagtggatttaactatcaaaatatacataatttaaagtataaatcaaacctgcacttttgaacaaccatttctcgaagttcttccaaatgcagatcaagctcgtgcagctgaaataagtgcatcatgatatagctacaaagttcaaccatcatacttctcttaaagtataaaaatatcttaaagcggaaatatatgacacttgcaaaatcattttcaaattgcttgaaagtaaatcataattatttagaagtgatttatcccttttaactatgacacacctcattgtttatatctctagccattttgttatgagccgcctcataaacaagctgaatgttcatctgcgcttctgcttcctcctcctctcgtcttttttcctgtaagcatgttgctctagaagtttagcggtgaagaaatcaacaagtgcccatgtccataaaaacaaacaactaataaatgagtggatcaaacaagcaaatacctcttctataaccttaggcagaaattgcagccacttctcctcaaactttttcagcaaagttttggccataacatgaacgttacttctctcttcattatatttcatagcatttttgaaaaccaaccttacatcaccacaaatttgtcgaacatttttatatccagtgccatcgttagcctccatttggttttttattgtattaaaatccattggcttgtcaataacctattaattgaaaattcaataagatattaagaagaaatctgagacaatagcataatgcaatcaaggattttcttgctaaagtcaagaaaagagcatttaattacaaaagttaactatgcaggagaagaattctaactagctattataatctcaatacatcctcaataaggctaaatacattaacagtgagccataatttataaatatatatttaaaaaaaattacaaagagtgccactagacctgtgaaataaatcttgtgtcaagaactccaaacacaaacgcctagcaagtaatattatatctcacacctagtctagagaacatgttacaccgcctgtacttatcatgcaatcaacagttgaatactttataatgtacatatttcccatgacatccagttgaaaccataaaaggcagagaaaatatatttaagcttaaacttcacaaattgttacatacatatgtaaaatgtgcaagcccatgctacacatgtttgtgcatactcctcgtttttcacaagtataaaatgtgcaagcccatgctacacatgtttgtgcatatgactctctcatattcatgttatacctgcaaactacattggagattcaagaaggaag

SEQ ID NO: 44592 - DNA, 890 bp, Cannabis sativa
agtatacgtgcctcgcacgtagttttttactagtatatatatatatatgtcataagtttaattagtatttgatgaaggttgttaatagagaaatggtaaaatgtattagtctttaatattgttataacgatttgttcttagtataattaagtattaaattttatataatttataatataataatttttataaaatattgttaatttaattataaaatgccggccactaattagacactactggtggcttagagtatttctaaaagagtgctaaaaaaatgttgtattgctatattttggcatatttaagaaaaatgattcctctaataatattctaaaaagtactaaatttagtacatgctaaaagttgtgacaaatttaactcataataaatgttatttttttttagttactataatattatttattattatgattcttcattgacttttactaaattttacatttttttcattgaccatattacaattattaaataataaaagaataaaaataatttttgtacattcgcaataaattaatattaaatgatcattaatattagtgccgtttggtaatacttttgtttttaatttttttaatcacaaaatgaaagtaaaatttttgttttttaaaaaataaaaatgtgttccgtagccacttttatttttcaattttaaaaagagaaaataaaagtgttagtaaagttcattttcatgattttcattttttaattttatttaagtcgggtctaggtccagggtcgaattcgaattcgggtcagaggtgccagggtcgtgggaggtttgcctccgggtctggtcggagtcaaaaatattgattgagaaaaaaaaaaaactgtttaaaaatatattgaaagtgatttttttt

SEQ ID NO: 44593 - DNA, 1882 bp, Cannabis sativa
atgtataggtggatggccaacggcacctgatggcccacattcttggggatactgcttcgtgagggagcgaaatccaccaagcgattactgtagatctgacgctacttacccttgtgctcccggaaggcaatactatggccgtggtccaatgcaactttcatggtaattaatactaattaataatttccataaatgaaatttagaaactaatttattcttaaatcaagtgatcgatcaactaactcatccttcaatttttaaaactaattaaacaggaactacaactacggacaatgtggaagagccattggagtggacctactcaacaatccagaccttgtagctacggaccctgtaatttctttcaaggcagcaatctggttctggatgaccccacagtcaccgaagccatcctgccatgacgtcatcaccgggagatggaatccctccggggctgatcaggccgccggtagagtccccggttacggtgtgacgacgaacatcatcaacggcgggcttgagtgcgggaaaggccggaacgatcaggtggaagaccgaattgggttctttaagaggtactgtgatatattccggattgggtacggaaataatttggactgttacaaccaaaggccttggggaaatggactcttccagctggatgcggtcatgtaattaatacgacttgtcgtaatatgagaggaaaacttttcttgtcaattgtgggttaattagcttcccttgcgtatggtttcactgtcgtttgggttatatatttatatatatatgatcatcatgcatatgttgtaatcttttgtatggtgcttctgtgcatgcgtagaataatgacttgagttttccttaataaacaaagatcattaattatcatgtcttttacattatttcctaaatacgtacaacatcatgtcacaaaagtggtctgtggaatataattaagagatgctagccgtgatcctggtattatatcctattaaggggggccctcctttggttcccatagccatgatcctggtattatgaggacaacaataaaaaaaggacaaatgtcaattaataagtactgctacctacacagtacttcttaatttatttaattaacttatttttttttattaattaagcgtttatatattacaataaataatttagaattcgaactcaatacctccaacacaataccattctcctatagttcattatttaatttaatttccacactcaaaacttaaaaattagtactcttggtatatatcatatgacatcattaaaaaaattaatgttatatttgtttttgttctttttttttttttttttcatgtttttgtctttacaataaaaattaatgttatataaaaataaaaagaaacgacttaaaatttcaaatgctaaaattttaatttttttattattatatatatttgcaagaacgattagagatatgtaaacattatattatatttagtaggaaaaaaaaagattttttgatatatatttacatcaattttagtattatacttaatgcacatttgtaaaactaaaaataattgtttttttgttatgaataattgttaattattattttacaatttttttcttacaaatttattttttttgaatatttttctacaacttttgtgaggttttttacatataatatttttttttgggtgattttttttattattaatttaacatgggtaaatggcagcaaaaccctcaaaatttttattttagtttcacttaacctcaaaacccaagtttgggcggtaaaacccccaaaactacgattctgttagcaatttaacacttccgtccaaatttagctgttaactgccaggttggcttgtccacgtggacacaa

SEQ ID NO: 44594 - DNA, 1234 bp, Cannabis sativa
gttagtaaagaaaaaaggttcacaccatacatatgggaaagaagagtagtcgaataagtagttaaattttccatatagacactattaacaaaaagaaaaagggtaaaacacttttccattgcaaaatataaatatatgcgtgttttttcttctttacaaattgaaaaattgcttacgttaagtatccagattaagtttcatctagtaagctatatttttaaaagtacacgcatatcaatgtttatcatatatatgcctgccaccaaaaacaaaataattataattataaattaagacattattatcatcatcactgcaaaccgtgcttgctaggtagctagaaattatagctcaaaaatttgagctcagattcatgatatcattaatagaagcatttaatttatatgtatataatattatgtatatatatttcatttttataaaattaaacaatacaacaaattaatgctaatatttttattaaagtcgaaaattgaaatacccatcaaaaaactattttaaacatttatatatgtatataatttatagaaagagaaagaagagagagtagtacccttttagcgagatgaggtgaagtgataaggcatttagcactccatagaggatcgtttaggtcagcaccatgtcgttcaagctcggtggcgaatcccccatccaccaccgcgtaaccaccgcactttttaacgaaatcaaccataaacgacgacgtttcatccaaactgctacctcctcctaatccaattcccattcttttccttaatttctcttctgaaacctcaaactagtcagctatttctttcttctaaaactgacacaccaacctttgtctatatataattttttttttttttttttgatgcaattgtctatatctaaatttgtgttagtatattacttatttcatttcatcaaagttgaaagaaatgtatcttctttatatagggaagtggtacgattgcaattaccataatgccctttaatcttccatatatataatatagaatggaataaaatttcttttttttttacacgtttataaatataaaatagttacgcgtgtaacataatatttaaattttatttttttcgtgttaaatttttttaaattttttaaaattttgtaagattaatgtcttaaataactataatgtacaagatcatgagaaatttttttttaaaataccaagataaaaatacattaatgtactctttt

SEQ ID NO: 44595 - DNA, 2516 bp, Cannabis sativa
tgactctccaaggatatgataaaatccctatttccatccattgtcactgttgttgcatgtatctttgttgataaaacctttgttgctaacgattcccttcagggtaatttcaattttgaggatagtttacaatggcttgagcttgctccatgagtaagtcatcgacatcaaaaaattggcattgctcataactacgggggcccacatctcacttgttgtgcttcttgtacatgggatgtcatcaactcaatcagggtttcaacttgagcaattagtttcgtgattgcattaatctcatgcaacccatccactttctttgaattgctcctttcactaggccactgctgatttattcatggccatctcttctaaaagctcgtatgcctcgttggcacttttgctcatgaatgcctcactagttgcgacatcaatgagcatgcgagtagtaccacacaacccattgtaaaaattgtggaccagcatctaattttgaattccatggtgacgacactttctgatcaaatctttgaatctctcccaagcatcatagagagactcattgtcaagttaataaaaactattgatctctcccctcaacttggctacttttgctggaggaaagaattttgagagaaacttcactgcaagttcattccaagtgttgattaagttaggtggaaccaactcttgactcgttcccttagtgagaatgggaataatctcaagtgaatggtattgtcactaactccattcatcttaaatttctcacaaagctccatgaagttagctaaatgcatgtttaggtcctccgaaggaagtcccccaaactggactgttgacagaaccatttgaagaatggctggcttgatttcaaagttatttgcatcaacatcggatggccttatacaagattggacctctgtcattgcgcgtagaagataacccctctggcttctgtcaggtgaattatgggcattatcttgatccattgcacccccattatttcttctaattcaacccctctagaaggaactctttttgacctcttgtttcttctattctgtctataagtcttctgtatttcaggatcaacaagcacgcttgcatttggtccttgacatcgcataaactagttgttcctgaaaagagaaagattgacacaaatagagttagtaaaaggtgaaaagaaaatcaaattagaataaaatttaattattttgatattaactaaaaatagtccccaaaaacgaccctaaaaacttgttatgaaaattctattacgcaagtatacgtagtcgaatcaagtaatatattgataagtaaaatatagttcctacgaaaactgtagttaattaccaaaaaattaaattcctaaattttatttggtgaaaataataataataataaaaaaggtttaaattctaatgaaaagaaaaaaaaataattaaaaattattaacaatgatcagagcttagggtgattaatttcaattgaatttactttctatagattataatttaattgtaatttctgatttttatgtgatactggatttactaaagaaacttatattcaggttaggacatatagatctcaacctatatgcaaaatttctacattccgtgataaatttaaatatatagaaggcattacgcataaaaatcctaaatgttacatcaaccataggtactctcgtccaatatcaaaatctgtgtctattttactttagcaaaatcaatattcacttcttaaattttgcattgaagttataaacaattaattagtgatcaaacaactaaaaaaattaaatacaaatgaaatgaaatagatgtacatggaaaattagggaagaacttattcatattaaaactataataaaatgtcaaataatctccactaacaaccctatttaaagtatagctactcagaatcattgtaaaaaattgataacaactaattaagaacatgaaaaataaagtagaacaaagaactcatcgaaaaaataatattgaaagtgtccagagttgctttctgcctctacttttcgtctctcaacaatgttattctcaaaaagtgtcaaaaaggtccctttaaatcttaatattagggtttaagaaccctaattttttccaaaacaccatagagggccgcgacattagccctccatgccgtggctcttaaaggaggatttcggccagcgagcttcctagtgcaatgactgataatgttttggccataattctttcaatattgctcaaaattaaatgattcaagatgtttcatcaagctgaaagagagatctagaacttttattcttaatattttacctaaaagttaacacaccatagtcaaaaatttgcttgaagcttcggacttgattttcgatcacaaacagagtgtgttgatcatccaaaacttagattctttctcatcattaaaccttagaactccaaattccattataaattcatcatattcatctaatttaacatgtttcttctcattttcaattcata

SEQ ID NO: 44596 - DNA, 1794 bp, Cannabis sativa
tatgagattgaaagagtacaatcaatcttttcgaaattttttattaatttgaaaaaaggttttggagtacttagaaattcttacaataagatcaaaagattaaactaggcagaagccaatggatcatttttcttcattacttcacacgcaacttttttatggaagggggcattgatggtaccataagtcaatgaatgatgactgcaatattattattatttgaaaaaaattctgacagtatctgaatagccaaatattatgtatttaagaactaaatattttatttctctgatttttactgataaattgtcaacgcctcatcataattgatctacttcgttgtgaaatggtagatctaagtcatgtaagtttagagttctaatccacacgagtggccaaattgttttcaaaggttcctttcatacacatcttgaaaaatgtctattctaacttagttagaacaacaggttatgacaaatgtttataagtctagattacacaagcaaaggcttctatattgtcatttcatttttcatctgtattaatgacttcatattaaaacaatgtgatggtaatggagattgtgattgccttaagaatgtaaaatttaatctaattatgacttggcaggaccaggaggatatccccagtggctggccacttgggctagagattatgaatgtgaggctccaagtggagagaagcttatcatcatctactgcagtggaacactacactaatttacatgcaccctcaactagtttctcttcattttcatcttccaatcttgacacagaggtacttaaaagctgtctcgcaacccttttcattctcttctttttctttcttttttcattacaaaaatgtttgatcattgtcaaaagagtgtatatcattgccataatatcacttcatatgaggcttttataatattatttactaattccacttgaaacacactcaacttatttgttacttgtgatgcattgcttttaatcctatgaaacgtaatttgtagtcaacagcttcatttttccaagatcacagtgtgtcactaggccggttaattgggattagaccaggtgagagaggacgaggacggttgtactttccaaattcaagtggctcagaagagcatggtagagtatcaaaaaggggttcaaatgatgagatctcaaaagggcatgaactcaatttatgtccagccatttgcataccatttttggtctgtgccttagtcaaaagcaagaacaacaaggcaaagagttagtaggtcttggtttcttaaatacgtacagaagcattttggatgtttataaagattggaataatattaagaattttctatacaatataactatataaggattactttctcataacgttatattgattgtaacgttaggtcttaattcctacattagtcatattgattgtaactatttgaaaattaatttgacttattgtccgagattggataacaatttttctattttctcttcttgtgtgttttgaaattaattggttgtttaataatttgatttctaaatgatttttcttttatatatataaactagtaaataggttgtgagtaaaaattttaaattgtatgtatgaatattaattaaacaataaaattgtgtaaaataattttaatttaattttatgtataatttaaaaatatatatttttttaaaaaaaataataaatcaatataaaaaaactctaaagaattcttaaaaaacaatcatcatgtaatttcttatataaaaaaagaaacacacaaaaaaaaaa

SEQ ID NO: 44597 - DNA, 960 bp, Cannabis sativa
ttttgatattgcatttgggtttgattcattattttgattatgtcttcttcattccatgtgaaacaggtgggattattcaaattctggttatcttgatgctttaaaacaccttacagatttgaaaggagagggtaagatgatggtttgctttgtatttttttggtaaaatttataatccatatgtatcacttcacttcaaataactcatcccatgcaggtaaaattaagactgtggcattgacaaatttcgacacagagagacttcaaataattctagaaaatgatattcctgttgtaagcaatcaggtatagtcttgtcagttgtcacattacttaatttattcttttagaggcttaaacagtttctaatcttctgataaactatgcccaattcctaatgacttaggtgcaacactcaattgttgatatgcgtcctcaacagaaaatggcagagctctgccagctcacaggagtaaaacttataacgtatctttcttctttcctctctatttatgcatatgttaactagcttcttccatgaaatggctgccatctctacacccgtttctagctccagaattctttttgtattattatagctctccctaaaatgcaggtacggtaccgtaatgggtggtctattatctgagaagttcttagacaccaacttgtcaattccgtttgctggtccaccactgaatactccctcactccaaaagtataaaagggtatgttttctttaaaatagtatgctcaagtaatatatccagaagtttaaacatgaaagaaactagaagaattggaaggatgaactcagtatgcttctataccgtgactattttgtgctgctgatacattcaaaatatcatattgagattgattagataagaagaatgcttgacaagttctaattcttgaaattattttgtcaaaactatgagttatctttataaagtgtga

SEQ ID NO: 44598 - DNA, 3272 bp, Cannabis sativa
tactctagtaggcccccaaatattgtatggttaggagaggttcctagtcttagaaaacataggtcctttactcgacttgttctgttgactgatttatctgtcagtataaggttcggcttgctagtagtatatgaatgtgcttctggtatttggctgtaacgacaccttctacttcaacaatgtttcatctagtactaacaaaaattgaaaatgaagagagatatcgaccaaaaataattaagcaaaatgaagaagccctccattttttttttacttctggctctctgatgtaatttttcttctaatttgttcgatgtgatttttctacaggctaaaggttatcgtgttggaccagtatatgatgatgttttagccatggcttggttttttcttgagcttattgtcaagtcaatggcattggaaaagactcgtcttttctatcacagtcttccattaggtaagttacttacaatggaaacatgtgtctaaggaaatgccttcttcctattcttgtttcttcgatatgtaaagtttatttcacggtgcaggtgaagatatcccacctatgcaacttaaagaaggtgttttcagatgtattatgcagttgtatgattgcttactgacagaagtacacgagcgttgtaagaaggggttaagtttagcaaaacgcttgaacagtagtttggccttcttctgttatgatcttctactgattattgaacctcgccaagtttttgaattggtatgtatatgttctctgccttttttgaattattgcttgttatttctgctgttgttgtgtggagtcagttgcatcaaacctagaaactcaggcaagggaagagagaatgtaatgagaaaagatcatgcacattgagaaaattacattgtttgaccttttctggatttggcaaataatatgctgttgctgcatacttgaggtgctaagatattttaaattttctaatcactgcaggtgtcgttgtacctggacaagttttctggagtttgccaacctcctctgcatgattgtaagctctcatttttgcagatcatatgtgatcacgatcttttcgttgaaatgcctggaagagacccttcagataggtactaaactctagaactccagataaatgtggggtcttagtgtagtaatgaaagtcatatcttggtaatttattgataaaaatgtttgtgttttaggaactacctctcatctgtcctaattcaagaacttttcctaacttgggatcacgatgacttgtctctacgagcaaaggtaaagaaaatttaaatggataatctagactggccttatgtgtgaggatgaatatgtatactaatgtatttttgttattgttgtaacttgtaatcgtataattctgtctgttaggccgctagaattctggtggtccttatgtgcaagcacgaatttgatgctcgataccagaagcctgaagataaactgtacattgcacaactgtattttcctcttattggccaggtatattttgggactatatctgctcaagctaaaatttctctattgaacagtaaatgatttatgttatacttcagttcactgattattgatgtgggctatgcagatcttggatgagatgcctgttttttacaaccttaatgctgttgaaaagcgtgaagttctcatagttattttgcaaattgtgcggaatcttgatgatgcatcacttgtaaaggcgtggcagcagagcattgcacggactagattatttttcaaactcatggaggaatgcctaagccttttcgaggttccttggtttttcccttttatcttgatcatgtgattgactgttactgtcatttaactattgcttgtgacactgattctgtactattcatttttacagcacagaaggtctgctgatggcatgcttatgggttcaagttctcgtagtcctgttggggatgcacctgcttcgcctaagtactctgatagactttctccggcaatcaacaattatctgtctgaggcatcaagacaagaagtcagagtgagttaatatattgttttcttaaatgaagaaatcgatgcttcgagtgttttttctatcgatgatgcttttttaaattacttttctagttttgtgcacaacacttatgttgaaactcactcatgcagcctcagggaacaccggaaaatggatatttatggcagagagtaaattcgcagttaagttctccgagccagccatattcactgagagaagctctggctcaggcacaatcttctcgaattggagcttcagctcaggctctcagagaatccttgcacccattattgaggcaaaaactggtatgtttacgttactgtcatcatatttcgaccccgttatgaatttgttcaatcatgtatttacttttaggtggctaataactttattattttcaggagctctgggaagaaaacttgagtgcttctgttagtcttcaggttttagaaattaccgagaaattttcaactatggctgcttcccatagtgttgctacagactatggaaaactcgattgtgtcacagccatatttatgagcttcatctctcgaaatcaaccactcgcgttctggaaagcttatctacctgttttcaacagtgtattcaaccttcatggtgcgactcttatggcaagagagaacgatcgtttcttaaaacaagttactttccaacttcttcgacttgcagttttccggaacgacaatattagaagaagggctgttgttgggctccaaatacttgttagggtaggttcttcacattgcaacacttcttaagatcaacatttcggacaaaattaactttcgcctcttttttttgcagagttctttctattactttatgcaaacagccaggttgagagtcatgcttattattacattgtcagaacttatgtccgatgtgcaagtgactcagatgaagcccgatgggacactagaagagagtggtgaagctcggcgtctgagaaaatctttggaagaaatgtcagatgaagataagagccccggtttgttgagggagtgtggtctttccgagagtgctctattggctctcccggaaaagatgacagagagcaagtggtcctggtcaaatgtgaaatatctgtcagaaagtcttcttcttgcccttgatggtagtttggaacattcacttctggtaagtactcttaccgatatctgtattgattgatgcatgtaattgtagccgggcttgtttttttacaatctgtcattgttaaac

SEQ ID NO: 44599 - DNA, 4542 bp, Cannabis sativa
  modified_base (3456)..(3457): a, c, t, g, unknown or other
taaaataatttccaacagtgtggtagggtcgaggggccaatattgagtactttaggaagagattgtgtgcaagagtgcacttggtgctacattaggtgcagttggcttacgagcctcatctaggaacgacgcatcaaattttgtcctcaataagagtgtcgtggttgattgccatcaagaggatggtgcgccatggagttagcatgtgaagtttttaaagggacttatctagaaggacttggcttcagtggaagcgtgttctataggtgtcgttgggtatggttggttgtgaacctcaccccgaggtgtgcaccatacttagtccttgttaaaaggagtatgcattggacaattagcgagtgagctactattagaggatgtgatagcttcaacgtcagtgttgcaagggctacttagttgactgaaggggcattgtgatggactcagagaatttcatgtaggaggaagtattcaagtgcagaggcactactccatgggtgattctgaatagcaacagtggcataggttctttgatcaagtccaagagtgggcgagggagattgtcgccaagagggtcgttctacagggatagaggaacaagtgcagacttaggatttagatgaagcttggagtaatcttaggggtcgagattagaaagttttgcctatggttcgtcgatgagggcatcaacatgttgaagtgggggagaatgtaacatgtgagccaagatggcacgatacaagctaggcggtgcccacaaggtggccaagtggtggtcaagtggtggcgcatattggtgtgcctgctggaggcatgctgatgcttagtttgtacggtagtggtatttttataaatatttgtgtctaaatcgggataagacttgatattcaccatttattcgggtctatgaatacaatggtagaataggatttgagaaaatctatgatttggtatatggtgatgaacatatgtctacagaaaaaaaaaatcatatatgttcttggtaaaatggctaaaagcttagaatgctccttaagaggtgagtacctggtgtcagctctccaccaccccctagaactttggtgttaagtgcgctactactattcagtaggactattagggcaggaatatgaggaccacaaggggactcatatgtctccatgagttagaatactcatggacactattaggccaacccaatagtgcatctaaaaatactgccataggttagcaggtacatttctattggcttgccagtatggcacttgcataggacgtggcctaaacctctaagagacgttgtggtgttccttggctatgaatctcaacgcgagatgacacgggtagtcatttgtgggctagtttgcatatgcgcatgggacggaagcaccatgcttgaaagaaacagaggtctaacttatgctactagattagcggcttgtcttgagggcctaccaatatgtgtggaggcatggtgccttgagaattagaccatggacgtataggagtccttgggtgatgagggagattgtatgaacactatcgaatgaggcatgattagaagcgttggcacgtcagcttagtgttggcatcttgccacttatgctaacttggtcacgagtgactaggtgagcgatggtgttgggattttccttttcatagtggaaacctatggacaatgcaagtatctttactagagagattcgatgcatggatgcactcatgcatgttagcaagtatgactcaacgagagttgtccaagagacagaactgtgcacgaggcacatggtcgcgtgaaaaaggagctcattattacttggatggtttgaaggatgaccttggcttagagaagtcaaggtaccgcacgtgtgttttgctgcctgaaaaggtaagcccatgacactcggtaggcaatagtaacttgtaaagtgtaaggctcgttaagaacaagtctatatttatatttatattgaatctttgagtctaaatgaaacacaaacaattaacaaatgtagaagaagatagaaaatgaagaaaagagaaaagaatgagagaaagatcatcaaagagtgaaaaaagagttgtattacgagcttaatatgaactagattatataacagagtagtatcaagaattagttagacatagctggacaaactaatgtgaccactaacttactctttcgaataacttataaaaaactctcactacaaaaaatagttgcctttagtgacaaacttttagtcacaacataatttttttgtgactaaataagacttttagtcacaacaaaaagtttcttgtgactaaaacatagtttttggatacatgaccgtcttatgcctctccacacatggccgtctaagatgccctattttcttacagatccaacatctaagattcttttgattatcagactgtgatttagatcttgattttacttttgaaccttcgtgactttttctttctcactattgccccttgtatagaatccatcactacttccagaattctttgactcactcttttgattcagctctttcgaattcaaagctgattgcacatcatcgagtgtgattgactctcttccatacaacattgtatctttaaagtgagcaaaggactttggcaaagaactgagcaataacaaggcttgatcttcatcttcaatggtaacaccaatgttttcaagatcgagaatcaactagttaaactcatcaatctgctctccatcatatttgtcttccatcatcttgaatgaatatagggcctgttttagatataatctattcaccaaggatttagtgtatagactttgagtttcaaccacacatttgcggttgtatcttcctttgcaacctttctcataatcttatctctaagatttaaaatgatcgcactatgagcctttataagagtctctttcttttcatttttatacatcaaatcaggtagatacttctctcccaacagaacctcatacaatatttgatgaaccaacagatcattcatcttcatcctccataatccaaagtcactcgtactagtaaactttttgacattgtatttcgcgacagccatgattacaaaccaagctttgataccagtttgttgtgcatgattcgcttggaatcaaaatagtggtcaccttaaaggcggacactatatttgactagcatgattcgcttggaatcagaagtgtgaggttgacaaatcgcttaatcttcatacaagattaaaacatgaatttcgagaattggaacataagctttcttagtgttttactcatttatggtaacctatcttaacactagtaaaaatcaattcttaagttcaatatgtaataacaagtcaatagagtgaatgtggtactcaattgtcccatctatggataagtacatgtagtgaaaattagaggattaaaccgaaaggtttttttaatggagcttaagcttnngaaaactcacttaagcttaagaaagtttctaaagagttgtgagacactgaaactctacatgtatggactaggagtggtgccacctcttatgagaattgagagttattctctagaaagtctatatattagatttgtgcacatggccattaacggtacaaaatcaaatccataagcttcttgagtgagcatagcaaaggtgtgtgtgttatcactgatttgttatcaaagaatagtagtttaatgctacgttaaccaaaatttcagcaaactttgtggtaattacactaatataaaattcaagtcgaaagacattttacactacgcacaaatataatagtttctattagagtggagttatttaatcaagtggaggaatattttattactctataatatatgtttgagtaaataaataaaatattgtgttacaaaattatttgctacaaatgagatattatttaatctagtgggagaatgttatattattttgtataatataatatttagattatataattaagtcacaaatatttaagtgtgataaattattaattttgtcaaattataacatacattatggagtcacacaagagttacaaaatgtatgtagaatgatcacaaaataagagttgcagatcctttaatttgataatcacttgaatatgtaattctcacctcttttttactctttagtaaaaaatattacaaattgtttatgaatgtgaatgaatgatatatattaaaaatatagttgttaaacacttgatttattcatttataaggtgtataaatgattcaaaattaagtaggagtgatttagaacattttggagaaaaattagccaaagctgaaaaaaaaaatggtaactagtaactaggtactatttttttcagcatacaagtgcatatatttttgaaagtctaagagtctttctaccagctcaaaactcctctaaattacccaattaataccataaatatttatccaatagctttatagtggtcattcatattcatatggaagtgaatatcaatctatatatctatatatataaaggagaaatatgaggcggtgacatgacactc

SEQ ID NO: 44600 - DNA, 2577 bp, Cannabis sativa
  modified_base (2509)..(2512): a, c, t, g, unknown or other
atgacccacaattactaaaatgatcactttattttgggtcaaacttcaaatagcaatacactaatatacatatgagaccatattgaaaattttaaaccaacagttgtttcttgttgtaagaaataataagctgcaagttggactgtgagcgttggagtctgattgcagtagtatgcatgtggactgatcattggggagaagtgttatgtaatggacttatttatgggaatgttttgtaagaaaatataatggagtaaattttagaaattttgagttaaaaaatgctacggtttcttatgtactatatattttaaaaattaagtgtgtacacaaggctataagtgtttttattagagaaactttccgcaactaagatttataatgaaaaaagaaagaaaatcatagttttttgatattggtttgtggtaaaatgttgggttcttacagtaggttcacacaattgtactttttgagggtgcgtaatatgtgtgaaaggtgaagtggtgaacaaagcattttctattattttttttaaatgagactcaagctggacaacacaaaataaataagttaaaatataatgttacatttgctaatctttttcatgtctagcaattttttatgattattaatattggatatgaaaaaatcttcatcacactttcatgtcgtgcaccaattaagttggatatgaaaatttccataacactttcatatcgtgcaccaattacgttggacataaaaatctccataacttataaattttatattatagtgttgatgggaattgagagtatagattaaatatttcataatattattatttcttatgtaattcagaattttaattttaaacaaaagagaagaaacaaattatcaaccttcgctaattggcatagaaatcagtataagaataacaaagagataatttggaacttcatactattttatttttgactttcttgttgtcccaagaaccatcttgtgtttgaattttaaaggtgacttccacgttataccaagagccaagattagtaatgtttagggttcggcaaaaattatatactaccccatccttttgtggagaccaatgggtatcaacaactactcccgttgagttgacataataatgtctattcttgaagtggctgtaagtggctcttggcgtttttccatctaaattaaaaatagataatgcatattttaatagttttagaaatgaataatatgttgcaaataataaaatttaacaaaaagttaaatattataagatatatgaatatattacctttatataaaatgatattgatattagcatagataattaaaaagtaattagataataaaaaaaaaattgtattttacttttcaatctttgtttcgaaatgataaaaatattataatttcacactaatttaaaataaattttgatcctatttttttttatgcggtgaacaaagtcacatgattaataatacagtaaactataaatggcggtggaacttccttgaaccaggatagctcatcgcagggccgaccctgaaatttagtggaccatagaaaaaaaattattttggacccttaatagaaaaaaaatctggtatttttcaaaatcagtaaacaattattgtataatttttaaaggaaaattttttttgggctcctgggctaggtgggccttaggcacaggcctagcccgcctatgcccaaggccgggcctggctcatcgtctaaccgaagggtatattttgtcaaactatgagttgcaaaactcttattgcaagccacatgggacaaaactgcctccaaaaattaagacaataaagttataaagtcttcaaacaacactccgtcatattgaaaaaatatcttcccattataatagttgtcgtcagtcagaggtagcgaaactgaaaaaacataacaccaaaccaaaaaatatagttatattagaatgacaatcttcaaaataaaaattaaaatacaaactcaaaatttgaacccaacccaaatcacaagctcaagattactaaaaaacaataaaattctaagtataactatccaaaggtattactctttggctagtaagaacatattattactctacttaaatttgctgaaaatcaatatcaaacagattatatttaaaattaaacttatcgaaaaattctctgtaattataggccctccacaaaacaacctacaaaatataacaaaaaataaaatttaattaccacacaatataatgaaaaaagataatgtgaaagatgttagactttttatgtgggcttacattaaattttatttcttttattaaaacctaggttgattggatagttctttgctgtgttagcccatattattggtgatcaatagttaatggacttagcatctgtgtgtaaagtctaggtgaaacagaagtgtgagcttttctagttgattgaagcttttcatgagcagggccagttcaactagggttatgtagctaagtcccctccctaactctatnnnnacatattgcctcatcacaattgtatacttttgataattagaaaaataaaactgcttctaatttag

SEQ ID NO: 44601 - DNA, 4774 bp, Cannabis sativa
aaaatattttgtcaactaacttgccaaaaaaggactttacaaaaaacaatagagatttagaatttgtttttaaaatgaaatatatacatctcttaggtagaaaatctccctaagacattgagtttgagaaaccactggtctctggttgtttctttgatcctgctagtggagtgaaacagtggctacaattcaagtttgaaaaagtgagatttttctgttataactgtggtgtgcttggtcaccaacgcaaatgatgcaaattatccacacctgtaatgatcgtgaacaatgaagataaatcttttcccatgtttggaccttggctatcaccctcctttgcatacagagatgtattttctggtccaaaggcaaatgatgtccgtggattgttggccacgacttcgagaatgaagactcgtgcttttcctcctatgaaggcagtcgatggtactggtggcgaccggttgaagggtcctgggcttctccctgctcgtcaactgagacgccagttgatggtgaccacgcgtgcccatgattctacgagttctgagaaggcttcgctggcagtgtggctccccaagcctctttttgacctccctgttcaggcaggggctccaactggtaatggaggcaaagggggtcagttggggggagaaaagaatactaaaaattttgcttgttttggcgagagagggacatgtatgtgcctcaatttcggaaaaggatataaatttgaatttggaaaaggatggtgggtttagtttgggtcatgtgccggttgtatgtggtccgcttattcctagtgggcctgtgaatggctccaattgtgttatgaggcccgatggctttaataataagcaaagtttaattgcttgtgaaaatgagggcccacttcaatcaaatgatagcattattttgagtgacaaagttggcaaggcctagtctactcgggcaaggagggtcaaagaaagttgagggtaatcttatgggccctgtttgtgggcctggagccgagccaagtcatgatcaagaaagggatttgtctcaattttttaaagcccgagaaatattacttcatgatcttaaatattttgggaagatggatttgtatgagataaagaagttgggaagcgatattggagtggtgcctactttggaaactaatgagagaactacgccgtttaagaagcgtaaatttgaaggctctgctttgatgtgctctagacctcagaaaatactcaaaaagcaccctggtgttgttcgtgacttcccgtgggatactaaggaacgggacattgaatctaaggtggcctatgaataaccatttgatgaaatttcatgttccccaagttgctctgatggaattatgatgaaccctctggttggttcttttgtgattgaagactctagatctagcttgtttgttcactctcatacccctgtggaggagaatgtcaaatctcttccacaggagccatgagagaggttgcatggaactgtaaagggttagggcagacctctacagttcgtgaattgaagtcccttatcagagcgcgctctcctaattttgtgtttctgactgaacttaaagtggatgccactcccctggtacgtatactaaaatctctccatttttattttaatgttaatattctacctattggcactgctgtgggtattattttggcgtggaaatttggatttagttttgagtgtatctcgtgttctcgcaacgatatcactggccttgtttattcggaccctcctacccacccttggcttctcttgtgtgtgtatggccctccttaccttcatgctaagaaaaagttttggctgaactcatgaacattggggatggtttgggggtccttagttgatcttgggcgataccaattttgttcttagtgactctgaacgataaggggcatcaggaagggacccttttatccctttcatatctaaccttgttgactctcgaggtcttattaatatgcatattcaaggtgataagatgacttgggataaccaccaatctagcataagccatgtgaaatctgctcttgataaatggagtttggcttcagcaatttcctagagctattctctgctcctcttagacgagtaactcggatcatagaccattatgtctaaacattggtgggcaggaatccaaatttaaaagatgtttcaagtttgaagagagttggacgagggatgaaagaagcaaattagtgtttgccaacgcttggggttcggttgatcattcttgggccctagctcgcgtcttcaagaaacttggagcgactcgtgtggctcttcttcattggaatagaactcaatttggtaagattgactgggtcattaaagatctggaacttaagcttgacaatatatagaagttacctgctagagcccgtgattggaacatgaaatgtgaaattcgctgctccctaaatgaaattatggccagaaatgcgatttactaggaacaacgtgcgaggatctcttggctaaaggatggcgataaatgctctaaatattttcctcttagctgcaatcagaggaagaagaaatgacattgaaagtatattaagtaaagataatgtctggattaatgaccgagagttaattggccttgaattcattgacttcttcaaaagtatcttctcaggatccgattacggacgggctattgattgcactcagttattccatgagaggatctctcaggaggaccaggagacgattatttaatgcccttctcgtgatgaaattaaaactactctttttgccatgagcaaccacaaggctccggggccgaatgggacgtcagtactcttttttaagcactattgggagtgttggcgatgatttttgtgatgcaatttctaatttctttgttcaaggcaatatgcacaagggtataaatactacgaacgttgtgctcatcccaaaaagccagaacccaaaaagacctaataatttcaagctcatatctctttgcaatgtgatgtacaaagtcatttcataaatagttgcaaatagaattaaacctatccttccttctcttatctacccaactcaagctgctttcgtcccgagaaggaatattcaagataataatgtgattgtgtaagagattatccactctttcaaccagaaaaaaggcaaagaggggtactttgccattaaaattgatcttgtcaaagcctatgatagtctaagttagaaattcattgatcgtgtccttgattgttttgaatttcccacagaagttccgcaatttggtttccgcaattattttggaaaagtgttgtgaaagccaatacaattctaagaaaaggggcctgtgaaatggtatctaataggagggatactagtatctaaagggatccctggattcctcattgtaaaagtttcgtcccgaaaccaaatggtgatgttttaacggatcacaatagtgtggctgatctcttattatctagtggaggttgggatgtccaaaagttaaatagtctttttgatcaagagactgtttctacaatcttaaaaggtggcaacccctcgggtcagggtaaagatagatggatttggaccttggaaagcaacaggcagttctcgtgcaaatcggcttacctgacacaggctttggaaagagcctctcactgtgaggttgctctgtcgctttggaatagcaaattttgtagcgtcataagattctttggtggtgcatcctatctaatgcgctccctgttagatctgagattggaagatgattttagattgaggatacaagttgtccactgtgtgggttaagggatgaatctattgaacatttatttttttcttgtgaggtggcgctacacttgtagcgatcttcgccttggggaatctaccctgtttgtaatactggtattagtgtttgggactgggtgaaattcatttgggatcttagaaatagggggatccgagttgaggacgtctttctttatgcttcaattgttgttgacactatatggaggatgcgcaatgaaagggtacacaataattctcctcttgatgtgttgaaatgtattgaccaaatttgtacttcttttgcagagttacatgcttctctcttgcccaatcctacgctgatcttgagggaaacctggactccacctcctcaggattggataaaaatgaattgtgatgttagagtgggcttagagagaatgtgcacatctgttgtagcaaggaatcatctgggtagggtgatttgggttcacacgtctcggttggatttctcggatgcgttatgcggagaagctgcatcctgctgtttggctgtttcgttggctttggagttagggtataagtatgttattgtggagagtgactcgagactagctatcaatgctctcaataggaaggtgttccattaggctcttgataattacgtctccttttgtattaaatcctctccctcttttaatagttatatttttttttaatgttagcaggacttgtaattttgttgtccataatgtggttaagtgggctttcacccaccaattgtacgactctattttgatctcctccttactggaggatctattttatagtgatcgagaaatctaattgtattttctgtctaatgcatgaatacgctttttttttttttaaaaataggtagaaaacctcccatatgtgaagaaatcaagtatatatgaaggtggcgctggcccatatcaattgtttcgcaaaacaatactttgtttgctgagctcacccc

SEQ ID NO: 44602 - DNA, 2701 bp, Cannabis sativa
aaaacggaaccagagtttaggtagtttagccgccaaaaattcggtttttgtggttaagtgttacaaattgtaaagttcaggtggtttagccgccaatatcccttaaaagtaataatagaattaattttcaatattttcatacataacgtgacatcaatcaattaaattttaaaataaatttccttaaaaaaataaatttgaaatattaagaaaaataggaattttgtatagggtaattaatctatatatttatataaagaaaattccaaaaagtattaagtggtattctatatgttttttttttactaatttttgaggcattatatgtatttataatgctattgttagggaaaatgagatggcattctaatttttgttctttttacacttatcaattttttccatttttttaattttttgctaacttttattttttttttaatttattaatattctattaataatagtctaaacattgttatatattgatattcatttattatagtactcatggtgttggagtttgactcaaattatttagggataattatataaggcaccatttttttttcaaaaaaattatatttttatgtttaaatatttttttttttacttttttacaggttttcataaaaacaacacgaaaacaacaacaaaattacataaaattaatatgaaaattggataatggtgtgcctaaagggaacctcctatactatgacacgactgactggaactttttagaataccttctgactggtttgaacttccctaccaagttcacaaattggataatggtgtgcctaaagggaacctcctatactttgatgatgaaagggcggcttcaagggaactttaaagggaagaaaggtctaaggcaaggtgacctgatttcacctttgctctttattctaataatggagtatttgactagaaggctcaaaatgaaggtctagctatttaagctattacattaaagtgacttgatgacttgatgacttgcttaaaagtctaaacctaatcagtttatgttttgctgatgacttgattctcttttgcaagggctcaaaacaagttgcacatgacattaaagtgacacttgatgattttagcaaaacaacaaggctggttgctaatttagctaagtcccaagtgttctttgggggtgttcaagatgcagataaacaagctattttggaagacattcagctagaggagggtaagtttcttcttaaatacttaggggtccctatgagaccaactaagttgaaaaaagtagaccgtgaaatcatcattcaaaagataaagcaaagattgatgacttgggcaactaggcacctatcctttgcaggtagaatacaacttattcattctgtgttgttggatcttctaaactactggatgaatattttcattctttctcaaagcattgttaatgaattggagaagctctgtagggatttcctgtggggagttaagggtaacaggagcaaagtacacatagcctcttgggaaaaaatctactatcctaaatctcatggagggcttgggtttagggatagtgctaactggaatagagcaatttttaccaagtatctttggactgtgatgaacaaacatgacttactatgggtcatgtgggttaatgtggtgtatttgaagaacacaaatatatgggactacaatcttaccacggatgtgagctggtactggcaaaagttgtgtcacttaagggtaagatttactgttgcaactcttactgttgcaggtaaaaatggtaaaatcagtctagctgttgtgtataacaacactttgcaggtgggaaaagtctgctataagcagccttccgaaacatatgttcatgttaaggcaggtggttaataatcaattgctaaccagggataagtttttcaaattcaaattgctctggaaaatgttaattgtcctatttataatgctgagattgagagccataaaacctatactttgaatgtattttctcaaagtaagtggtaactgctgtctttgattggctcggggtccaggttggcctttgaattttgatggttggcttagttggtgttggaataggggcaaagggcagagcatgagcatctactatgcctatcttgcagcgtgtgtctacaggattggaggaaccaaaacaattgtatacataaaaatttctcttttactactttgtatatagtcaatgaaattaaagttgttataaaaaataggttgtatagcttacaaaagaaaaaattgagtctggatgttaggaagatgatttcttttctatcaaattgattgattgtaggctattgtgagtgggctggctgtttgacttggctggttgtgtatttggtggttgattaatgaaatcctttccttgataaaaaaaataaaataaaatcaacttaaatattaattttttttatttaattaaatgtattaaacattagaaacaaataattaagtatcttgaataaaattaacttaattattaattctaatttaatatctaaaaaaatactctactttaatttgatataaaattaattaaaattaatttctgattaaaatttatttttctaattaattaaatattagaaaatataatttagttactagaaatagcaatctagaatttatttcattaaactaagtgtgtatttctaaattaatttaaactaatcta

SEQ ID NO: 44603 - DNA, 1818 bp, Cannabis sativa
attataccaataacagtgtgacaccaagaaaagtgttaagaaccaataataccttttaacaattctcatgagaaagccatacacaattacttcaattaacggttggggtaacacttactgaaattgctcttttaagtttgttttttggtccttgaattgctctttttaagggtttttgtttatagtgctacatacacacacagaaacagaatcactcctcgatgttccaaaaaagtagatagataccaccatggcagaagagattcttaacagtttttctttttttatttctggctccaaattaaagagaagattctcaaacagtttgttgacattaatttttatctatatataatgaataaataacttccctaaaagtttaagaaggcttatttattaacttggttgttcctaggcaaacattatttgtatttttaatatatatttacaccaaaaagctagcaatgtctaaatctggtaatctgacatatatattaaatccagggcagttacttatgagacataaaaaaccctattacaaaacaaaaagaaatagcattattattgatctagctcagattcagataccaaaattccttcttagttaagtttttgtataaataaattaataaactcacacaaaaatccaaaaggatcttgagaaaagtagatcgaatcaaccatgcatgtggaatatatttatataattgtgtgtacatatatatttgagaggtgagtgagagagagagagtttggaattgtaaacacaataatagaaattaataagtgttgatcaataggtcaacagcaatggggttgcttctacttatatgtgggaccttaggcatataattttagggccaatagtgcctaattaagagcatttccaatttgaagtggtcttaatttcttatatgtgtattttcatcaatattttcaaaattagcaatagccatgtcatattatttaatttttttttaaaaaaaagttactctatcaccaactaattttttgagaatatatattataaaatttaattaaaaagtggtatgtgagatcatagtgagcagcttttcagattatccaccattagagtaatttttgtaagaaaatatgttaaatcttatttggatgagaggaaaataaaaaaatatatatttcttctatctcttctggaatagtgggaacttgctccttaggtagacgcactccatgtctagaaaaaaaatgagcccctttggagtttttaatagagaagagctctagcactttttcaacgtaaattgcttacgagaaaacaagtgatctgtttttcagtctctaacaatttggataccgataacatagctaacttcacccaaatcatttagttcaaattgagtgcttagtcattcctttatatctgatgtcttcttgatattgtttcaaatgatcaatatgtcatccacatcagttatgaaatttatttttttgagaaggaaactgagaaattctattaaaaggcatcaaactaaaagatcgagatacagaagataggcaatttaaacagctaaatcagcgggcaagctcggccaccatacccgaacctcatctaaatctaatgctcgttttgctaaagaatgagcaacatggttttttgaccaattacaatgcgacagggatatgctactgaaagaattcctaatatgattaatatcattgagaacaataccaaactcgttgagataagggaccttgctattgacagcaagaactacccgctgacaatcagagaaggcagtaatcaccgtataccccatctgcatgcagcaagaaagc

SEQ ID NO: 44604 - DNA, 2747 bp, Cannabis sativa
  modified_base (2710)..(2722): a, c, t, g, unknown or other
agcgtacgatctttgggacagcaggctgtattttgtatagttgttagacgaaaacttttatattgaatattttttaactcagctgtaaatattttaaactcgggatcctggttatataaatgttatttattttcaagttaatagtaataaagtaaaaattttaattattcacgattttcaataaacgcgttgattagcaacggactacacaaataatataaaatcacgataacctcctaaactagtagggtgttacaatttacaaaattcaaagatatagttataggtggttataatagcctattttcaaactttattaaatattatttaattacaactaacctaattgcactaatttttgtctagttaattaggatatttaaaaagctgttttaatgaaaattttaactatattttaatttcagaaattaatgatttataatttattgtcttgtggaatatttttaaatatttctattattaaataattaattaaatttgaattatttaattacaattaattaaagacaaaaaaaagtttaaaattaagttatttaaaattaatttaatttttaattagaaattgtgcttctaattattcggtggtggattacggagtatggtatgaaatttctaaagctacatgaatggacaacaagaaagagacctagagagagaacaagaagagttcttctttttttgataagtaagaagagttcttgtttatttctattattccaagtgttgtaatattaaaaatactcaaaatttatttggttcacatttcatttaactttgttaattatttatttactaatagttgattattacatgcctatgtatatatatacatttgtcatatataaaattctacactgtttatttttataataatcatgcatctcattttagaaatataattgttaaggattgtcctataaaatgtatattgtatttagtgaaatgaataaacataaaatactagattatcttttaaatagtttaaataacttggtaaatcacaccaagtgactatctcctatagttagtcacatactttttaaccaactttattttcttaaataattttcgattttttaaatatagtattaattaaattattttcaggactatattataataatttaattaatgtattacaataggctaaaatttggaaattaaaatctttttcgaaatgattttaataaaaaaaaacacatgttttaaatagtgagtgggagaagattgtcatctactatgaaactcatggtctccattattaaaccagcaccgagagtatatggagggtcttgagacgactttattttcgtccccttaaagaagttgttgaactatacattgtcaatgttgatttcctcttcaggataggacaaagtaatgtattttagtgcgataccgaccctaagacgatattattaagttaaatcatggaatctgaaataatgagtaacacttacaaagtaatgcccctgtctttgacgctaggagacataacttgactaaacaagcgtttattttgtaaagaaaataagagttactctagttacaataaataaagataagaacatgtcttgtagattattcaatattaatttgaccaaccttatggcgaaactttaattgttggataatcttatcataaaatttttaaattattttatgtattttaaatgtgcacatgcatcatatttagattctaaatttgatattatactttttcatttatagcctttatattgtatttatctcatattgcttacatctcgctttattttaattttatttcagtctaataataaaatggcacgccaataatataatgttaacaattatccctacaatatggtaactgtatttgatggtgatttcacatccgactggagagcagacattgaacttctgcttctcaaagagattttgtatgaattagtagccgaacaagatctatggctagaagtatgtgaataatcgggtcatgcagctaggaatgcctttgcacaaggcaagaaaataattgacgtgcaatccatatcttgttgatttcattcaatgaagagatcagtgaaagatatgagacttttgtctacgcctgtgatatctagaaggcacttcacaatcagtgtggtgccactcatgaataattaattggtaaacaatattatattgaaatgagttttacttagggcataaaatcccaacggtttatagtgtcaaaaataaaatttaagcatgggagaaaatttatcttccaaaggcttatggtgggggttttcaggaaggacttaagtggaacaaagctattcttgctaagtatgtatggccgataatggaaaagcacgatctgttatgaatcaagtggattgattcaatatatctcaaaggttctaaattttggagctatgacttgaaacaaaatacaaactgatattggaggaaattatgtttcttgaggcaaacattcagcaagaattgtattcaagctactggaaggaatggtaagtttaaagcttctaaactttacaatagtttgttgcagcaaacccaagtgacttaccagaaagctgtctagtgtagaatgagcatttcgaagcatatatttaaggtttggtaggctgttaattctcacttgcttacacgagatccttcctaggttttatgttgaaaattattttaccaggatctagannnnnnnnnnnnnatgttgtttaacatcctaatatgaa

SEQ ID NO: 44605 - DNA, 2153 bp, Cannabis sativa
ttcacatctcatcctctggacccatctcagctcccacagatttgcatactcccagtactgaaaacactggctgtgttgtgtctcaacaagatactgaaaatgctgagtcaacacttccaaatgctgttgtaaatcccactgctggtactccatctgctactattgctcccactgcaaactctcctgctgctgttactcaaactcccacgatcaactcgcatcatatgcaaactcgtggaaaatctggcatcaaaaaaccgaaggcttatatggctgtcaaaactcctagatcagtaaaggaagctttacaaattgagcaatggaatcaagcaatgtcggatgaaatgcttgctctaattcgaaatgctacctacacactagttcctctccctcctggtcgagaacctattgggtgcaaatggatctttagacacaaggaaaactcagatggcactcacaacaagttcaaggcgcgtcttgtagccaaaggctttcaccaacagccagggttcgacttcacagagacgtttagtccagttgtcaaaccagtgacaatacgcattgttatcactctagctttgtctcgtggttggtgtatcaaacaactagatgttaacaatgcgtttttgaatggtgatctcaaagaagaggtgtacatggtacaaccccctggattcgaaataccatccacacctcctctagtgtgcaaacttcacaaggcattatacggcctcaaacaggctcctagagcctggtttgacaagttgcatcactgcctaattcagttgggattctttccttccaagtctgatcactccctcttcattcaacacacttccactcagacaactctggttctagtctacgtggatgatatccttgtcacaggtagtgatcccactgtggtatcaaatttaattgcagctctcaatgccaaattctccttaaaagacctcggtgacctccattattttctgggcattgagattcataacacatcatctggtttgcatttatctcaagcaaagtatgcacgagatttactctccaaggcacagatgcacgatgctaagccctgctcaactccaatgactagtggacttcgtctctcagctcacggtagtgaaccaatgtctgaacctcatctatatcgctcaattgttggtgctctacagtatttgcttatcaccagaccagatctttcctttagtgtcaataaagtatgccagtttatgcataaacctctccttactcactggcttgctgtgaagcgcatactcagatacttaagtcgcactatctctcatggattgcatctcaaaaggccacctgatcttgatgttgttgcattttgcgatgccgactgggccactgatccagatgaccgtcgttctacctctggattcaccattttctttggcaacaatcttgtagcttggcaatgcaaaaagcagcacacaatttccaggtccagcactgaagctgaatttcgaagtctagcaagtactgtggctgaactcacctggattcattctctcttcacagaacttcagattcaccttccaagaccacctgttgtgtggtgtgacaatctcagtaccatattgcttacagcaaatccggttcttcatgcacgtacaaaacacattgaattagatctgtattttgtgcgtgaaaaggtactgcaacaactggttcatgttaaacatgttccagcaattgaccaacttgctgatggtcttaccaaagcaatctctagtgaacagtttccctcctttcgttccaagctcacaattcaagatctctcctctgctacagatcccttgaattgtaaccttgaggggccgtgttaagggtatttggttgttagtacagctggcattcggttagtgacagttagttattactgttaggtggttagcttgaatctgttagagtttgttatcctctctgtaactgattctctttctcatcttcattatgtcactatataatcatgtacaaccatttaccatttcaatagattgctctttggtttatcaatctctctttacttttctttcaattctttcctctctctttcgttctggttttactctgttctgttcttgttcttgttgttctttgtttgatcatggccaagagattcaata

SEQ ID NO: 44606 - DNA, 1925 bp, Cannabis sativa
gttcctactctactcggcctaactaacaacttatgcctaaccgacacacaactctccctagcataattttgtccaagaaaattgagtgatgggttgtaaatagggctcttgtgtgtttgatcaaatgtttatcaccacggtcttcttttgtgtgttgtaatcttggattggattggtgttgattatattcaataaagttcatcattttgagctaagtttttctttcaatttatgattgatttgaatgtggtgttcttagttgttattgttcatgacaacaaaattagtttgaagtttttactacacatatatacgtatctaatttgccgaatggaaacttcaaacttcatgatgagcagcctaagaattgctctttgaaaaattcaaaggctgcatactttgctgatataaggcatgcccattataatatttcaaggctgcattacgatcaaagtgttggaagcttgcaaattattgaaattttagtttgcagaaagatgaaagtgttgatattgaattatttaacttaattcttcttaatggcttgtgttgaattgaaccccatcgtaagcaaggacagcttacaataatcctccccacacttgatcactcggaacaaaccaagactcaattaaagacactacagttggatccaaaataacttaacagatcctatgtggcataactaacccttgctgccactcactttccctcaaatgacttcaactgaagcctatgaatacatctgatctcattgataagagtagagcaagaagttctcttcaagttagtgagagaagctctaacaatccagagaaagtgagttagtcaagtggttttctgcaagaaaggagagaaaccaaactagattgtaattgagaagatcattgagactatctgtcaaagagtgtgacaagaaatctccaccattattgtaactgtccaagtttggattatagtggaaaagagcttatctggatgtagtccaaagtttagggtgaactttggcaaaattcttgcgtttgatctctatttttctagcttattcatcttttaatttctgttttgattgcattacatgtttatgtcaaagattgattgtttgcatctttaattcattagttcgaatgtggttcttgatcaaaatcatagtttgaattaacattaacaaattgacaattcaatggacatgttttatgcaatttggaaattgtctttgtgaaatctattgctgcaagatcaagattgatcggctggtgtgtcttgattagttttgtgagttgtgtagggattcaagatcaaattctaatagcttgagtaaagttaaaaaatcaaagaaacagttagtgtatactgcagttgacttgctgagaggatgaactttgtatcgaaaattgatgccaaggtagataagtctcgccatttctactctaaaatttctctggaaaattaatccctcaaatgtaagttatttctactccaaaaatggatcgccaacacgttcgtcatgaagatgaccatggaaacaaggttgtggtgatttctaccttgccagccagccagctcggcctaaagaatgttgttgggaagccgagtttttgtaaaaacagttgctgttttacaactccacctgttttgcttttggacttttatagctcagaccatagagctgtaaggattattatttctcacatgctgaagcgcctagccaaactccacatctaactaaactcgaaagttctgagattgttcttcactcatggcaaatcaataatgttcttgacgattacaacaacgacattcttctaaatttggacagatcaaatgaaccctcagtaaaggcatcccatgagaaagttacagccctttcgtgactcaactgccaccacagaaatacattctcggaatttattgttgatgaattg

SEQ ID NO: 44607 - DNA, 4041 bp, Cannabis sativa
cttttcgaccctatcggtccaatcggacctccacgaatcggaccatcggacccatgcaacttgaccatcggacccaacctgtcggacccatcggacctatcgcacccatgcatcgggaccatcggacccaacccgtcggaccatcggaccccatgcaacgtgaccatcggacccatcggacccatccatcgggaccatcggacccaacccatcggaccccatcggaccctcttcttccccaatggtttctcagatccgatcttcttcgtcatcatatttgatctgcaaaagtatatctatatatatatgaataattatatacatatataacgtacaaaagtatatctatatatatgaataattatttacctggacatattaataaaaaaaataaaaacttgaataaacaattccaagttgttaatggaatgacagtgagtgggtaattttggagagagagagagagaatgaatcatatctagaaattgggttggggttgggatcgggtgggttgagcgagagtgagttgagagagaggaagagagaggttgatgagattagggattttaaatgtgaagggtatttttgagaaattagtaatgtggtcatatatgaccaattttaataactatacatttagggataaaattttaaagtagtgtaagtatggaaattcaaattttccaattaatttttgatatccaaattccatgatagcacattcctaaaatatccctagacaaaggagtgttaaaatcatgaaaaggaaaagataaaaggttagaatttgggaataagatgaataagattctatttcaaaattaattagcaataaaaaaaataatttattcatcttgtgtatcacaatttattttcacacatcagactagctaatataaaaaccgctataactatcagtatttatcaccatcaactccactaaaaaatcaatactacgtacatacatagtacgactacaaatatattatacttatatgtatacaaataaataaaaagaggaattgataccactagcctttccaaataataaaaaaaaaaaaaagagtttcaaactagaatatcaacttcttcttctttttttgtttttttttttttcagaaattagaaaatcaactttaactcatatgattgtgtgagttagtacgagagtgtacaattaatgacaagtttttcttttattctaactaattgactctcttctgatttttacttgtgtaaggacggtgacaatgatattataacaatactaatactaatttttagcaaaaaaacaacagtaatatataaataatagaagaagaaaaatgaaaaatgcagatttttaaaaactgaaataaaataggaaaaacaaagatgatatgtcggtgattaaatagattgttgtttgttttttttttttttttttgaaggcaaaatagattggttttttaatttattattatcttaaaataaaaaaataaataaaaaacaaaagaagaagaagaagaagaaattgagagaattgaggagaaagttgctcttcttgtctgtgacgtgcaaaagtaaaaagaatggtcctcatcatttaactatagtcaactaatgactaatagtaagtaatactaataactaaccgtttcttaattttgtaattactacgtacctttgtatctaaaatttggacctctccctaaaattatgctctttactttgacaaattatcataaaattggtacaaaccacacggttttacctattttgatactactaaagagaataataaatataaaatacgatagaattagtatcattcgagaaattctatgctagagcactttaaatttgaattcaaacttaattaatttataagaattaatacaataggattaaaaaaatagcgacagtgtatcggagtctataaaattaattttgtaatggtacgatcttccaatattacagtgaaatctttctctgtaacttttgtctcttaatgatgggatttcaagagaatgaaaaaatatgatattgcaaattagggaacattacgtgttatattaccaactcataaaacagttgttatactcaaaattcggctggaggacacgtgtcaagataaatggaatgtaaatcggtgtcgtatctttttatggaataactcattaattgcgtaagtactagagtatatttgcaacacgctgactgtaaggtcttaggcgaactagtacttagtgtattaacgagaaaccatatgtcgctaaaggtgaatagcgaggcactggagaagagtaacacatacctaagcttacaataagtagaccatgtgtaaaagtcagatcggtcgaagaacaagaatgcgagaagaccatctcgctacgagaaagcttcccatagtttcatccaactaacggaagcgagactcacaaccctggaaagtcaacagatttccttatattcgcaatcgacgtaaaacatatcttgtcgatctcggatagaagaatggttccaactctccattaggatcactacaatcaagtttctgtcgagacatcttcagaatcaacaattaaagacgtatttaatacacgatatttctgacccagtaaaagcgagaaaatcacagctatatgattttcaaagtcatgcaccgcatttacattttgtaatatgtaatcaattcccacgatttaagggataatgactgtaattacattttagtcagccttgtaattaacggccactatgcaattatagatagcaacaaacaatctcaaaaaagggacgaaaaaactcttatacaagaggccctaaaaaatatactcaaaaatctgaataagattaactcgtggactatgcagagttttaactgcaaaatcacgtaaaaaacccggtgttcatattttatttttctataatttttattatttctgtgttgaatcataatcgtgaggctcagatttggttaacgaaaatctgcgttaatcatttggtgctttcattaaaagcctctgtgaaaaaacttagaaaaagccttcccttcttttaaagaaaaaccttctcctttatggctgaaaatccagagaatattaacaccccacatgaggaaactaaccatcgttttggaaaagagcccatgggctctaagagatcaactaatccgcaatccagaaggaccacccgttccaggagggcccaacctcaggatggtcccaatgatcggaccacacgtccccgaagaactcaacccgatgttggtcctagaacgcaaacaacgcgcttgaggagaactcagcgtgggaatggtcagaatcctgagatgagggatgaagagctcaaccatggaggtgcccaatctgtgggagaaaggacttatgaaatggaaagtcaccgcctgagatgccgtttagaagaggcgcagtgtcgaaacgctgagttagaacgagaggcagcctcgcccagggcagcactagggacgaacactctaacacaacctgaatttggagtgagaagaccacgaggcagacctcgtggctcacgaaccaggagacaggaaaaggcccgggaagaacaatccggggaaaatgagacataaggaaaaaaatcataccaattattattcaccatgcaccaatctaaacgttcaaaaatactaccatgcttccaagtgaatttattaccaacaaaagagaaaatactaccatgcttccaagtgaatttattacaaacaaaagacaaaggaaacaaattatatttagataaaaaggattgaaagctaaacatagcatacggggggattagaaagctatgagccgtatgcaatatacaaaagatacctgtacgatcctatcatcaagtgagaggtagtcggtaaaatctcccataacaagccaaggagaagcaggggcaacaccataaattctgttcaataaagtccaagtatcacactttgaagaaacataagatggaccataaaagcaagaaagatgctaagttatatttgttgggttttatgccataaataaaactctttacaatctgattagt

SEQ ID NO: 44608 - DNA, 1010 bp, Cannabis sativa
  modified_base (690)..(696): a, c, t, g, unknown or other
attactgctattttattaacaccttttttatttggaaatgaataattaattatagtcaacatagctgctacttatcaatcttttatggttgagttggctgaaagtgctaattgacagtttaactcgttttagactaggaaaatagagtccaaattggtgacttcacatgcccattttgtaatgcattataagttaatggataataggctcaattttacctaatttttgtaagtgtgacctaaatatattgttgaaaagtcaaaggtcttggattaggtaacttaaatttgttgaatagtcaaaggttttggattagctaccgtaatgttttatctactccaagtttaatagttatagtctctattaacaaccttgaacattgttcttgactcttgggtctccctctctctttgtttttttttttagtgtacaaagattatgaggtattgagttttaaaaaattagaaaactgaaaacatcaaaatgttatttttaatttttaaaaatatttttttgtctaacatattagattttatatttttgctcatatactcggatcttaaacccggaactaaacccgaacgtggactcggatggattcatgtcatagtatggtgttaaaatattgattatttttaagtaagaaaaaattttaaaataattttaaaaaatttgtgccaaacaccattnnnnnnntaaaatgacaaaaaactgttttctattatcaatttcgaaaacacaattttaaaaactaaaaacacaaccaaaataggcttatatatttttaggattttttttcgccaattttttaatatatactttttcaataatcaaattcactcacaagtagtttgtctaaaaataataattataattacacaaattgaaaccaaaataaaaattgacaatctaatagataaaatacatctctttttttaatactcaatttttaactaataaacaacctcaaattagtaaatcatttaagttgcatgaaattaagtgtttgt

SEQ ID NO: 44609 - DNA, 2987 bp, Cannabis sativa
attaaatttgaaaaatatttttactttttcgtctaggaagatctcacactctttattgcttttttgaactaggcagccttattttcttaactttctttattttggtttaataaaatgttctaataataataataataataataataataatatatcttttcaatttttaaaaaaaaaataaatatgtctcaagtgccctaagggcaagtttaatggggtatttttgagttgcttgttatggagttgggattgggatgaggtggaggacataggattaaaaattttgtgagttattattgtaacgtggttattgtctagctacactgaccaataatttttattttttttaataaaaaaatgtattgagattggttagtttttttttatgtgggtcctctagagtaattgattctattaattcctttaatgatggcctaactagtatatattaaaatgtatatataacggcttattttttattttttattattaataattcttttttttttggagattcatactaaggatcagacctttatttatttagttttgagaaaaaaaaaaagtcttatcaaaatcttaatagtaaactcactgggagaaatttcaagaagaaaaagagtatcatgccaggcaaaatcataagagtctgtctgcaaagcagcagtattacaatcaaagtggttaaaccaccaaacataacaatcattcaaggacaatgttaattttgctaaaatcaggaccttatttacaaaaaaaaaaatcacttttagtcataacaaaacttgtgattagctaaaagtaaaaatgttgtgactaattataaatcatcattcttatgttatgactaaaaggtccgtgactaaaggtattagtcacaaaattcacaatttgttgtgactaaatgtgattttagtcacaataagtaatttaatgacaacttgtatctaaatactatgttttagtcacaagtagtttttcgttgtgactaaaaattacatttaggggtgttcattatatcacatccaatatttttaggcctatccagatccgatccaattatatattggatgatagattttaccatccggttcgatctaattaattttagtcatctaatcgatccaacatccaatggatgttataaattggatcggttttatccattggatatatttgatgtatatatatattagtttaatttagatttatctaatattttagaccatttattagatcagatcggatccatatccaatattttagatccaaaatctattggattgaattcgatctattaaaaaaaaagtaaaattttaatgtgtattttcatgtatacatatatttttttttacgtatatttatgttgagtggtcagtgtgtagttatttagcttaagatggagtatcattatttcaattgttggtgttctgatctatctactgaccctatgtttagtggttttcagatccctagtgtttgattaccctctaatatttggtcgtttgctattgtttgttatttcgattttgaataatgaatttaattgttcttatttttattggaagatcttgtttgggtgatactcattgttaggttatgtctgtagtatgtttatttagattgaaagtttggctcttttcacactcttttgattcttcaaagctagtcgcttagtcctttagtttgagctaattatgagaaaaaagagagaacagagtgaaaacagagcaagaattttattatgcctcttaaccttgagtttacaaatgagagatgagcttatatagctcagttcaaacaaggaaaatcagttggaaaaataaccaactgttaaccgaaagattagctacaaaatatcaagattaacaacccaaaactaatcctaactaactaagtccacttgttctaaaagccccctcaagatagagtgtagatgttgatcaaacccatcttggagacaattttcttgtgatgagttgggagaagagcttttgtgaagatgtcagcgaggttgttttgggaagagacatggagtagcttgacggaaccttgttgaaccttctctcgaatgaagtgacaatcaatttccacgtgctttgtgcgttcatgataaaccgggtttttactaatgtgaatcgttgtggtattgtcacaatatagcaaagcaggatttgaatgagttatgccaaagtcttttaggagggcaattacccaagtaagttcggaggcagcattagccatagctcgatatttgcttcagcagaggatcgagaaacagttttgttgtttctttgatttccatgacacaagtgagctacctagaaagaggcagtaaccagatattgagcgccttgtgtcttgacaggatccctaatcagcatccgagaaaaaagaaagttggacattagaagccgacaagctggtctcggcatgagctgagattgtggggattgtgttggatgcaaagaataaaccttgtccaggagttgtctttaagtattgtaggatgcgatgtgctgcatgaagatgggaaacccgaggagtagttaaaattgggtcaaatgattgaccgcctaagagatgtcgggtcttgttatagttaagtatattagtttgccaatgaggcttctaaaaacagtaggatcgggttggagagtccctttgttgttacttaacttgaagttagtttccataggtgtggagactggtttggctcctatgtaacctgtgtccttgagtaattggatggtaaatggtctttgagagaccgaaatgccttgttttgttctaccaatctcaaggccaaggaagaatcgaatggttccaaggtccttgagtttgaatttgtcatgaagatatgtcttgaagtgagatatcgcgagatcattattgctggcaacaataatgtcatccacatatatgagaatggctagaaagaaggttttggtcctctttatgaatagagagttgtcagatagggattg

SEQ ID NO: 44610 - DNA, 2547 bp, Cannabis sativa
aggataaaatgcaaaaatgaatacgaacctgggaggggagatttttgtctaaagtaagtaaggaggttcttttaaagacggtggcacaagctcttcctagctatgcaatgtcagtttttcttcttcctttgaaaacttgtggggagttggaaaaataatggctaagaattggtagaattctaagttttctagttcccgtggggtcagttggataagctagaataggctttataatcacaggaacgctggcggtcttggcttttaaaatcttcatgactataatcttgctttattagggaaacaaggttggcgtttgttgttggatgataatattctttgtttagtcgtatttataaagcaaggtactacccaaaaacttgttttttttttcctgctgaacttggtaataattcaagttttatttggcgaagcattcacaagtctcaagatataattaaagcttgtgctagagtaagtattggatttgtcagtattgttaatatcattggtgatccttggcttccacatgatactaatcctttcattataactgatcacccggggttagttaatttctcagtgcatagcttgatgaaggttagaaggagggagtgggatgaggaggtagtgcaagatctttttgatgctcatgaccataatctgatccttgggattccactgagtgaaactgttagcatggatcgttggtctaaggaggattaagggttttattcaattaaaaatgcttaccgattccaacaacagccaaaacaaggttcagatatggtagaggatactaaaccctagcgccatctttgaaagatgaagatccttccaaagattcaacatttcttttggaaagcttcagcaggttgtttaccaacccgtgtgcagcttctgcaaaatcatgttcctgttgaaaccagctgcctgttttgtaatggtgctccaaagtgtattttgcatgtgctagttaaatgtccttttgccatttcttgttggaatctttctagtttagacagcaggtctttacatttcgcaaagtttggtgattggttttcgaatctagttatgagaggtttaactcttctctcttaaaggaggctgctgctattgcctagtccatttggaaggcacgaaatgacctcttatggaattcgaaagtgtgtttagctgttactattattttttcatcaaagattattttgacacaatggagatctgctcgtgataaacgttttgatccacttttagttccagctgggactatttatggtggagagcagtagataaaaatcaatgttgatggagcagtgtttgcagcaaatcacacctatggtggaagtatcgttgcctgtggtgttgatggtcatattattgaggcttttgcagtgtatcagcttggaaaagttcaacctgttatagtgaaattatgggcattaaggaggctctaagttgggttaaagaaagaattggagcaatgtcctgactgaatctgatagctttattgtaatacaagcgttgtcgtgttctattcacatgccttccacttttggcttaattgtggatgattgcaaatatttattactctttttttaatgttcgatgttttgtttctcaatttgaaaacagagctgctcactatcttgcacgtagctctcgttctttgttaggttgtctttttactgtaacgaatgtttcgccattattacaggacattataatgattgatttagctatttaaataaaatttactaccatttttttttaaaaaaatatactaaacaagaaaatttatacgtgataaaattcacaaaaaatagtcatttataatttttttttggtttcaaatatagaagttttttttgaacaatgaacgaaatttcattgagaaaaaaattagcgttgagtacatcaaaaagaggagatcgaagatcctccctccaaattagctcaccatccaccttaagtgcggtcttagctaattcatgcgtagccatattggccgaatgatttgcatgaataagcggcgccttaagaaaattggatagtaaactaaaaaatacatcaaatagagagcctaaatcattactgaaagaaaatctcttaaaaaaaggcagagatcaaatctaaacaaccaggctcaaaaaaaatgagaggaagtccaattccatcaaccaatccaatgcaaccattattagagctacaactttcgcctcaaaaactgtgagatttccttgtgtccatcttaatccaaccaagaaagcaagaactgctcttaaaaaagttgatacctagaccaaaaacatcaagtaaataaatttagtaacttcatgcataaacgttaaaataataattttaaaagtacgtcatataaattaataatttagtaaaattttgaagaaagagaattgtaataaaacttatcttttgaaatccttgaatcttgaccaagtgagtaaaataaaaatatacctatataaaatatataaaatttaattagcacactacttaatggtaatattaaaatgagaatttttatttaaa

SEQ ID NO: 44611 - DNA, 1612 bp, Cannabis sativa
tttaaatttaaactcagtacacatttttctttttttttatcttatacgtaatgtgtttatataatataaattttttttaatattacattcaaatttaaattcattacgtatatttaaaaaatatctttcatcattttttactaaaaatatatatttctattattatttaataaaaataaaaaagtgtataatatttcaaaaataatgaaagtattgtaaaattaaaagtattaggataattaataaactaaaattataattaacactaaattataaaaataattttatttattgaatagcatccacacacacaaaaaaaattaattatcaactaaaatttacataacaaaaataaaaactaacaagataattaattaagtataggtgctctggtaataatattaacctagttatattaaatgtgtctatataagaaaacgtgttgttcacattttaaaacattataatttaaatttaaacttattacgtatatctcttttatcttttattattttttttaatattgcatttcaaatttaaacctactacacatatttaaaatatatttttctattatcatttttttatccaattcaaataaaaactttttatttttattattgttttcattttaaacaataaaaaatatatttatatttcttaaagaaatttgttgtaacgttgtaacctttatagttaccaattaaaatatattttcattatttttttttaatttttgaaaaaatcagaatatgtattgcttccataaccattacagggacatgattttgtcttgtgatgtactttcacggaatgtatttcgtggtgcattaaaggagtctcagggtacattaaatgtttgtgaggatatgttactattttttaaccctaattacccctagattaatctcagccctcagatcaaataactctatcatctaaaggctgtcgtacatcacgtaatacattccgtgaaagtacaatgaagacttcgcaagaagttacccatcttagcactactctctatttttattattatacaacttaaaaatatatataattaacataaaaattaagaatataataattaagtataaggaaattgcacgtaataatattaattaattagtatatatatttattatgtagataatatatgtatacgtagaattgaataatatctctctcatattacgaacatgattagctaataataagaagaagaaaaactctagtataaaaaaaaaagtaatatgttaggtaaggtttgaatttaaaagtacatatgcactgcgttcatcaatattgtttataaataattatttggtcattgccgctgtacactaagcgggatagatttagattattccttgcattttgatgaattttcaattttcaaataattaacagggcggtacattgttgaaatttatttagaaataaaatgctacaaataatatatgaatttcatatatagctagctgatgttgaaattttaattacgcgtatacgtacgaataactgagagtcaattattttgggattttctatattaaaaaaaatagtaaattatatcaagctatgatcattcaatattttttatttgtttata

SEQ ID NO: 44612 - DNA, 1306 bp, Cannabis sativa
atttggtacggtagttaagaagaaatggcttcgatgtattaatcaaatcaaactactatgtatgtatagtttagaatcatccgttgtgcggttgatttttcacaattgcatggtacaatacaatttacggtttgaattttttttttttaaagaaagaaatggtaatttattaaattaaatcagctcttacagaaatacttatgaatttaggacaatcaatctaaacaagaactctcatcgaactagtaatagacaagcatccgtccaaatttacggtttagaatttcataaatacgattttatttaaaccacgtcgcacccacttttattgaactatttttttttaaaatataatttatacttttcatttgaatttggttttgtttctttataaatatgggttagtttaggcataacatttattaactatgtacttaaaaaagtaagtattttttatactaattagtactttatgtatcttattttttttttgttttgtttgaacgattttagttatgatttttatctataaattatatgatgcaattttattataatatttacttattaaattagttggtgattaacgtaaactgccaacaccgcatcgcactacatttttgtgatgtaatttgtgttgtttcgaggttaatgtggtgtggaggtgcgatttggaaaattgctcacactacatatgtggtgcagttcaaaaaattggctaagagccacactacctacacctctgaaatctgaatttagtcgcttaaaatcctttaaataattatattgatgtatctcttttgtattttaatatttagatagtattaattatatttcctttatatgatattgtacatcgtaaatatttaagacatcttataaaattataaaaacttcaaagtaaatttttgtgccaaaactaaaatttaaataatctgttgtataaatgtttcttttattttatacgcatataaaataaaattatttgaattctattttatgtattttgaattaaaaaatgtactcggatgcttatttaaatattaaaattacaaaggtatttaaatacacctatttttaagatttgaactgatgaagaagttcttttctaaataataatggagctagtataagggcgttatgggtatagcaactgcaataaacacaagaggaatcggaaagatttaccgaatccaacccaactcaatccatgaatttgcatcatttgtttatactaaatgactaaaatagacttgtttagcctcttaccacaaaattcaagtttggtagatttggggacgatcta

SEQ ID NO: 44613 - DNA, 1863 bp, Cannabis sativa
tttttttttttttttgtaatataaggttgtaattaacacttctaggaaaatttaacatttaatgttaaaatattacacatagttttaaaatattttccctcactacatatttctaaggaacttttttaaatatatacataattttgaaattatttataaaaataacaaggctaatttaaaccatcacaatagcgtggtcttccgtgtacttttttacctacaccaaatttggtatttagactttttatttttcttcttatcacttgtgagcgcttggctttctctcttattattcttttcttactttgttttgtttatttttaatatctatccttacacaattgggattcctaattattttagtttgaaagcatttccatgtgtttgattagattgcctcaagtgagtttatgtatgtaattggtgtatatcaccattagtattctttgtgtacttgatctaattgtttgtaagttgtaattcttgccattcattaattagatcatcacagccaatagagttgcttctacccggggattaggtccaagttttatccaaaacttgtgactaaacctcgtaagacttgctgtccaatttttatttctggtttcactggttcatgtttcaggccaattgttctttttgcaattgtgttcttgtctgtgcttgagtgcacaacaaatggtattagagcagtagggagatcggggattagttcaagaatcaagtgcaagaaatcaagattgttacaagatggcaacaacttgatttaaggtggaaaaattcacttgcactaatgactttagtttgtggagaattaaaatgaaagtttttcttgttcatcagggaattttagagcccttgaatgaagaagctatgaaggagatcgatgacaagaagaagaaagttgagattgaaactaaggcacacagtgccatccttcttagtcttggagatgaagttttaagggaagtttcaagtgaagaaaaggcgcttggattatggaacaaattggttgcaatttacatgaaaagatcattggctaataaactgtacctcaagaagaagctatacactctttgaatggatgaatctaaggagcttcgaagacatcttgatgattacaacaagattattcttaatctgaataatcttggagtaaaaattgaagaggaggatcaagccatcattcttctaagttcattgccaaaaatgtatgaatattttgtagacaccatcttgtatggtaaagacaccttgacaatgatagcagtcaaggctgcattgtgttcaaaagaaattcaaaggaaagatgatcgagtagataacagtggtgatgggttgttcacagcaaaagaaagatttcagaagaaagactacaaggggtacaagaattcctacaataacaacaaagacaaaggtgacatgttcaaatcaaagggtacattaggtaagtaatgttattattgtaagaaagaaggtcattttcgtgatgattgtttggcacttaaggcaaaactaaaaagagagaaaaattgtggaaagaatggagaagctgatataacagatggctatgaatcagctgaagtgctagttgcatctagttgcacttctgatggagcctggatcttatattcaggttgttctgaatgtgtatgatattttattaaaccttacttgatttctatttattgatacttgtagtacccaatatgactatgaacaatcccatggtgtcactgttaactgacaacaagctctctggggctaactttgtcaaatgaaaagaggacattaatattgctctcataggtcaaaataccctgtttgtgttaactaaagaggctcctgagcaaccaggtg

SEQ ID NO: 44614 - DNA, 4739 bp, Cannabis sativa
atcttcgaccatacaatcaatacaaaatggacttcaagacaaaacaatgcatcttcataggatactcatcctcacgcaagggctacttatgtgaaagtcctgaaggtagactatccatagctaaaaatgttattttcaatgaacaactttttccagcatcctcacacgcctctgccacaaaggtacagaattctttgtctagtccttttcctactacaactttctctacatcacctaccatgccacctacacaacataatacacctacccgtggtccttaccatccacaaaaggcacctataacatcacagccccccaacatggtccctacacaaacaattccttcctcacctcaccataacaactttgtacacaatcccaaccatactactgttgtctccatccttaccactgacacaacaccactacctacttgtccaagctcagtacccaatacaacgtctcatccaaatacaaatgaaccaccagttaccgtgcaccactcgaactcatactatgcacactagatctcaaagtggcatattcaaaccaaaatcatttctagccacaaaacaccctttgcctgagtcacttctacctactgaacctagaacactaaaagatgcactgtcaaatccaaagtggcatggagctatggatagtgaactttcttctcttaagaaagccaacacgtggattcttattccatatgatccctcaatgaatgtcatagggtgtaaatggatacatagggtgaaacttaacaaagatggctctctcaacagatacaaatcaagattagtagcaaaagggtacttgcaagaagctagaattgattttgatgagacttttagtccagttgtcaaaccaactactgttcgaacaattctttcattggctgtaactcacaactggaatgtatcccagttagatgtaagcaatgcatttctgaatggtcccttaaatgagactgtctatatgtgccaaccaccagggtttgaagacattactaaaccaactcatgtgtgcaaactccaaaaggccatctatggactaaaacaagcccccaaagcatggaatgataagttgagaacaactctaagatcgtggggttttcaagattccaaagctgacaactcattgtttatctatggcaaaggtacaaacttagtaatactacttgtatatgtagatgacatattaatcacaggtctcaatcctactctcatctcgggtctcattcatgatctcaataaatctttctctctcaaagatcttggccaagttcattatttcttaggtgtggaaatatacagagacaaaactggtatggacttgtctcagacaatatacattacagacttattagtcaaattacatatggagggtgccaaggcaagtccaaatccaatgagctctactgtcaaactctcactaaccgaaggggaaccatttcatgacattaccttgtacagaagcacactaggtgcactccagtatttgtctttaacaaggtctgatgtggctttcatcaccaacaagttaagtcagttcttgcatgctcctacaacaattcattgggaagcttgcaaaaaattactcaggtatttgaaaggcacaatcaaagatggattatggataagaccctcatctgtcatgactcttcatgcttattctgacgctgactgggccagccgcgtcgatgaccggcggtctactggtggatatttagtgttccttggagacaacctgatcagctggtctgccaagaaataacaagtagtagcccgctcaagcactgaaagtgagttcagagcacttgcaaacactgctgctgaactcaaatggattcggtctcttttataagaactacaagtctcaattgctcaagctcctgtcatatgggtggacaatcagagtgcctcggcacttgcagcaaatcctgtctttcacgcacgttcaaaacacatcgagattgatcttcatttcgtacgagatcaaattctagacaaacaactctctgttcgctatgtgccttcggtcgatcaagctgcagatgttttaactaaggcactgtcaactgataggtttctatacttaaaatccaaacaaaaaatggtttcaacaccatttagtttgaggggggatgttaatatagttgaataaattctgtttaggatgttaattacagctaatattgtaactgtttttcaactgtattctgacaattttatcttttaactaattctgttaatgatgtaaaaggttgtgtataaataagcttctccactcaataatgaattagttctggttttacattctttgcctcttctctgtttttctgcttcattgttcttttactctgttttctctaatttcatattctaagattctacaataaccgagactaaaagatattgtttagtctcagttataaactgaaacttaaaactcatatatgtttaaaacaaaactctaagcccatcgttctaaacatctccctgcctcactcaaaattttagaaaacccaaacaaaattccctttcttctctcttgttctcacgcaaatcaggatagtattaggcacttgaaggtgttaaataatataatgtttttaactattaagtctcacatatttaaatatttaataattattattaaaaatcactattataccctaataatgtaattatctatatttattggctagttatcatgaccctaagattttatctcaaaactaattaacaactataatttacttctcgtctcagagtatctttaatggagctacaaataagtgatataatatgtcaaatatagctcaatttgttaaacgtctactctaatattgttgtgtcaaattatgatgcaaatatatcacataacaaaaagttacacaaatttgaatcacaatatagtatgatgccaaatttacaataaatgctatgcatttatatttactattatgacatttttaatatttattattaaatttaagttaacatactcttttgcattacatgactttaatttacattattattattttgtatattaaatgatatattaaattttgtatcaaaatttacaattatgtaataaatcacaagatagtaaaaattaatgtaaaaatgtcataaaactactttttatgctaaacaaatataactcaacttagtcttaattacatgttttgggtaattatagtcaaaataaatttaataattgtttccatatatattataaatatatatacatatagttgtgcacatacaatttatatatagggaaatcattctatatatgccttttaatttttttcttctatttttacaatttctttttttggttttttttatttttatttttatgattttggttgttttgttagttgcgacatggttttgcatggattgcgatgttgattgcggtttaattgagttgtgatttaagtagctatgtgagtgcactatatattctgtaaaaaaaacatactttaaaatatataaataaaaaaaaccccacatatatttatataaaagataatttctccagtttagcatatgcaaaggaacaatataattccttatattagctttttagtatatcttcagataaaatatccttggatagtattatttaagtagagttattttgtgggcatgatatatatatgattaagtttttatacttctttgttaaaataaagaataataaccaaataattgcagcatgttatacaactaatattatatatatatatatatatatatatccaacgtcttttgaagtgtccaaaagaatcatttgcgaaaacccttttcatttgcatcgaatatttaaagcttttttacgatcttcaaaacactgaagatgaaaaaaaaaaaaacaagcttaccctataaaaaaaacactgtcgttttgaattgagacccacctaaagggcaaaagactgatgtgttttagcatctagaaaagacaagagtggtttaagcatggagacaaagtttccacaaaccttgaggctttcgcagactttaagaaaaggagagctaattacatggctcttttccataaggtcactgtcccattccactcctctttttatttatttaattttttttttctttttgcatgaaagtaagggaaatctcggatctagaagaagaagaacaaaacccgttaatgttttaggtataggaccggggaaagaatccactatagtcattgaatggaatctaatgatcatgattattatcatcatcaaaatatattctttcccccctttgtgtgcttttaggggtttatcatttgaaagtaatgagattgagggatccaaggagagatgagaataagagactatatagtactttcatttcatgtgctgctgtagctcaattcagctatatacaaatgtatgtgtattgtgtatatataaagaaataaatgaaagaaagaaagaaagaaagtggtaccactactgttgttgctattagtacgtaccaatactaagtatccactttcgtcgttgtatttatatatgtgtgtacatataaatatatatatattgatgaaagaacaaaataaagaaacgaaaaagaggagttggtcaaaaagagatatttggatgtgaagcagcacacgcgaataaaattatagcagagaatggagagattgtatcgagatcacgacgatgctttttatgatcgttgggtcgttttcccagagcatttata

SEQ ID NO: 44615 - DNA, 1500 bp, Cannabis sativa
ccaatttggtggctgaactaatacaaactacttgttgtgttcttcgtgttgattcatcgatcaagatgtttcagctttgattcagtggtcttactgttttgtatatttcatttaatttgtgatataaatttctttgagttgtgttgtagaattacaacaataaactataaaagaatgcctattacttacaaaattattagctcagtaagttgacccaattcctttggtacctcccctgacagtgcatttatgcctaagctcctagtattacatagccaaaaaataaatcaaaaatgaaatagcaattttaacatatcatcatactaaatcttgttaatttcaagcttaaattttaggtaggcatagaacttacaagtattgtatgttagtaaggtttccaatcaatggagaaatagaacctgtcaataaattgctgctcaaatccctacaatagatggaatgaaccaattataattgcacaaaagtgataattaataacttaaaagctccaataaacacatacagataggagagaaaggtaagagtccatagttcttctggaattggaccaataacattcagtccactaactttcctgcattgtgattatgaccaaagtgtcacttaaaatcttctatttgataaaaatattaatatcattttattataagactttgggatacagtttagtaatgtggcagagagaggcattgttgaaagtgcagttgcatttgatcaagggatttaataagtcatcatcgtcgatgtcgatggagtcatctacggcggcaccactgcatagttccccacttatgttccattgctgagtgccagcctttatcatccattgctcaaagatagagttcaaagctgtcactgccattgaaaacatagattaattgaacgaaatttaagagaatttacaagtatgtgtggatcgaaagcccgttagggatatgactctgataccatgttaagaaatatgagtatccatctcaaaactaattggtaatgagtgaatatggctcaatatttttacatttgatccatgtgaaacaatattgtctaatacaaccaattaattgtaagttgtaccaacttaatatgaaaattgggtagaagaataatcaaaaaaccccgtagccatgaaataatcacttcaagtttttttttttctttaacaaaaagaatagaaatatcggaatatttatatgaatataaatatccatgaatattttaaaagtatatttaaagatgtattgtttaaaaaacataggtaaatttggaaatattgactgaaaatattatcaatagttaattcctaactcactggaaactctttgatgtgaattttgtgatagatcaactttacatgtgaaaaaatcacaaagtagaaattaacattaacataaattaagattgaacttaagatagagatgaagaccttcagagggagctgtagtgggctgagatgttattgatgaagcattgataatagca

SEQ ID NO: 44616 - DNA, 1059 bp, Cannabis sativa
  modified_base (100)..(109): a, c, t, g, unknown or other
gctgccatcaatctaaggttttcttaactttatatgtgtttatttatcattttagaaagttcatatttagggtgtgaaacaacatacttgtgagtagatnnnnnnnnnnggtaaaataaattccaacactataataatataaatggtacgtacggacctttgataatcatcaagggcgatgacatggtgtggtgatcttcctaagtttaccaagcccacgcttaggtgaaggcttggcaatgatatcatcccacagtttatctagcaaaactatatttttcgatgatatttctatgagtctctcacctaactctctgttggtcttcgaaatggggttttcaccctatgacttcgaaggttatatatagaggtagagcaagtcatcttatacggccactaaaatatctccataagtttttaccataggtttgcgggttgggactcgaatcttcagctgccggtgtcctagagtaaggcagagacaccgtgcaacccaaaagtcgcaacatccaccatcgacctcaaaacaaaaatcgtctcgttcgctggggggctgggaggtgcttctgccgttgggtcgggaagtcgttcgctggggctgggaggtgcttccgccatcagcccatgttagagaggtcaagatagaaagagtgaggttattggttagagaaagaaaatgtgataaaattagggttgcatagttttaaggaaccaagagagagaaataaattattattattattattattattattattgaaatgtgtaaacaacaaagaatacaactgtattttattaatcattcattcggattcccaatgatctattttattattttattattctattatttactaagtaaactcatagagtttgtaaaagtgatagggtttgtgttttatttttttttattatttatttattaattatagatatatacatatatattttttttttaaaaaaatagaattatgatatagtgacgcgctaagtgcgaggggatatatttacccagtcatgtttggcgcgtcattataggtcaatattttttaaattaat

SEQ ID NO: 44617 - DNA, 974 bp, Cannabis sativa
tctaataatacaaactagtaaacaacaaacaaacataataaaatttgctaaatacaacgaattaagaacttgagataaacattactaaagaacaacacaaaattaactatattttctcttaagaaccatttaatggaacaacaacattgtaatgagaatgatattaaataaagctacaagtatcatcaaatcaatcaatcaatcaacttgggtactcatttgaaaccgaaaccaaaaaaagattgaaaattgagagtgagaaagagataagatagatactgattgatgattgatgattgatcatggttgttgctgagcatccatgtaaccagcatcaacaagaactttttccctcttagctaactcaatatcttcatctaccatcatcttcaccaattgctcaaatcccactttgggtttccaaccaagaactttcttagccttagaagcatcacctttaagattatcaacctcagctggtctaaaatacctcttatcaataacaacatgatctctccaattcaaacccacattcccaaaagccacttccaaaaactcctccacagtatgagaatcctccgtagccacaacataatcgtcaggcttctcctgctgaagcatcatccacatcgcctcaacgtaatcgccagcaaaaccccaatccctcgaagcctgaagattccccaagaacagcttgttctgtaaaccgatcttgatccttccaacagcgcgagtaatcttacgggtaacgaaattctccccacgcctcggcgattcgtggttgaataagattccgttacaggcgtagatcccgtaagcttctctgtaattcactgtgtaccaatgagccgcgcatttcgaagccgcgtaaggagatcgaggatgaaacggcgtcgtttcgctctgaggcggcggagttgctccgaacatttccgacgatccagcttggtagtaaccaatatgagatctgcccg

SEQ ID NO: 44618 - DNA, 1110 bp, Cannabis sativa
gtagtagtactgcaaaattaagcatgagaaattagatcagaaaaatgaagttatgacgtctatgtgtatcaattatatgtttgatcggttttctgatgagaataattatatatgtatgcacgttattgttgttatatatggatccaactacattgagtaagtaaatatatatgtatgtatggcgatgtaatttagttgttagatatgcatcttcgtttcgttgggatcttatagtacaagtaattatgatttccaatattatatatatatgtacgtacataataaatatatgtgtatctaattttatttatttatgataattgtgacatctaacatccaacgaccctgtgtgaaacaatcaatacgtttccaaatagattaatttttacattttattagttgaaagatatcagaataatattaattacctcaaattataatagagtgatatgcattgcatgttatgcagccattcgtgtgaaaaacccgacgtccgggcactgtgtctagcctgagtaggtaggtaggactattaatcatcaccaatttccgaataaatttgggcaacacaattaaacaactatcagcatatcaacaataaattataatattataatttgaaattgaaatttatatgacagcattttggtcatagtaacaaaatttgttgatttaattgaggctcaccatactaaataatttatgtactatttcaaattataggtacaagtactatatattttaattatttattatctatttttattttaatttaagttttttttttttatagaaaataaataaaatagtccagtctatttttaacccaaacacaggattacttttaacataatccaatctcgtctaatccagcccaatcatttccagtctaatccacactacaaatacttttagtgacaactttgtagtcacattataatatttttcgtgactaaatgtgacttttagtcgcaacaaaatgttacttgtgactaaaatatagtatttatttagttagaagttgtcactaatttaattttagttataacaagtattgtgactaaaaatacatttagtcacaaaaatttgtaatttttgtcactaatacat

SEQ ID NO: 44619 - DNA, 3032 bp, Cannabis sativa
  modified_base (33)..(40): a, c, t, g, unknown or other
tttctgatcttttattaattagtaaatttgatnnnnnnnnaatgagttttatttagggtacaaaacccaacagagcccatgatggctaggacaaaatagatgtgtcttagggaacctcctcgggaccctcacattgttgagttgatgacgagagggagggtctgtcatgtagaagaggttgaacaacctcaagctaaccagctaggggctggccagattaaggaacttatggctgagcagcccatggccgaccaggatgaggagacctcgaccgatcatgatagtgaatttgatattgagcaggctaaacctactgctggaccaagtagtgctaggaggcagtacaagacttgtaccatagttttgggatatcccttcggctcttatgatgatgtcgggcggcctttgaattcccagggtcatctgtcagagttcaggatcaaccatgtttgtaacgccttgatacttagacgcgctagagtgagtttctaattaatgtgccacctttgctaattagagggtttttctcataaatcatgccaaattaaaattttgatttaaaattattaaactttgtaaacatatatataaaaaatgcaattagtaatttttataaaaaaaatgttatttaacttttcttatattaaaaatagtactataattctcactctaattaaaatcaaatttcaattcaagattttcattacgcacactaaacaacaattatacgaaagttgatggtaatatgcatatttggtaaattaataattaaaataataaaattataaaattacagatcaaaatagcaaaaaccagtaaagatagagtgtagtgcaaaattatatctatattttttattagctcaataaaaatcccataatatcttgtaattaaattagtacgaaaataattgagaaataatggaactccattggaaatggcggcattcttatacactccacaagcttctctatctccgcttccaaccatacaattcaggcttagccccagaccccgggtaatgtatacactattactgtacacaatcttctgctctctattttcatcatcaccttcttcttctttctaatctcgttggtaatggcagtcaattggtgtgattaagcacagcacccggtgtttctcaagtgacccagataacaatactggtaaatcctacaagactcagactgagacccctcaagttttgaaaattgtggtcagtggagtcacggagcttctcaggttcctctctttttcccaacagtcttctaggtacttttcctgtctttacctacacactttttctgattggttcttgagaaaatgcaaggaaaaagaacaaaactttggagatgggatccaagattagttccaaattatctttaattcatttttttattagttacaatacaaacactacgtttatctatgcctttttaactgcagagtgaccgagaaacaaacagatgagtatgagttttcagcttcaagtgttgatgatgtactcaacatactccaatatgattatcagaatgcttatttcgttacaggtacaatttttaattatatataaacatataaatttttctattattagttgtcttatatttttaagtttcatagggattttttcttctgcaatttatgctgaggactgtatctttgaagatccaactattagatttcgtggtaagaaaagttcattttgactttattagcattagcatcacataaatatgagtaataaaaacttgctaatcaattgattctgaattgtctttggtggctttctctccaggtaaggagttgtattcccgcaacttgaaattgcttgttcctttctttgactctccatctattggattggaaaacattgagaaggtagtcagtcactccttttaggtttgcacttgattatcatattactaattggtatagttttgatattcttgccataatacaaccagaaagaaatcaagctagtgatcttaatttgttaaatcattttttttttttgaatagttaatttgttaaatcttagtgcatcagagattgaaacaatgtgctgcttcacatagaaaagacaagacaatcagactcttcccatgtttcaatttccttaatttgcaccattcccttaaatcaaatgtagagtttggcatagaaatactcttttaaggaaaaagtccatctgggtagttgatgctgtcaactcacctcctgctattgatgctcaagcactcattttgctcttttggcacttccaaactctgctcactctactgaccaattgagctatttatagtccatacggtatcaaagtagcaggccacttcaagtccttaggggacttaaccaaatctagtgcatgaccgagcaacaacatgatctcactgtggttgctcaaggcttctgcgccagcatggctgcgcgaccaaactaacaaatttcaagacattatagtagcagattgttgttaatttgttgtaatgctaatcactgcaggatctctcctccgaaacaacatttgtggtagcaaagtggaaattaaggtacttataacttggtctattttcatttttacttttaacttacacattacaataagtttgaatgcagcatatgatttatatatcaccaggataaactgtcaaaaagataataacgacaatagttataataaattgaggataaagaaggcttttttgagtgtcctaatccatttctcccaatcaaatgaaaatgctattgagcctgccactgcagactctagtctctactatagaacattgtacttgtgccttcgatatagctacagcctacagtctaacttatctgctatgcaggacctacctgaagcttccatggaggcctcttattagcatcaacggaagtacggtctatgaattagacggcgaatttaaagtacattttcataaactgtttttctgttatacaatgttactgtattgatcattaatttatcagtgattgctttatgttcatttacttgacagattgtaaggcat

SEQ ID NO: 44620 - DNA, 1552 bp, Cannabis sativa
tagcatcttacggaaaagaataaaaatacaattaaaaataatctatcctcacttaaaattatttaaattttatataaataaacattattatatatatgtaataaattcatgtggctggcaatactggtattgttttccaatatcctgacttgaaattattagctagctttgactgaaactaaatcagttgccttggagttttgaacggtgtggaaactcagttttttgttaatattcatttgttcttaaaataagggagtcacaaagtagaaatgatgaatcaaagtattttttttttccacaaaattgaccaaatgctgattaaagagaaattagtacatacaggtcaaaatacccggatgagtaaagttcaatgttttacttgaaaatattcagatgaaagctacatatactaaaagaataattagcaactaatatattttataaattattaaatatattatttataatcagaataaaagtacgaaaaaaagaaaaactcatctgttagcaaagtaaaaaatcttgtaaagtcactataataataactaataactttaattctattattaacagttaactttcaaaatattataaaggaagagaaaaatctaaatcgtgataaagaataaaaaaaacaaaatcatgaatcaaagtttgaccacgtaaaaaatgaaaagtgaaataaaatatggtaataaaataaaacatggacgtgctatgtgtaataagcaaattatgggtgacgccaatttggacgagatgatgacgacagctggcgggcctgtttaaaaaataataataatatttaaagaatgtttaaaatttaaacgtgtttaaacagagttaaattaacaaaaccctttttttatataaaataataaaaaaaaaaccagttttaagaaaagtcaaattaaaaaactatggtcattttcttttccttcgtatgaattttctgcaacgtgtaaattaggtaacaacgaacaaccttttatttaaggttatatttagaaattaagattttcataagaaaagaaaattgtatgaaatttttaagaaaaaaaactgtgtagaatagaaaaagaaattaacttttcaagtttaatatgaaaaatttgattgaattaagtatttttgtatataatttttcttttcataccaaattcaatatcaaattttttttctttatatattttttcctacctttttatttgctccccgaaatccacttctaagcatagcctaaaaatttgttaaaaaagaataaaaataacatgaaacaatttttaacaaccggtttcttttcaaaaataagtaaatttaataattaaaaaaaaaaacaaacttagtggacaagaagtagaggttactgtgcaactgttggaaattatatagattggtttgtcacagttctttcaaaaataaataataacaaatagttggtttgtcgcaactttataactttgctagaaaagaaaaacatattaataagtaattatgctaaacgatgatcgttcgaaaaccaggaggatcactgttatgatccggaata

SEQ ID NO: 44621 - DNA, 3752 bp, Cannabis sativa
agtaaatctgattatattaaatgagttttatttagggcacaaaacccaacatactgcacatcagaatgttgtttctggttcaacatctaggctggactgttccggttcatatggagtcggcacctgagaagacactgcctaagtggaagccacctgatgcaggatgcttcaaattaaatgttgatgcagcttgcaatgaagcaggagctgtaattggttttggtgcactattccgagatcagtatggcaatgttattgcgggtctctcaaagcctttcaaaggaagtttttctcctaaagaaatggaagctgcagcattatttcataggcttttgtgggctattcgacatcaactaccgattactattgttgagtcaaatgctcttgtggtagttaatgcccttaataagacttcttctactagttttttatctccattctatgatttagtagaggatgtttcttatcttttatccttctttcctggagtgacagtatctcatgtgaaaagagatgctaatgaagcagctcatgttttagctaagttcgctcttcgattggatgaagattatatttggttggggaaactcctactccaattctctctgttgttattaaagactctaatatttaataatagcagttttttctcaaaaaaaaaaaaactatctcttccctcctttaatttctcttgccaaataagaagaattattatctcctttcatctttctccctcctcttctctccatcctactaaatatagtgtaaataaaactactaacttcgccctagaaacaatataaatagaagaaagaaagatggctaatttcaatttgtagctactagttattggtcgatcttagcaaagccatgtgtacagtgacttctaccatgaatattagttacatcttatcggataaatttattctgttagagcatttctaatgtatagtatactatcctactaaattagtatggaatcttcatatcattctactctaagcatatactaaattagtgtgtatcaaatttcacactattaatagtgttagattagaatctacactaaattaatgaataattttgtcttttcattttaatcctttttttttaatttgttttaaaaaaatatcattattttttgttgataatatgtataattatattgtaaattagttattattagaaatataaaatgtgagattttttaaacaaaatatttttattaggtacacatttggtgtgatatttggtataaatacggtaaaattgttgtaccaaaagtaataatttttacattgaattggcaaaaaaatgtacaccaaaatagtataattattatagatggtctagaaataatttattgatgataattaattaaatactaaattctttcaataacatgatgatgataattagttgatcaaagttcagtgaattttttaagatttttaatatggttatattgtgcgtttataaatatacttttcaaatgcactctttctatttttcacatccaaataattttttataaaatgtatatataatattgatgtatgaaatgttttgtggagaaaattaaggaatattagtcgaaaattcacataagtaatgaattattagtttcgtgtcttttcttttccatgagttgaagcactactgttttttttcaaacaaatagttctataacttctgttattaaattctttcaataacatgataatataactagttgattaaaattcattaaattgttttttaaggctatttaatacgataatcctgtgcattaataatattcttgtgaacttgtttggtaagttgtcatataatattttgttaaacaaatattaatatgagctaaatataaactcatgataaacaacataatgctcatgatataatcgaagattacatattctatttagggtataaatacattaattgacttaccttccatatcagtattttttattatagccatgacactaaatcatccaatgtatgcacaaaatagaagagatagtagaagatgagcttatgaagcgcaatccctttctcttatcaccacacccactctttgttatattatttttaaagaatataatatatagataaaatatgtgtaataagctaataatatgtaatatatagaaagtttcgtggaaacagaggcggtcgtcaagctcacgggttgtttaaaaattacccggagtgtcccaaatgtaaaaagcaccatcagggtgagtgccgagccaaaaacgtgtttccagtgcagtatggtgggccattttatcagagactgtccataatccaagaaaagaagaaccaaagaagaaagaacagcaatcaatccaagggatttattcactatgactcaggctgacgctgatgctagtccatcagtggtgacatgtcagttgtctatcaacggttgttcttattcagtactatttgatttgggagctactcattcttatgtatcaagtagagtaatagagagttttcataaactgtttgatgtgtatgcttcggggtttgggaccctgttaccctctggagagctaatcgtatctacacagtgaattagatctttgactttttggattgacggttatgaatttaccgccaacctaattgaattacaactatctaattttgatataattatgggaatggatttcttgtccaagaacgattgattgcaagcaaaagatgatagtgttcgaacctgatagtgccaacccagtggtgtttgtgggtaaggtacaaggatcacgcgtacttagaattacaatcctaaaagctagagacctaatgcacagaggttgcataggattcctagttacaacagtggatactagccaacctatttcaactggacttgaaaatactagattggtgtgtgaatttctatatgtaattctagaagatttacttggattatcaccttcttgagagattgaattttttatagaattagttttgggagaagaaccagtatcaaaagcactgtatcgaatggctccaacggagttaagtgaattaaaggctcaacttcaagaattactcaacttggaatttactaggctgagtttttctccttgggatgctccagtgttatttgtgaaaaagaaagatgggtcgcttcgcatgtgtatcgattatcaggaactgaataaactcgctatcaagaacaaatatcctctacccaggattgatgatctgtttgatcagttgaagggtaagacaatcttttctaagattgacctttgttctagttaccatcagttaagaattcgtgaagaggatatcccgaagactgtattccgtactaggtatggacattacgagtttctggtgatgtcttttggactcactaataccccagctgcattcatggatctaatgaagcgagtattcaaggattttctggataaacatgtaatagtttttattgatggtattttagtatattcagaatcaaaagaacatgagttacatctcagattggtactttagcgactacgggatcacaagctctatgctaaattcaaaaggtgtgagttctagttatcagtctctttcttagggcacatagtgaacaaggatgggatcgtggttgatccagccaaaatcaaagctgttcgggattggccaacaccaaaattagctacgaaagcgaagagctttttgggtttagctggctattatcgtcagtttgttgaaggtttctcgaagatagcaacacc

SEQ ID NO: 44622 - DNA, 1419 bp, Cannabis sativa
agatttaagatcctggtaaaataaattccaacatctttttcttccaaacaaaccctttttctttattacaattagcatctgtgtggtctaacatagaacaagccatgcatttagaaggtaaccactcatactctaatgattgttccaccatttgcttcttctcattaatgaatgatatagtttttggaggattgtctgaaatttctatgtccaccaaaattctagcaaatttgatcatcatcttctcctttgtgaacttatccatcttgattggtttgcctatggtgctaactaaagcacttaggttgttcctagcccaatattgaagacctaagccatttagtcttatccaaactgggacagatttaaccatttgagcagtatccatatcaatagaccacggcctcagcaccaccagttttttgtcaaatgtgtatgacacctgtttcaagcactaaatctcttgtagcctcatccctaaagctaacaagagtgaagccagaatgcatcctcactatcttctcaattcacaagttcccccacactctcttcacaaagccttgaaacactctaaaaggtaggttagcaccaagaactatacagacaataacatttttccaaaaggaagccttaacttctatttcctccatatccaattttgcaataacctgatccccaactctcataggttctgtaaattcaagtctagtagaaagagttctaatctggtttgttttgaattcgctccacatatccttagcattagactgaaagaccgcttgctccatctcatctgcccagttatgcaataaaggactgctcgctgatttctccattactaaaatttctggttcaagctcttcgcagggatcgaagcctatggtgcgttctctctcttccaatggcaaagaagaagagaaacatttcaaagcctgctaaaccagccacagtcaacgtacccgaagatcaagagctgcctttgatccaagatcgaatggaagaacataattatcaatttatctttattcattagatttttctggttttgtttaaccttttaatttgtttgtcattatcaattttatggaagtagttcttcctacaatactttttgtcttatgacaattatggaacttgttaggcccatgtacaatcgttttatcttatctttcttttaccttactttttcttatttcaggtaaacttctcttattttgaagttggagaaaaaaaaaagtacttgtgagaggttggtgactcttgattagagatatagaagttataaccatggttttattcattatattccctaaaattttctattattagagtattagaccacagaccaatgacaagtgttcatttactcctaaaagataatgaattccttatcggttatagaatctttttttttttttt

SEQ ID NO: 44623 - DNA, 769 bp, Cannabis sativa
aaggaataataaaaacatgaaagcgtgcacataattaaacatgtaactcgatcgatcatttcaaaaccatataggaattattaattcatgaatgtattgttttatattctttatttctttacttactataatatatgtataatattgctattaattaatgatcatattaattaaagaaatcacacccttatcttcatattatgaaattatgatgtttgctgatcagtctaatttttatttattgataatttagcctgattaatgatcataatcacttctataatttatattaatattttaacatttttaaataaatataaaaaactaaaagtggtatttattattgatggcttaagcatagaacatccctttttaattgctctgtgtcatctaaaagtgaacacaaaattaacaaaacatagacaagtcgctaacttagtggataataatatgcatatgtatatacagggaagtacctataacaaaaatattatcttttaaaaaattaaatatattttttttaatttgataattataaactaaaataataaaaaagtctccacaaaattaaataaatctagtaagagtaattataatataactataaatattttttaataataaataagctcccacaaagtaaaaattttggatcgtgtatatataattgatataaatatgtatagagatatacacaaaaaattatattaattaaaaaggcaagtttccataaattagagatataattaaacagtagtttctttgccaa

SEQ ID NO: 44624 - DNA, 2267 bp, Cannabis sativa
  modified_base (43)..(48): a, c, t, g, unknown or other
  modified_base (78)..(88): a, c, t, g, unknown or other
ctaaccaaacatgacttatttttaaaaacttcaaaaactattnnnnnntctcatttctaaaaacaattttttgaaaannnnnnnnnnnaaacaataccaaacatgctctatacattttacaatctcttctcaatcactcacttttctaaaagaatcactcactaatatttccctctctcaaatttattcctaagctgatgacataatttaaggtgcaataggaagaaaagtaatgaatagacacattttaggctttattaagtgaccataaatattaacacaggctcaagctcaaatgtaaactagagatgataaaataagggtaggcttgaaagactcaaacagttcaaaaaaattgtctaaatgatattcgaaacaagcatattgccaagaatttcgcctcaagagaataaattatgcaagttctatatatcatattcaagcaatttttccacaaaccaaagtagaacagttatgatacaattcaaatgttgacaatttacatcgatatacaatttctaagcatccaaattaatccagagagtcaaagaatcaagcacacagttcacaattttcaatccatcccgtaaataacaacaacaacaacaagaaaatcaatgcattatatcatcgacttaattaacaacaaaataaataaagaaaactataaaataaacacacaatgtactaaaacaaaacaaacaaaccgactaaaataataagtctccaccaaactaaaatttcacattgtccctaattaattagtctctttttattttcttcttttatttatgtttgttattagtttttttggaaagactaaaggtattgacgttttttttttaagaatagtcattattataattcaatatacatggtttttaattacaataaatttattttacattttttaagtttttttttttgtaatttttaaaaagtaagtagtgctattgcaattaaattatcgcaataatatttgtatgcgaaattaatgtataaattttttattagaaatatattatttatttaataattgaatgaaactcaaaataaatttctaattatctgatgcatttaatattattataatataagaagaagcacatttttgaaatattgtatatctaaatttacatatagcattatcaactcacaccgctcatcaaaagaaaataaacaaatcgttatagtaaacaagaaaaagaaattgaataagaaattaaataaataaagtaaaataaggaagtaaataaattaaatcttcaaaaagataaaagaaaaaaaaaagacaaattgtggataaatttattgaaattcggtgaaaattatttatatcgttgacaatcttgcaattttcttatgttgagaattatgcttcttcttattctctttgtttatattttagaaaaatatgtatacattaatgatattatatacgttataattatataaatatttatacttattatatagtgttttatgtttgattagattttttctatgcaatgattagatttaattttatgcattaatcttttttaaaagtataacaactataattaaataatatcaaaaattataatatgtatgctaactaagagagtattatgcacaatttaaaatcataaaattagtgattttataataaaaacacaatctcataaatactactactaataataatctgtcaatcgaattatatgacttaaatattttagtatattataattataaatctattatcttttagtacttcaatagatttattaaattattatttttttaatataattataaaatttatttctaaaaatataaataatttttttaatataatatccattataatattattatatatataaaataataataagttattccattttttatttagaaataaaaaaaaattatcaaacaaattatttataatattttacttatttaataaaaatattaacaacaacttatatacatatgaatttctgaaataaccaaataatcataaattaaattttattttatttttcaatgattataacgattgcacgaacgctcaatcaacttcatatggtacttatcatcagtaagacaaataaacatttcattatgaaaataattagtcatatgaatcatgactttcctttttatttaaagtagaattttcacatttacaaaataaaatgtaaacacttttaggagcaatatattcatcagcaatgggagtgttatcaactagagtaagaataagactgctattatta

SEQ ID NO: 44625 - DNA, 4257 bp, Cannabis sativa
  modified_base (1762)..(1787): a, c, t, g, unknown or other
tatattaaattaatctaaaataaataatattaatatttaaatatataagtatataaatttataaaattaattttactaacaccgttaaatttaacaaaatattttatattcttaaaatattccgttaaacaaacaaaaactattatatatatttttaaagaaaatataggaacaattattttaattatattaataacaatattttattaccttcttttttttttgctttatttattattattattttttttaatgcagtcttgtatataaaatctataatattattgatgtacgaagaaagatatacatagtctttacacagtttaatttaagacaaactgaaaccctaatttttgaaattgagattttttttttaaaaaaggaggaagatgagtcaagcggttttggaaaaaaaaaattaaatgtcatttttaaaaacaaattaattattcaaaaaattattttgaaaggagtggaagtctaatatttgtaaaaaaaaataaagttttattgtaaatattataattaaatagtttgattgttaaaataattataatagggatttaaataaaaaataaaattatttgtaaatattaattcttgaaaaagggttttgtttaatatttaaattaaaaatcaattattttaagaaaataattaattataattaatttaattttaataaaaattatacctcttagtaacgtgctattacaggttaaaacaaatgtaatcatgatgattataataaaaatataattattaagtagttacctatatatatttaaaatgatataatttgtatatttaattataaaatttaatttaatattttacgattttattcaattttcaaaaatatctatatttagaagatattaatgaaacactgtacttttatgtatcgagttaacaataatttatcaattatcttttcttttaaatttaacggttacaatataactatgccaaatagataacgaaactatactataaattagtatccagtggaatatacttttattaacaatactaagccattacccactacaaagaaatgtcacttttaccagcacagttcgctactgcatgcgctggtaaaagtaacttttaccagcgcattttgcgaattgcgttggcaaagaggtcaaagttttaccagcgtacatttgaagtggctaaaatctaacttttatcaatgcatttaagtgctgaaaaaagtcatttttgccagcgcttttcattttatgctgacataagttctaataccaacattaatttgccaacccccttttgccaacacatcataagtaaattctattttaccagcgcaataccaactttgtgctggcaaaagtaacatttcttgtagtgaccatttataataacagttaaatttctcaaaaaaaaaaaacaatacttaaccaaagtatacttttataactacaccaagtatgtttctcatgcatatcaattttaattttaatttttcttacttactcttattttttaatgtaacttttatatatgatcaatcacacacttgttttttttttttttcttttttctaacttttatatgatcaatcatatcaaaaaaataaatatacaattttctatattttttttcattttataaaacaacaatattttattttattcgagttgtctttatatattttgtaatcaaactaaatatttttagttagaaaaggaacagagaatacacaataaatatagtacttattattattattattatnnnnnnnnnnnnnnnnnnnnnnnnnnttattattattattatttatctatacatattactgtttagttagtgaattaatatatatatatattaggttattattacgtggaagtatacttagttatattgtaaatttttattgttgctttgtattaaaattttataagttaaagaagctaattaatttttaattttattaatttttaaaaaaaatatttatagccttaaaaatttaagaaaaataaatataaaattaaagaatattaaaattaaacatactcacaatattaaaaataacaatgttaaataatatattaatatttttatatatttaaatttatttaaaattaatataaatttaattaatctaaacaaaataatattaatatttatatattaaattaaattaaaataaataatattagtatttataaatatatttataaaattaactttattaattaataacaaccttaactttaacggaatatattcttatattcttaaaatattctgctaaacaaataaaaattattaaatatatattttttaaaaaaattataggaacaatttttttaattatattaataatgatattcaattttttttttgttttatttattattattatcatttttaatgtagttctgcatataaaatctataatattattgatgtataaaggaagatatacatagtctttacacagtttaatttgaaactacctatgtaaaaccactccaacatagaaaatcaaaatctatgaacttatatttgggtaaaagaagattctaaaatcttctataaagagcagatatatttggggtttctaatcattggtatgctaaaaggctaaaaatgttgattatatttttcctattaagtaaaaacataggtaggaaaacgatgatatggccaaatattattttcttaaaagaaaaaatatattggggagaaagaaaggagtggaaataccagcataagattccctcctcttgttttcaggtagtctctttatataaggagacctatatagttataaatgcaatatatacctttttgatctcttaattatataggagtgactataagtaactttttgatgctatataaacccaccctcatgagtggtttcaacacactttcaatacaaatggattacaacagatataatattgtgggtgaatgttctctcccggaatcctatcgtcctctaatggatcttcatgttttggttgtagatgatgataccacaactctctctttggtttcagcaatgcttaggatattgagatataaaggtatataatataagccaaatcttaccatttcttttcctttataaaaatttttagctgaaatttttacataatagataaaaaattaattttttttttttttacaaaaatacgtttatacagagaaatttttatttttacagtttgaattttttttatttaccaaattacaaacttcgagtaaactgttggatatccttttttacttattttagaattgatttataattgttatgaggttagttttctcgttgattttgattgtttataacttatttatagttattttataatttttttgagattgacttctcgttttattttagtttttttcttactttttggatagaaaattatatttttgtaattttgaaacttttaaatagtatttaattattttataaataaatatttaggttgtaaaattataaatagaataaattaaaaaaaaggttatttacagcgaaactcttttatgttttgattttttacacaattaaatcacttatttttttgtggtaaaattatttccttatgtttaaaattctttgtaaatttgaagtgtcaattagatatcactattaaatactaactgcattattactgtattggcttctaagttttactttcatatatacacatgtgtacatagtgggtcatcgaattggtatttaatgaaaatatttaactgacacctcatatttacaaaaaaaaaaaaaaaattaaggtggttttgccaaaaaaaaaaaataataataaaaggaataagtgtataaaatttaaaacataagtgaattttactactttaaaaaatatattttctttcattttagttagttggggttttgtgagaaatccaaacattatttcttcatgatatatcattttcatcagtcaatttcactatattagcattcccattttttaactaaattatgacaaatgttttatttaattgttttctgcaattttttttaggtataaaatataaatatatatatatatatatatttacttttatataaaaagtagttatttaattgaattttttgtttaacagtatttttttttagttttttacgttaattttaaaaaaatatattattactaaacaaaatattcttaattaattaatattataatattattttatatatttaaaaataaaaattatttagatattttatataaaaaattt

SEQ ID NO: 44626 - DNA, 1703 bp, Cannabis sativa
tttttgttttttttttttttttttgaaagaaagtactttcaagttttttaagaaagaaaaatgagtttttaaaatacattgcttaacactgatgataatattggattgaaatccgttatgagtattttacaattgtaattgttttactattagagttttctacaataataattttaagattattgtttgaaatttttaaaaatttgttagtagtgttactaatctttgttgcttaaggtatagtatttgtaatgaattgatgaattcgagatgttattattatattttcaatgaatttgtgatttgttttaaaaaaataataataaaaattgaaggccttgtgccctttttccctcacctgctttcccgcctatatattccacaactcgtcgctccttttcatagtctcttgttctttaagttttaagccttatattaatccaaaagtttcagagaaacttgatccgatcaagttcattcactaaatcgctcaatgaaattgaagatcaataaagcttccgatctcagctccatttcaaccctttctcctcaaacaaggttcacttctgttttcttcaattttatacttctcttttctttttatctactgcgtcatgcttcgtttggttcccgagaaaaagcgggaaagttatttttcgtacaatattaggtttgattaaatcaactgtcttcgtttcaggtaaataataataataatattattattatatatatttgtaaattaatagtgttcgatgcttctctttccttgtattgtagttcgatgtttggtttcgagataatggaaggaaaatgcagagcaaattaaaattggagtgatgctttatttctttactcattaaatttctaactgttttgactgatgtactattttgcttgtatgagttcactattacgtcgattgaaaatgatagtaaagactgtgagtgcttagatatgagttttctggttttgattctgaacaatgatgtttgtgaccttgaaaagtgaattttctacatattctcttgctgttgctcttcttccttacctgtttcagtgtctcgtgttaatttttgaattcgtgaaggagatccaacactgcaacacatgcacatggaccccagacatcacagctgcgatcgcaaccgtcacaacaatcattttctcgaggactctcttctcactctcaactcggcgtgttttctcagagctcactcgacgatgttctgacaattgatcaggttaattttattctcggtgctcttgtgattgcaatgtatcaaatgaaatgaaatgaaagggaaagaagttttcagctctatgcatcttttttattgttttctctttcatatttgctagtagaattggattttgttttcggtagattaaaacaataacccttcaattgtaattattgcagtagttgtaagattcaaactataggtttgattttagtataaaactctaaagatcagcgttgtttctttctcttattttgatggtattcatgactgaatatcagctaccataaaataaatctttaaaattcatctaagaccaagatgacgaaaaatagaaatttccttgttagctgacacattgttggttatcatctgttgccaccgaaggcatcataaatggtaagttcaaatcggcatgttcgtttctccttccacatttttctatatagaatttcatca

SEQ ID NO: 44627 - DNA, 1858 bp, Cannabis sativa
cctaaactagtagggtgttacaaggatcgtgttacaaccatcttgttagtgattccttgagctagggatctcaatgaaagccccaaaatgttggcacaaaaatcaggtgacagatatctggcgcacacctactcactagattggcaaaatgattaagttaagtatatctaagagagacacaacaatttatagtagttcactctctgtatcacgacagtaatgaagctacgtctacttcgagtttatttctcacgagatgaatttacaaaaaaaaaatggctaagtctagatgctctaatttctagagagagatgctctaaccttatggctacttttctgaacttaaaaaatgagcttttggagctcgccttttatagggaaggaagtcctattaaaataacaataaaataatccaaaaaatgtggaaaaatacattaaggctatttttgaccgttgatgatgatcatatggtcaaattgactctagaggttggttgtcaatttttcgagcttaagtctcgtccacaggacttgcttcaggtaagttgtagcttaaattcgtaacttacttggcggtaaaatttatggtcgataacttcaaaattttaattggagtgtgagacatgacttgatagagcattgaagtgtctttgaaatgcaagttaaatcatgttaatcagactactatttagtgaattatgatcattttattgagggttgacatcccagcgcccaggttgacgtcagatgctggttgagttagaaaacgttttggggatgagattttggatgcctaagtgatattttgacatcagttagctaatttttgtattctactgaagttggtcaccagttcttggagatgttgctattttgcagaaacataggactcaaaactctcgatttccaagtaactcactttgccaaaaaagtgaaaatatgaagttgtgaatttgattctttagactttatggctctcagttatcatgaaactagacaaacgcttaagacaggaatcagaatatgatatgcaaaacctattgcactaggccacatgtcaacctaggcgctgagtgctaattttaaagcattcgtgatgtcgtttttacacttccaagttccttgaacttgaggaagagacctcttacaccatttttttttaccatttttgagggaattcttggagtagaatttgcagttgagtgattgaaaccaatgcaccaggttaattatgaacttgggcactgaggctcagttttgatgcccctgttgttgttgttgttgttttctccccgagtttacttgtatcttcattattttttatgatggaaataatgcatgcttcactttttcaaaaacaggaatggaaatggctcaagttgacaagctcggcccagtgccaggtgtcaaccttggcgctcggtctattttaaagcctcctggaatttctgtttgttcttggaaaatagtttaatctcgaaaaagagaatatgccgagaagacttttcaaaaaaaaaaaactcctcaaaattggcccaggttgacaaaatgtccaccttggcgttggtcccttatttcggcccctaggttggtttgtttcttccccaaaagcacttgtctccctatttttgatgatcaagaagaagatgcaagattcagagttttcatctaatgcttggaagttgcccatgttagaaaattgtcaacctgggcgctaggtgctcaggcaccaggttctcaaaaataaaagttctctgaattttattccgatgcctttaatatatttctggtatttctagttcatgtccaagtgcaaagtttgacctatttgcactaatatggtcttgaaaactgaaacc

SEQ ID NO: 44628 - DNA, 1018 bp, Cannabis sativa
  modified_base (931)..(935): a, c, t, g, unknown or other
gatttatatttatagtgaagtaatcataaaattactaaacaaggataatttagttaataagactcaattaataatctagtttattggagcttagaaaacttaaataagaatttagttcattctcatgcctaaatcacacataaacataattcaaagagaaaagaaagaaaaaaactttatagatagtatgtaaaaggtgcagaatcaatcacatacacaatttacatgaactcaacaaatattagataaagaaatattaaattacattaaatcataatagagtttcaagagagttaattagaaaacctaaataagaatttagtttattcttatgcctaaatcacacataaacataacattaaacataaatcaaaaagaaaagacaaaagatgaaagaaaagaactttaggttttatctcaactagtctccaccttcgcaatctgatgaaaagtgtcttgcttattcatataaaaatgattaaaatctttcctaattttggaacaaaaatttccccaattatgaacgattcatcgcattgtagtgttactttggagtgttagtgcaccttctgaaagctaagaatagtggttttgtaaagagcgttagggtctatttttcaggtatgcagcataagtattttaatgtgatcatcatattgatcccaaagattctcatataacacacattaaatcagaaagcaatagtaatagaaaagatagctctcgatgcctatcaaatatccttgcttttttttttttttcgtatcgatcctcctatccaacaggataaaaaaagggtaaataccattttggaccctttgctttacaaaagttatcaattggaccttgtgttttgttaaataacaaaatggaccttgtattttctaaaatagtacaaataggacattgaattgattttttgtcaaaatannnnntaattataatccgatctaaaagtactatgaccaaattgtttatatttttttatatctattcgtattaagcattgtcttcaagt

SEQ ID NO: 44629 - DNA, 645 bp, Cannabis sativa
ttttttatatatattttttgtttggtgttcctttttctttggggtatgcaaccaataatttacaccttcaataattaagtgcttggttgtatgtatatacatacaacaacagtttgtccgtacaagaacaagtacattgcatgtgatttataatcttataattctcaattatttgtatagagacgtttttttgttggttctaaaaaataaaaatgatcacgggtgtgtgaaaacgtggggcccagctgcagatgatgaaaaccatgtggttgactatatttgtttttcttctactgcaactgaattgtcttggctatttgtttggctttaactaatactttctaatatgagaaaaataggattaatagtacacaattaaatcaatgaaattttaaacaatcaaacaattagtaactgttatttcttaaaaaatctaaaataattatgcatgaatttttactctagatatagaagtccaacaagatggagctcattggctatggaggagcttattggccaaggaggagctcatgggccaaagaggagctcataggccatggaagagcttattggccaaggaggagctcaatagccaaagaggagcattttgggcgcactaagctcccgactccgtcaggtgctaag

SEQ ID NO: 44630 - DNA, 902 bp, Cannabis sativa
cttcaatgaaaggtatactgaaaaatcacaagttattaaaattaaatctttgtttgttatatattttactataatatatataatcatatttttttatgtcaaattatattacaatcaattttttagtttttttttattatttatatgcattttttaaaaaaataaataaataataagacaaatgatgaaaaaatctagtacatgctaataattaatttttttttgaaacagctaataattaattaatattaattatttttgctatcagaaagtcagctagctttgagaaaagataattaaagaacaaaattaaagatttgaaaatgttgaaaagaaaagaaaaaactgaatttgttgcttgtttcatgatcatgtttctaaaagaatataattcaaaataaatgtaatattgattcaaaataaataaatgtcatacattattatatttaattgaaagaaattaaagtcctcaaagaatgttcagataattatttgaattctattatttatttattattaattataaagttaattggaagaataattagttcaaattcataatatataacattatatactcctcaaatcaaagcttgctatttttctttctaaaaaaatgtcaattaattaattatattatttaatcccttacccaatcatttatattatttatgttaattaggattttcgctcaactttgacatgtaccaaatcattccctataaactttttaggtcttaaaaattttcattcaactattgagattgttggatttaaagacttttgtctcattttattcaattttactaatatggtaattatccatatactaaactgtgtcccatgaactttaatatttacaaagtcatgtctccttaactttaacatgtaccaaattgaat

SEQ ID NO: 44631 - DNA, 1544 bp, Cannabis sativa
  modified_base (1517)..(1519): a, c, t, g, unknown or other
tacagtgtgggggctgtgaccgagtgcataaacacatcgaacaactttttggacaaaacccctttctcacgtcattgcacacgcatgatgatgaggatagtgattccttattttcacacacgcagttatcgcaacaggatggtgtgtactcatattcattattcattattcctgcatgtagcttaattaaatcaatattcagattacaacacaatatattataataatatatagctagctttcatccaaagtaaaatatatataaggtacaagcttcttttttttttttagaaatgggtacaagcttcttgttttcgtataaatatgaaaatatatttcgacattctaaattttatatattatataattataatataattttgtaattaccagattgaggcacctccaagtctgacagttgagaaaatgcaactgagcgagcatgaactgttgctagggcaacctgcaggaggaggaggaggagtgtggggatgaaaaacctggggaaagccatttcagtaattaagagaagatgagttctactgttagatactatatattgaagttgataatagtgatgagagatttggtacgtaggacttatatatatagataaccgactgaagattcgaagacgaaagggataagatcataagtgagattaaaatattagtgtatgattcagaaaactaggcctcacataatttttttacagttttttttttagttcatcacgtggtttatcttttcaaagctgctgcatataacatttataattttctcactatatcttttcaatttaagctcacctaattctgtaattggaatcttttctaattaatatcactatgtataatttttatctgaagtttaaaactgttatagaatgaacatattattttataaaaatatatacatgatattatagtatataaattcacgatctatctaatttattcaaaaatatattcccactgtgtcaagagattatgaggagttcaaaatgtgattaattgaaatattaaaccagaaaatatactgttaaaaaacaggagtgctaaaggaaattcttttttgcactttattctatatattttttttacaattttattacaagtgtcatgttttttgagattaatttaattgtaattaataattaggcataaaattatcatctaactagagaactaaggcgcgcttcaggcgatgttgttcaatatttgttatctttttatattgttatttttttaatattaattaagtgatataatataaatatgacattgtgatgttagaattatataaaaagaaaataaaaagtaacatgatagaatgatggacttagaaataaaatttggtattttacaaaaatatgtagaaagatgtagttatttttggcaaataaagaaaattattgtgaaataacatagagattggatgtgtatttaaaattaaataggagaaaaaagagaattgttataaaataatatagtataatataaagtagatgagaagannnaagaagaagatgaagagagaaagag

SEQ ID NO: 44632 - DNA, 2447 bp, Cannabis sativa
ggggtgggtgggttaagcccgactcgtttatcttgggtcggacctgacccgccatgctaaaagaagttgtcggatcgggccagatcgtgctgcagagatatcgtaatgggggctcgaccttgcccgggtgaggttcctatttatatgtacattttactctttataattattcatgattgataatttttttataaaaaattatattaaaatattaaataaaatttattttgaaacacttagaaagaaaaaaaaaagtattaaattattagtattttagataaaaaaaataatcattattgtaaagaaaaaaaagttgtcacattccatttctatgtcaaccaattaaagtaatcttcatattctcaggcatcatcataatattttttagcacaaccaagcacggtaatgttgctttcctaggtttataattccattcaccgctctgccagtaatgttaaacctattctcataaaatgaaacctccataccaaacagcgccttattgttaacttgaatcttatccatctccactcatttaaacttacatccattttttaagttcttagctaatcacaattgatcaaggttcattccttaatctcaaaggtccgtatatgtattaggtagaaattctaaaattctctttttaacacattaagaaatatacatatttcatgtatattttttgttttattgataatcccttggtgtgaactacaactctaacttgtagtgagtctcctgttgaaggtgttgattcatcaacatctaagactcttatattctgttcccgttattaccactaaggttttactccatgattcgtaagtaaccattgcttccttgaaattatcactatcttcatacttggttaatcactctaaaactcattttacacttaattatacagtttgttgtttaataaagaacctatggtgattcaacatttaccaataactcgaatacatgtccattaaattgtatctcaatttataagcttttccccttcctgggtgagtataacccttccatcattgtttaataaggaaaccctttcctaaaatttcaatggtctccttatataccatattgactatccagtcaactataaacacacttttatatgttaccatggtaatatcctcgcttcaagcctccattgtgctcttatagtcacaaaatgatggcccttatgcacaaatgcgtcactctaattgcttccttgattgacgactagccctagagaccaatccaagtatttctaacatgctttgtttttattcgcaagcttcatgggaaaacttcctaaatgaaatcaccccaggtcaaggacacttaaccatggagttccttcatcgtgggctacgaaaacaagatgcttcttgctaacataggtagtcccaagcaatccattcaagtcctcaacaactatttagtccctcgcctacataattttggaatcactacatacgacctttcccccaagaaacgtggggatgtttagctcttggtctttccttcacagttcacggggctctgattgtcacaacttgactcatgccccctgatagtgaatagatccacccacacaattgttgcctttaactcacctagggttttagaaaatgcacataaattttcccacttatactaacactagatcacttttaatcaaaagattctgttatctgaatcaattagctagataccttcattaactactcaagtcctatattgcacttgggaatataaacaattttaactcatattgctatttttctaaactatctaccctgttagatgagttaccactaaataacatacacgcactgcccattcaaatcttttgatactcccctcattaactgtacaatgtttaatactgatatcaattaaaatagaaactataataatgcccataaaattctaacctgagttggccgaagggccgatatccgagtctcataaccggcacttggacaggacctgtacagtcttctccattaacattaacctttctcaattgcgggcaggctcttatcagattacccattactccacaatgaaaataagatctagctctacattagccaaaatggaacctttttgcatcttgaacactcaagataaggtcataattcttatctcactttgactgctatcctggtcgccctagaacattttgttctatcccataattgtgggttcatttaattttttcttactgatctgcttctaagttgagttcatatatttcaccacatccagtggcacaacaggaagtgtcggtagtataagaatagacacaagacgagcctgttgttctatcagatctcggatttgcttcctcttattgtctaatcatatcctgcataccagaatttacatgtttccatattacggtaataaaggaatcttttccttaccattttccccaagtgcaaaca

SEQ ID NO: 44633 - DNA, 1740 bp, Cannabis sativa
tgaaactgtgtttatgagccaaccggaaggctttgttgattctactaaaccttctcatgtgtgtcaactacacaaagctctctatggcttaaagcaggctcctcgtgcttggaatcaaacattaaaagataagcttcttgaatggggattcaatgcatccaagtctgacacctcaatgttcatctatgggtcgggtaacacactaatcatacttcttgtgtatgttgatgattttttaatcactggaccaaatccttctctcatctctcagcttatttctgatctcaacaaatccttttctctaaaggatttaggtccagttcattactttcttggcatagagatacatcgtgatttgtctggtatgtatctttcacaaaccaaatacatcaccgatttgcttgttcgacttaacatggaaggtgcaaaaccatgtactaatcccacaagctcatcggtcaaactatctcttactgaaggagagtcgtttcccgatataactctctacagaagcactttgggtgctttacagtatctcaccctcacaagacctgatgttgcattcattattaacaagctgagtcaattcattcatgctcctaccaacattcattgggaagcatgcaaacggctcatgagatatctcaaaggcaccattcatctcgggttacatcttacaccaacttctactatgagtttagaaggctattcagatgcggattgggcatcctgtgtcgatgatagacgaagtacagggggctatgtcatgttttttggtggtaatttggtgtcttggtctgctaaaaagcagcaggtggtggctcggtccagtagtgaaagtgaatttagagccttagctaatgcggctgctgaaatcaaatggctcgtctctcttctatctgagcttcatatcaactcccatcattgtccaatattgtgggttgacaatcaaagtgcagcaactattgctactaacccggtgttccatgctcggtcaaagcatattgaaattgatctacattttgtgagggatctagttctcactaagcaactgtccattcagtatgtccctgccgtcgatcaagttgctgatgccttaaccaagcctctctcaacagatcgatatcactaccttaggtccaaactcaagatgttagaaactccttttcgtttgaggggggatgttaacaacctaattactagtgatattacttagccttattttctgttgttttagttgttaaatctttctgttaattgctgttactttaacaactttctgttattgtcttggttgtaatcttttgtctataaataaaggcttggctgccctgttttagggtaatgcttttcagattcatttgatgccttaattcttgcttttagctcctctggtttctctggtttttaccttctacatggtatcagagttcttgactagcgtccatggaatcttccacttcagatcctctggctacaatggccactgctactcccgctgctcctcttctttctcaggttcaatggaatccttttgctaactctctttcgtcttctcttacagtgaagcttgatcgtctcaactacttgtcttggaaatcacaaatcgtccccactgtaatcggccatgacctagatcagttcttgttctcagatgtcactccgccaacaaatctagtcaccggtgctgtcaatcccgagtatgtccaatggaagaagaaagaccagcttctcctttct

SEQ ID NO: 44634 - DNA, 4353 bp, Cannabis sativa
atgcctaatgccagtttatgttttattaaacgatctgttaatcgagttgctcactatgttgctaggcaatctcgtttttatgctgatcgtagaatccttagctcaaatatctctgttattatgcagaatttattgtatcaggattcttgttattaataaaagtttgcttttgatttaaaaaaaaaaaaaaaaaaacataaactatattagttatatatataataattattgttaaattttaggtatattattttttctctaacaaaattaatattatttattcttcttagtatagatgtgtaaacttctctaaaaagtatctagatgtaaatttttcaaaaaaaataacaaatgatctgttttgtaatattttaaaaaatacagaactcaataattatttaagaaaacagaaagaacaatctacaatttgtgtggaaaaaaaaaattcaaataaaaaaatattaatgtaaatgcaaataataatctctaccttgagtaggtgagaaatgatcccaatcgtacaactgtaaacttataaaattaagaagaatttgatccttttacgctaaattatctaaagacacgttatacaataatcggtaccatacttcattattgtcatttatctatcaagattgtgtgtgtgacactgacagtatccaataatcattgatcaatattatattacagaaatgtatagaaagacgaaggaatgattatattaagtaaaaaaaaaaaaaagcaaataaataaataaatagaaagtttggtgcttcacctactgattgtttccgagaaagatagcttttagtttataccttgagctttgtttaccaacctattttgcttattatgatcaatttcaattgatcatagctaggctattaattacgccactaaccatatatatcgtacgttccactaaaaaaaataaacaacatatatatcatatatttttttttttttgaaatgacatatatatcatatttaagtattataatatttatgtgcttttagttataaatgtaatttatgtgcatatttcccatttaattactcaccaaccttatttaggtataactttttcaaaaaaaaaaaaaaaaaaccttatataggtatatgtataaaaataatggaaatgactgttatgagtctttaaatcatttattgggagaaacctttttctttatttttaattattatcttcctgaaaaatcattgacacagtggcaaataccaaccactaattgaatactaaaggagaccgcataaggacatttgttcaatcccactaattcaaagtttgatatctttcaccctcattacgactttacaaaccatatcaaactaatggccaagtaataaaaatttgtcactttttgaaagaaaaattgacaattgacaaaagcatcaactcacgaacagagcacttgggaaaaatataacagaaataataatagcaactttgcttttttatcttcttcggtttggtaagttacgagacttttcttcctttaaattggtactcgttcatactttttcatttgtttaagtaagtttgcttccagcaacatcaacaacaaacctgtacctaacatcattcttttccaatctttccaaagctgtgttaatgtaatccattttcacagtctcaattgtggaactcaagttcttctctttacaaaactgaagcatttcctctgtttctttcatactcccaatgaaactcccggtaatacactttcttcctacaaaaatcgaacaagattacccaccattaaaatcaatttaataacaataataataataacgtaaaagagggaaaaaaaaaaaagctaaactaaactaacttaccaagcataaccatagggctgacaaattgaagtggggtgttgataacacccatcaaaatcagcttcccatcaagcttcaaaagcgaaagataaggctcaagtggatgaaaaacagggattgtgtcgattatatagtcataagagtcaaattgctcttgcattttgtcagcatcagagctgacaagatagtcatcagctccaagatggtcgagagcctcttctctcttcttctcagaagagctcaccacagtcacatggtgtcccatagctttggctatcttcacacccatgtgtcccactcctcctagccccaaaatggctccttttagcccactttgcatcaatccaaagtgcttcaatgggctgtaaatcgttactccagcgcatagtagaggcgcagcctgttctgcccccattccttctggtatatgtaccacaaatcttgaaaaacaaacaattggtcagcacatataaatggtaaaattattacctttttctttattgcattaattatatataacaaagtagaattatgtacttttgatcgaccaccatggcctcagcgaagccaccctgagtgggcttttgatcggtgtagacatcgttgtaagaccagatttttttattgcagtattgctcattgtccgacttgcatggctggcagtgtttgcacgagccgactatgcagccagctccgacaatatcacctactttgaacttagtcacttccgatcccacttccacaacttcaccaacaacctcatgcctaaattaattatccaatcagtaagttgaaagggaaaaaaatgttaaaaccatttgataaaacactaacgagaatttgaaatgcgtaccctgggaccataggataattggacatgcccagatcatttttgacttgatgaacatcagtgtgacaaactccacagcaagtaaccttgatgtacacatcttcaggaccggtttctcttcagaataatacataatataaagcaaattgaatattataaatacaaacaattacaaaccaagaagattgatttgatgatgatgatgatgatgaaattaaacaatttaaattaaagggtcacctcagtgtgtaagtgtaaggtgagagaacaccagaagagtctctggcagcccatcctgtaatggttctctctgccccaatgcttcccattttttttcctgaggatgatgaagacagatatagagtttaaagtgagggtatggtctgggtataactggataggaagaaacaagaaagaagaatacactgtttggaaatactcttggagtgatgaggtaacgctatatatgcatttttatatagtgggagagagagagaagaacacagacaatatgggaaggagaggaagcgtgcgctttaggattttttttttttgagaaaaaatctatttattatttttttaaggaaaaaaaataaaaatttaatttctttgagaagcttgattattgacaacctattttcctttggtgggtcagggtgtggtaggtgaacttaccgggacttatctcctgtagagcaccacacacaagtgtatatattattcgaccacctaacaaacagaattattgtactatcgttaaaataaattaggaaatgccactcacagggtgggcataggggttgcaaagttgcacatcaaggggggaaatagtgaagtatcctagacccgaaataaaattggaacttgatctgaaaaagaagactcttctcaatcaagttttgcctcatgcttacgttacatttgcgtaaaacacaacctttttttagcttttccttttcagttataaaaaaaaataataataaataaagaaagaaaattagactggatatcattttactttaattattttaatttttactttaatttttttatattttctaagataaatttatttttatatgtaatgttttccatatatttttttaagttaattgaattatgtgctaaatttaagtagaaaataagaatatattgggtaacccattcataaaaatgggtacattttaataaaatataatatgaaagtatttttgattaatgaatacaaaaaaagagatattccttagcttatccaaaaaataataatattacaaaaaaaaaaaaaaaaactatgagttggccaaataaataaatatacagactaataatttttttttacagaaatacatcttacacacactttcaacccacacaatccacacttcttgggattaaaatcttcatgcaatgcaatggggtcagcaacaattaaaaacctctggcagatgaggaagcactattaattccggtgaaattacctgagaagaagaacaaactcaaattgaaaagcaaccataactgacagagaaaaaatctgcagaaaaactggtatgaaacatgtctggtacttgaaagcatgtctggtaccacgagactggagggacaagatagtgtgttcccagaccaccaataccccgaccaaatacgtg

SEQ ID NO: 44635 - DNA, 2995 bp, Cannabis sativa
ataattatgtaattttttttacacttttaagttcccaacatagtcttcttgatgtccacactctcttgctttctgttgcatttgctatgcaatcgcccaattagatttgataaagtagtggaaaactatcagtcatagtaattattttcaatcgaagatcctcttgaaccttatggagtctcccatggtttaaaaatgacatgttttataacctcatcatcgtaattttgtatggaaagagtccctttccaagtaaggctaagatctttgttgtccctaaggcgtataagcatgaagtgatgcaaaaaagaagaccctatcctgctttatccccaaggtggtgtgttgtgtatatgtaatgaagagagtaatgatcaattattcctccattgttctttctcattggagatttggagatttggtttaatgtcctgaaggaatttagtacggaatgagttttattccctgaaggaatttagtatggaatgggtcatgcctctccattgcatagacatattgtttatggatatagaaggtggcaaaaggaggaagtcgtttttggtaggtggtaaaaatggctatttggtgggctttgttgctggagagagttgaagaatttataagataaagaattcgtggagttgttgtgggaggttatcagaatttggattgctatgtggctcctcaaagtgaaagagttcaaagacattttttttctaagatcttgctcggaattggcagggtattttgtaattttgttttttggatttctctgttgaatggatttaccttctcttaatgtagaatcagccagtttccttttcttttctgtttgtttgttggcagaaattttctcatttttttattttattgttttaatttttgggttgcttgttttcttgccatctccgcactttgtattatttctcctttattgaataatacaatttgtgttgttttgttttgtaaaacaaatcccttgtttggcaagagggagagaggaagggagagggtctccctccaaactcataaatttagttagcacgttagacacaatggatctccacattggtatgatattgtccgctttgtaggattgcacatcgggtgagttttaacgggttttgggttttgggtttgggtgtacaaaagctataatcccaacccacccgtttgtgtggccgggttttcaggtctcgagttcggttgggtcgggtgcgggttggtcctggtccggttgggctggaactaggtttcagattggttgagcttttttttttttgaaaaatatgagttttttacaattttttttcataaaagtattcaaatttcagcaacctatttgtttccactttaaaaaaaccttgatattttgcctttttacaatacaatatttgtaatttctatattataaaaaatatttattacttatccttaactcttctaaacttattaaaatttctaagaaaagtaatgtaataatcttaatccattttcaaacaaaccaaaataatatccataatccaaaaaagaaagttcatagtccagaaaacaaagtccatagttcaaacaaagtctaaacaaaacaaacaacaaacatataatcaaatcaaagtattaaactatcaaagtccaaaccaaaactaaacaagaaacacataaacaaatcacactagattgtctaataaagtctaaaatcaaactcttggtgtagaataggatgaagttgccggagtagtactagagtgagtggcggggatggaagttgagccctgtgagctagtagtagtagaagtagcagcagctacaccacctctattgtcggtcttctttgcaacttgtaaattaaaaattaacacattagtataaaatgattgtaaattgaattattattagaaaactaaaccaaagtgtaataaaataccattcttaaaaatatcttctgactgtagctcgacctcatctggatcatcatagtactctctcgcaatgatgggttgatctccaccaatttttcaagcatattagagcttcaactgtcgtcggactgaatgagctcctaaaaggatctaaaatccgactcccatggagaaagctgcctcagaagctacagtggtgagaggagttgctaaaatatctcgagcgacgcttgacaggattggatatttttgatgaattcacgatgctcagtagcaacatacctctttttcctactcattaggcctagactagacatcaacatagaagattaacttacactaagattgatcatgagaatgaggagttgtttgagtcactggcaaaggtgactgctcttccaagatagtggatgaatcccatagcaccacaatacaaatcaaacaactcacgaagagtatgttcaatcttgctcaccatttcaatggttgtttctgcatcatgaaaagtaccaaaagaagaatgtttgaggtgattgagcttgtttctagggtaaagaactaaggcaataaaaagtgcctcgttacatttgtcaacatcttcctagtacttgtcatacttattcactatttccttcaacaaagggtctcctatattatctcttaccatcataggtggccccacctatttctccccattttgtcaaattcattaaagtagttgtaatttaaatcttcgtcaaacatgaattgaaacacttgcttaaatttgacagcacaagtgagcatgagaaatttcaaattccaccttgttaggacatctaacgtgaggagtcctctcgttggaacacctactttggtgacaaattctttgaaagttttaagcctagcaggggaagacctaacatatctcacaacattcctgatggcagcaattgagtagtttatctcctttaaaccttcaccgacaattaggttaatgatatgagcacaacatctcatatgtttgaatttctcatctaaaataagacccttttccttttatctgaaaatatccctcaaatatcgaatgaccacat

SEQ ID NO: 44636 - DNA, 3627 bp, Cannabis sativa
  modified_base (3594)..(3602): a, c, t, g, unknown or other
cctgcacataacaatgaaattggagaatgtttttccttatgaggaatttaatctccctcttcaaattttgacactcgttggtgtcacggttgaagtcattttgaaattgacaaaacatcaacatgtccctcttgcacagttcccttttgatgggaaagggctttctgtataggactgttccctaagtggccatgaagatggcctcaagtttctctgttaggagggtgaaacatgtatacttctcctcatggtctttctagttttttggcatgggagaagtgttaaacttccccttttgtaattatttcccccaaagttgttgttattgtgttttctcctagtgttcttgccactagaggtttgggcagagttgttagtacctgcatgtgcgcctgacaagtcatgggttgtaggatgcctgtaattgactattgttgacttgccctatctgggcttgtcggatagcttcttctagtttgatgaagttgtcaactcaggggtgattgacaatgatatttgcttactttataatggtggcagtgagatgattgatcacttattttttgagtgttcattatcgatggattttttagagcaaatcaagcagtggcttcattggggaaccacctcggtgtccttgatgagaatcagcaaatggataaagaaagcaaaaatggaaaaggttcaaaaagaaggttatttctgctgctgttgcagcgtttgtgtactcaatttggagcaaccaaaacaacatgttctggaatcatgagatggaaaatagtgatagaattgtatgtagaattaaaagtgtaatcaaaaatagaattgcttgtatttggacaaaaaaggtaactagtagtgaagagtattggtttaatacattataaagattatagatgtggtagtttctctaattggaggatactgttaggttgtaaaaatggtttttggattataatacgcttgttgttttaccaaaaaaaaaagaaaaaaaaaaagttgttagctctgtcgaagaactccttcatgttgtttcttgagatcctttggatatttttatagaagacactcaatggaaggatgccccctagtatggccgtatatcggccctcttctgtaaggcctttgaacttggtggcctcgaccatgaacttctagtgtaatccttcaaaggttctccttgtcgttgtttgacttcgacaaggtcttttagctacaatggtatgagccttgaggacgagaatggtgagtaaaattctcaagaaaactcagtccaagaattgaatcttcctagagcaagtttaaagtaccattggtaagtcatttctgacaaagttttcgggaatatgcgacacctcacatcactagcaatcttttggaagtcaagctgcatcccaaagtatttgatgtgcgccagtgggtcttctcgcccgatatacatcttccataatggaatctctaatttgggcaagggcaacgcatctatgtatgccgagaatgatgatccccttgattgatctagcttaagatctgaaggttttggaccagctaggcccttgatcatgtcccttaattggtctaactatgctttcatagaatgatctgttactatagggacttgattgacttgccctccttggaggggttgtaagctcagatgtgtcagggtttcactggccataatctaagagagtgtatggtggaggtcggctagacctatgttgtgctacaggccttggctagcccctccaggtagggctgttggctctcgctagccaaagcctatactaggtatatgtccatggttagcgatccctgcaccaagtagagcctggctgtctatgactccccatttggctgatgttgcctgtgtgttgacaggaggtagatcacattagttgctcgtgtttggtggatctagattcttgaagttatcagtctcacttctcaaattattattttgggtgtttccactcgtttctggcccgagctagttgaagattaacctttgggtggctcgttccccttagggactgagtacaatcccttggtcagccagagatgcatcagtaggtggttggccggccaaaggttagccgatgggggctattgtggagcatgagatcccttgccggccccccatgttgctagttgctgggatctagttattcttgccattaaactttcatggcatggcctatcctccttcgggtagggaaaggtctgtcctggttcctaaagaagctaatttgtcagcatgctgatagaacctccccgatctgtcaactagtcttccttggagtggatctctctgatgagatcctagtctcttctagtggttttttgattgaactgccttatcaggtcattggcttctttgttgtggcgatccagctcaaactggtaagattggaggatgtactcttggtcatccatccatcttaggaatttgtgtctctattgagtgaatacatcacaatcagcagcgcatggttcttcatttaggccgacttggtagacggcctctctaagtctagctaacttgagatcttccaccaagtccacatggggctcgccgattcctggtcaagtctctagagcatagtactggggacgaggttcagttgttgttcaacaaggatccttcctaaagtaggaggcgcctgtggaggattttgtctcaaaggcaggggctaattgctcgctcggatccatccattgggagggatggatgtttgtttgtgtcactctggccagttgtagttgctagattcgaggcacctatcgtggtggcaggattgaccaaatctgtagtgttcatgggaattctagtcgtggcttgaacatggagatcaagatctacagtcaaagggttttgaggaagacccaatgatgcagatggtgcaaccacagttctcctcgtgttaaccatggcatttaatcaaacatgatatcaacttgctctcaatgaaaccaccgaactattgacctcacaaattggccaaccgacagtggagtcatattaaactgatgatttccacatgctacataattagaactaggaagtaaaagaacacaaagaaaattttatagaggttttgtcccctcagttagcaggtaatgacctactcctcttttagttgtattgattttgagagataacactattatcgcttttggattataatacacttgctggttaaatattatcgctttaaatttgaaatacaaaaattaaggtaaattggaaaggggagacaatttcccaaaaaaaatattaaatgattacttcatcaaaacaaatatgacccataaagacacatggaaatattttgggtaaccagtttcacagcacccaagctcagactgaataagtcacgagcttagaaattgtagaattgagaggcaattgcaagggataaaaataaccttgaacgcataaaagtaattttactttgataatggtataagaactaattaagtgatggggcaggaacaatataaaatgcaccgcgagaaaacagagagaacagattcacatggaccaatccaaatagaagaaagggacaccgttgttggaatttattttaccannnnnnnnnatttactaacaagtatgttatttaa

SEQ ID NO: 44637 - DNA, 4398 bp, Cannabis sativa
  modified_base (124)..(128): a, c, t, g, unknown or other
gaaaacaacttgaatagatgtataataatacagaccccacaaaaaagaacaaattacattgtatatccactttacgttacttgttttaattcttacctccattttcatattctttaagatatannnnnttttatagatgatgttcccattagaccacttagatgtaaattatatgctagacttaagtagaaagtaggggtatattgggcaatctaatgataaaactaggtatattttaataaaatataatacgagggtattttaattttaatgaatataaaaaggaggtatttttcaatttttgctttatcagattacaacagcccatatatttataaaagcccagcccagtcaggtaaatagaaaagcccagcccactaattttagggcaacatccttatgtttattcccactctttcttcttcattctttctcagccgtggaacacatcttcttcatacctaaacctctcctccttctttgcgcagacaccaccacggtcggcagttttagacttgtgagtttcttcttcttcttcttccgacctaatctctttttctgttaatgattttgcttttagcaagttggaatcgacattgttgtttgtttggttttgtcatagtttgaatctggttgaatccatattttcatatctcatattagtttattttatgaataattgttattcgatttcatgtgtaaaagatacccttttgaaaaataataatcagtgaatgcttccaagttgaaaaaagtgattctttttgcgaatggttctcatttatattattctattatatgcagaagctaagctaccatggtgagaatcagtgttcttaatgatgctttaaagagcatgtacaatgctgagaagagaggcaaaagacaagtgatgatcagaccctcctcaaaagtgatcatcaagttcttgatcgtcatgcagaagcatggtaagtatatgcggaacttggcttttttcacacgtttaattcattacattgctgttgtgtttaaatgtaaactatttattgtgataggttacattggtgagtttgaatatgttgatgaccaccgctctggaaagattgtggtggaactcaatggaagactgaacaagtgtggtgtcattagtccccgatttgatattggagtcaaggagattgagggttggacagcaaggttgcttccatctcgtcaggttagtctaatcctatgaattatgattactaaattgtatgtgtttgcaacttgagcaggttcatttatattttgtactttagggattttgtgaacttgggattgttgaaaaagtagatttttggttttgcgaaatgctaggaagttttgaaattttgtttagggccacactgcaaattaagagttatatcttctttattgtatagcttagagtgtctgtctcattcattctttcatacaagctttcttacattcctctttatgtgaaaacttgcagttcggctacattgttttgactacctccgccggaatcatggatcacgaggaggctcgtaggaaaaatgttggaggcaaggttcttggtttcttttactagttctatccatgttactgagtgtggggttgtctttttgtcatcaattttgagattttctggataatacgctatgtaggtcgtttgttttaatttagacgatatttgttcttaaagagggagtttttgtttttggagttttgctactttcatggagaaattcatccatgtttctggtttcatttatccattagctcaatacttaatgcttctaccaagtttctcattactttgcggtatgtgttagtgttactgtgttagaattgctgaaaagtgtttactcaagtgatctaaaatataagataaatgcaagaacagatgtcttgttatcattgttaaacaatcttctatttaagaatttttaatgttaaacaaatacatttattctaaaagttttgacattagtacagtattttgtttttattttttatacaaagatggttttggtgttaatagtagtgtgcctaacaaatagtagaccggatgtgcttataatagtagggaagtcacttttgtcactgggatattattattgattacttgtctcaggaaccaaaagattgaatggtttcaatgattgatttaacaaagaagacaaaaccattgtcatcttggggacacagaattataagacaactattgaaaaacagtgtaacatcatgggacagtggggggtcatctggttcaaatttttcatagcagattccaactagaacaccattggcttgtgttttgttgagaaccaaatgcaaagtaacctgaactagattaccaatatgaataggctgtttagggtgttattgatcttttgttgagatgttaatgagaacatagtagaaatcagaagcagccaatgttgcagtcattaattttttaattcttgttgtccccagatctcaacccgcctaatgtttatattgagtgggttgaaaataatattaatccgtccaattaacccgactaacctaattgagagagttttttttttgaataatttttatatatatatttataaaaaaatagaaagttcaaactactatagtgcttggtttggacgggttaacccgactaaatcgaccaattcattgggtgggttgaattttttttttcttaattgggcgggttgcacttaaatttttgtaactcgatttttacaggtttaaaaaaatggataagttgagtaatacctcttttttattttcattaataaaaaattaaagcaaataaagtaaaatgggtatacaatgcaattttctctaaataaaatgtaacgttaacttaccaaactatgtacaccctttttaaagaagaaatattgttatttgaggtttaagacttgaacaattcaataagttactccattttttattgttagtctgctgaaaactgtacgagtttttatgtcaaaaattggatagcaatactttctattctaaagtataatttcattgctacattgaacggtcttaaatatagtatatacacactcaattgatgattgtggttacataccaaatgaaagtagtttatcatgtttcctgtcaagctctcaacctaataataatgagagacattttaagaagggtaatttactaatatcattggtgcaactaattttaataaatattataaaaaattattaattaattgttagacaatattttatggtggtgctagacataacaggtctcatagcaatgaatcgactataatccttttatatatatatttgtttagttttgaaaccaaatcgattataatccatttatattttatgtatttttatatttaggtctaaaacttgaatacaaaaatttgttgggtaaattttatttttatttttgttttcaaagaatgagaaattaaggtgagagaaatttggtgaggctggctgagttttgggtttgtcttcaaagctggagttttaataagtgtttttttatttgttcaaaatttcattttagaaataaaaaaattaaaatagttttgtattttttttttgacaaaaagaaatgtattttattcatgatcggacaaattatctactaaaatagtttgaaaaatagtagggacaaaccctcaccatagccacgacttggggaagaacaagcgacagtcgccaaacaattgactgccttgttcgcagatcgtttaataaaaacacaaaaaatattattaagatcagagattaaagtataataatcaaaaataactaaaccaaaaggagataataactgagccgaactatacagagcatcaatgatgcttttacaatccgactcaacaacaacttgatctaggtcttgttctttgatccagctcaaagtttccttcaacccaattgccttcgccaaaaaaagagagacatgatcatgcaattgtttagaccaatgataaatgacaactctatgataatgatgggccaaccttccaatcccaaaataaaaaggcccagacgtgatagaggcatctacattgacttaaatcatatcaatactggaaaccgaccaatgctccacacgaacacaagaattggaatccattgtgtttgcagaatttttgtgagcgatcttctattgattaaagtaagacaacgcagcaaccaccactccatttgcagcagaatttttattttgccaaacaagtccatttcttgctttccaaagagacaaacaaatcatcgcaacatgacaaaccaaagtcttcaaaaatcctatgaccagttgataaaatcatcctgaaaaatctatgaccgaaagattggaaatagccccatcaacccgttgccaacaaactttggctaaaggacactcaatcaaaatgtggag

SEQ ID NO: 44638 - DNA, 1009 bp, Cannabis sativa
aaatttccgtgtgacagtatatttataaaagttaacccaaatttcagtatttttgtaagtttcccttaaataatggggttgtcgttataagaagcagtagtgattttgttgtgagactttgaaattaataattagggcttaggccaataggaatagctaggccccactcactcactcactcacaccttccttccttccttccttgatgataatattcatatataccgtactacgtacctaattacgtacgtacgtaggttacgtggttggttttcatcaacttattattaattttgtccctttcaaattataacatcttcacatgcatttgttttctactattacatatttcttatccctacgtaaattgtttgtagtaccaaatcaaactacacatatctatgggctggtttattattcgatatattggattgtttttaattttttttataaattatcctaaagcaatcgaattttcagttacttattgatcaaaatgtgccaattgtcatgcctgatcattttcttaagagaaaggttaaacggtattagtagtgtctagtactcttctatgtgtcagtatcgcttggtccaactaagtatcgggtcccacatagtttaatataatagcttttagaaagtatcgttagccaatcataacatgacatatcgaaacggtactaggcaccactggtgcctaatagcaatgctcttttctttatcctagttataaatggaattaaaacaaagagaaatgtgcctctctcatttctagagcggatttttttgggattagatgacttgatcgtgaccatcatagtaatgtgttatttcatttttttcaaagtagatgcctgtaggttgcgttcagccgattgtggctgaggcaacatggcttgaaggaagcactaagttggatgaaataataagaattctcacgcgttgtgattgagtgagactgcaagagtgttattaatggtcttcatagttcaactcatatggtctcgaa

SEQ ID NO: 44639 - DNA, 1475 bp, Cannabis sativa
  modified_base (1373)..(1374): a, c, t, g, unknown or other
atatatgtgatatagtactttcttttagttgatttcaaaaaagtcagagtaagacggcctaagcaagctgttgtctctcctcgccttttgttcgcaacctcggactctctgaatttttctcaagcttgaaattgaaagaacacgccaaggtatgatttgtttctacccttgctcttcattccgttgaattgtcgtacttgtcgggttaatgttatgtgaatggcttcatttgcacgccacctgttcgaagaaattcctcatcaaatgtctacgtgatttcactttatgtgtagctcatttattgtatatttttagctgggctatgctccttttaccctttctttcaactagaatcagaacacataccaattttctataacattgtaatattgtatgtcatttgtttttttttttttttttggatttgacatgttttctggattaaaggtcatgcaattcatttctatccttatccatattgaaagaatagtattatgatggctctacacagtttcaatactatggcttttgatttatatacatttgatgattatgatgatgaagaagaagaaaggctttttcatcactttggtggagtttttctttacaatattattttaggttcggaccacaacatgaccacaaaatgcctttttgagaaaagaatcaaaagggcttttctattttctttctcttttttattatattttcttttcaatttaataagaaagacaacaaattaaagtgttgctgaggttatgtattaatctagcttagttagttgggtagttttaggctggtagctctatagcagttagcttattgtagttttgtattttttttttttaaaaaatgattatttaacttctctaatgtacaaaatggtcaaataataatgactactttctttgttatatatattttccactctaaatctttgacctttgcctgtaagttgtatttaagagtttactttggcaacaaattatatgtatttcatcattaaagtataccactccggtagagaaggcaaattagtcatcttcttctaattcatatgaccttttcctccataaatttgtataaatatatatatatatatatatatttatagcgattcatgaatcttatattaggaatgtcattttactaataaatactctttttatatgaaagttttattattatcaatgacaaataaattttaaaatatacaattgtccgtgtagttagtagttacattcaaaatttgactaaaaaaaaaaaaaaaaaagaaagaattgtgacctaaacataatttattattactattattatattattactaaaaagttaatgattaaaagtattcaatattaaattatttaatattnntgaaaaaaaaatattttttttttcagtaacaaaataaaataaattataattattttatgtctccaacaacacattaaaataaataaaataacaaataacaa

SEQ ID NO: 44640 - DNA, 2961 bp, Cannabis sativa
acactctggttggagaaaccgtatacaagttgggtacaggggattatatctttaagttggagccccatcttctcataggttgtcttgaacaggatgtttgaggaggcttcattgtctatcatagttcggtccactgttttgttcacaatttgtacttccatgaccaagggatcattgtatgggaagtggacatgattggcatctacctcggtgaaagttattgtgggttcccctacccgtggtacttttggctttctctcctctatggccaaaactgtttccttttgttcatactacaaagctcaggcatccttttcttgagctttgcccgagtctccagcaagatgtgaacccccaataataacttgtaaatgcccgtccactggtgcatgcatcaattggttctggttattctctgtttgggcgggttattcttcctgatcaaaaattcaattttctgcttcaggttattgcattcgttcgtgtcatggtcgtagttcgcatgaaaacggcggaacttggacatgtctcttttactcacgtccttcttcatgggagagggtttcttgtatgggacaatagactgagttgttgcatatattgtctctaggtcgtgtattaggacagaaaaagtagtaaattttgaagtattgtccctggggtgctgttcgacatttccaacaaacgttcctttctttttgttgccttgtgtgtcgttattagacctcttccaatttaagtttgaattgttaggatgttgtggactctgaacggacgttcctgccgaggtggtacgtagttgactcttcttttgttcgagggtttctacacgccaaacaacttctttgagcttaataaatccatctccttggtccaaaaattcaaccattgatcccatgatcagcctcttaatatccttccacagttctccaagtggcccaatgcctcccaatatagcagccaaccttccttcttcgatcaaccccttatcctttgtagcctttgtcgtaaatctgcttatataagctctgaggggttcccctgtcatatgttttacctcgactagatcttttagatgtgagggaagttgacaggaggacgaaaactgcgttggaattttgaggagaaagcattccacgaattaaaccgccttggaagcagcttgaagtaccactactgaacggcttctatgagtgtagtagggaatattctacatctgacatcacctcataccccttacaaatccatctgcatctcaaagtattttatatgtgataagggatcctctttccccatatacatcttctaagttggcatcttgaatttcgggggtagtttaaggacttctatatttgaggagaagggtgatctgcatgcctggtctagctcaagatcggtgagttttgggctagttaggccttgtaccatgtttttaagttgatccaattgtgcttgcacaaatggatgaactagttcatcctgttgaccgacttgtgtcacgctaggatctctttgaactggaaactggatgcggatatctggctggacagctagtgggacatacttttcgtccaggcctcttcttttgtttaagtaactcttaaggtcatgtaccacacccaacctattaaataccgaggtataaggtggtcttggcatctgacttgtttggccagagatttcagttggggtgaagttataaggtataactccacccaaaggacgatccgaaaggatttggctatctaccgtttggcccacaggttggacctgtggccgtggattggacagttgaccattgtgagtttgtacggtatgcccagatccatacccttttgaactgcccaaaggaatactatatgcggtagctggttgttgattagcgacttggtaggccctccttatcactatggtggcctgccttctacaatcatcaatggctacttgctgagcattgaaagtttccaactccctgtccctccattctataaactgctgcctctgctcgtcgaatgcaaggtttatagaggcacggagatcctccagatcatggtgtaaagcgttattatgaccttgcatgagtccaatggctattcggaggttttggatctcggtatcatcttcaattttcctttgagaattagtggtggatgggacttcagtgttgggagtggattaatcggctgctgaattagtgttctcagtctcttgcatgcctggtgtgatctcagccagaggggaagttaactcgtggcccacaataggtggctgtatattggtctgtttagggtttgtccctggtggtcctcttgtattcccaggggttagcacattaggatctgtcaccatcgggtcaccctgattagccaggcctctatgagtttacaccaccatcgtgtacccctgctaaaacttaagacaaaaagataacttgggtttttgctctcaatgaatgcaccaaaatgctgacctcactttaagtcaacgacagtgagtcaattaataagcgattaagaatgtaattaaaatagagcaaaaaaaaaaaaacaaagtaataaagaacaccagactgtaaagaggttcggccccgtgagtgtggtaatagcctacacttcttgaattgtattaactcgagagaaacaacaaagtgtgtttctctctaaaagctcttacaatgaatctccgagtaattctcttagatttctctctctgaagaaattctttcgatccctttcacagtgaggctaagtcactatttatagggccttaatgcatgagggaaggtttcccttttgcttacaatgtataaaataaaaaaattacatttattacataattatgatacacaaaacaggaaactagaataggttgctatatttctctgatttaatcccacgattgtagggattcccttcgtgtcttggcaacgcaagattactctgaagtgattaactctttgga

SEQ ID NO: 44641 - DNA, 1422 bp, Cannabis sativa
ggaaacagaggttagattgtgggggaaaggtgacctggtcctaagcagagtagctcctttaattgatgttatgtacgtaaaaggtctaaaggcaaacctaaccaacatcagtcaactctgcgacaataactacattgtaagtttcactaaaactcaatctcttgcttcaactaacaggtgttcaatcttgacaggaaatagaaccagtgacaattgttatgcattgtacaatcaagttgtgtgcaaccaatcatttcttgataaaccagatttgtggcactatagattaggccatctgaactttagagacctgaagaaaattttgaaatcgcaagagttagaggaatcgtagatagactgttgtggtcatgccaactaggaaaacagacaaaaacctctcattcttctgtaaacatgcttctaaccttaagggtgttggaattaatgaacgtttacctgataagttctatgcaaaataaaagtttaagtggtaaacattttgttatggtcttggtggatgattactcatggtatacatgggtagagttccttaaagaaaattttaacacctttggacttttctcatcattggttcttcgacttcaaactgaaaaggactccaaaattgaaaaagtatatcagaaacgaagcgatcaaagaaaggagtttgagaactcaatatgctcatatttttgcagtcaattgggaattcatcatgagtttttagttccaaagacaccttaaaaaaatggggtgattgaaagaaaaaacggaactctataggaaatggcacgagttatgatacatgccaaggatattttagattttgagcgaaagcactcaacactacatgttacatttgtgactgagtgcatctacgaactagcacagctcaaactgcctatgaactctggaaagggagacctctcaattcatcaagatctagttcctccacattcatgatttcttcaacaaaggttactttagacatgaacctcctgggtaagacttcaaggaccttacgagctagctttgcattagagtatggatttccaatgtatatgaatcatttgagatgtcacacaattcgacatggaactctgccattgtctcttcttcctccattgatagattcctaaatgcctttgccaatgctcgtagatgggaattctttacctcatcagtcccctcattcttgatttgcaaattttcccatgtctctttaacaatttcacaattggcaatagaccttaaattggttcgtagacactattaaggagagcatgcattgcctttgagttgaacttggccccctacagctcatctgaaatttatagactcattggtttaggcctaacaccttcatcttcaaccacggttgggcatttccaaccgtcttcaacaaccatccaaactctttcg

SEQ ID NO: 44642 - DNA, 1902 bp, Cannabis sativa
tatatatatataaataagttacaactaaatactaataaaaaaaacttatattgtatagacaatttaaaatacccaagaaaataatacaaaaataatcttatattatatgtacccataaaaaaatacaacatatatatagatattcattttttttctaaattaaacattaaataacaacaaaaaattaaataacaatgaacaaataattggacaacaaccccagggtaaagtaaaaaattattagacatcaacacattatgtcaagtcaaatagaactgaaaaacaacacactaataatttaaacaattaaaaacaactacaaaatgtgcaacaactcaaaaatatatgtacccataaataaatacttatatacttatttttctattagttaaacaactaaataacaactaaaacacaacgagataacaacactacttaaatatatgtaaattaatttgacatcaacaaatagtataaacaacctaaaagaaacaaacaaacaacacacaaattatctcaataaaacaagtacaaatcacctatgtaacatgaacaactaaacatacacacattgacatgattgtgacacactcaaattgcatacactatatacatacaatgatgtttaagtagtctaaactatacaattaaaagtgatacggttctcatataatttctatgataaaaattaaatacatatcatcgtgtatgtaaaaatgttgctactacttttgtgtgtttctagcactactcatacttatttagaaaatgatttaatttgatatttcatcttgaaaatttatttgtttcacttgaattggtagggattagaaataatttagttgctatttgtattatacttgataaaaaaaatgcttgaataataacttaatgatttttttttttctaaaaaaaataatttgaactaatataatttagggttgatgttttgttgttttgttgtgtttatgctgctatattttatattgttaatacaatgagttgatatataagtaatttttagttgttgttttgaggttatttttaagttttttttgagttgacacaaaatgttgatacttagtttatttgcctattaaaataaggttgttgctctgttcatatttaattgttcaaacaaaaaaaaaataaatatgtatatctttttagttgatttttaaaattaaatatattttttttgttaatacattaagttaaatatgtattttatagttattaatttattaatttatatatatacattaaagttaatatataatctggttgattattagtaattatttagctgatgtttgatttatacggtattgtgtcaataatttaaagtacacacacaaaaatagaagaaaaaacccataactaatcatatatataatttaaattttcagttgaacaactaaataacaaccaacaaaccatgaaataacaacttcactataatatgcaaataaaataagaataaaaataattgtacatgttgaatcaactctaagagatagaaaaacactaataatatataaaataaacttaaaaaaatttacaaaatatttatacaacgactcaaaaatatatttaccgatgaaaaactaaatatatactcattttattctcttaattgaacaaccaaacaacaacaaataaacaacctgataacagtcccactttaaaataaaattaattaagcataaacaaattgtgtcaacttaaaaaataaataaaaacaacacacaaaatattcttaaaaaaaaaaaaaacttaacagcaactaaaaatcattagtacaacaactcaaaagtatgtacccgataaaaatccaaaatatataaaattttatttgatattttatcttggtaatatcttttattcacttgaattgctaag

SEQ ID NO: 44643 - DNA, 1733 bp, Cannabis sativa
  modified_base (63)..(69): a, c, t, g, unknown or other
  modified_base (840)..(840): a, c, t, g, unknown or other
  modified_base (922)..(926): a, c, t, g, unknown or other
taatttttttttatttttttatttcgggcccccggaaagtgtgggccctaggcacgggcctannnnnnntatgcctagggccggccctgtccacgacacagtaataccatacaaccaactattcaaccaatgtaaaacttaaaaaatgatgctctcacctaataatttttatacaaaaaagtgtaaaagctttatatttaaacaggttaaagaagaatagaactacaggttactaggatgggcaacatgtcacatgttattgaacttatagtgtgatgctaacaacatataatgtggtccatcaaaaaataaaaaaacaccatataatgtggacttggaaaagaagaaaatatgaaaataaaaatgcgtctaggcatgttattgaacttaaaacattttacaagctcaaatttaacgattcaaactcattcttttacacagcttgaagctattactttacaaagtagattctacagctttgacattgaatagtccaaagcatccacaagataatctgcaacagtaaacaagtaaacagtaagtcacactccttccatatcatataccaccactttgtttctcagtaagaatgagattggttaggggtaatagaatggaatgaaaaagaatcaaattttactctattcttttgtttaattgcagttaaaatattgaaatattattagggaataacttttcactattccatttcaaaatgagcagaaagatcaatttaatgcaagatgaaaaatatataagaattttttaactactttcttttatatacatattaaattttaagctaattaggatttttgccccttgaattttgacatgtantaaatcatgctccctaaactttgaagaccgttaaaatttcccactgaactattgagaatgttgaatttaaggacttttgtcnnnnnttagtaagaaaagtctaatatggatgaaagtccaaaagcatgatttggcacatgtcaaagttcgaaagacatgatttggtagatatcaaaatacggggagtatggtttagtacatgaacaatcacctaattagtaaaattaaataaaattggacaaaagtcctccagaaaagttcagagagcataatttggtacatgtcaaaattcaagggataaaaatcctaattaacctaaattttatttcattctaatctaatttttatcctcattctaattcctattacatttctattagtgtattttcatttttgacaactaaacgtaccctattgtgtttaagagaggcaagaataatacctgcatcatctttggtaaaacacatgggtggcttgattctaaaaacattcccatgtagtccaccttttccaagaagaactccgtgctctttaattaggaaccaaattaggtgtcaattgaatagttggggagttaaacagcagaactatctgaagggtttcgatttaacatgtttacgtgaataattcaaattcgtaagtacctctcattttctcgaacaaaacactagtttcatccttggcaggtgtcttctctgctctgtcagttacaagttctacccctaccattaagcccctgcctcttacatctccaatgactgaaaaagggaaacagtacaggaaaacacaaacatataataatcaaattgccacaagtcatgtaagaattagccgatttgcaaaataaattagggaaaattagatgtgcagaaagtgacaaaaaataagataat

SEQ ID NO: 44644 - DNA, 977 bp, Cannabis sativa
gtgcatcaatatatccattttaaaggaatgtattgtagaatttttcaaaataataatagcctacaccaactaacactatttttcactttaataatcacaacagcttcatcgttcatacatttttttttttgaacacacatcgttcatacattacatactgaaaaaccccataatcatggctttcttatactctcctccactatccctcgccagtgccaccgtccattcttccccagctccgagattactcctcaattcttctccgacatcaacgtcattaaatcaccacttcccaacctccgaacccctcaccgccttccacacgccgttaactactacttctgatccccagaagtggagagtcagtgtctcattcttttcttcactcttgcccaaaaaacgccaagagctcaaggaagagcttctcgaggccattgcccctcttgatcgtggcgcagctgccaccccagaagaccaggagagaattgatcgggtttctttctttctttcttttcttttctttatctttttctttttatactaaactttttggttttgttaatttttgacctttgaaattaatcacattacttaaaatgtaaggaatatttgtatggtgtgtgtgtgtgactgtgtgttgaggtatgaaaatattattcatgtttgaattttgtatctgattgaacacaaatgttggcaagcaaaagtaaacactatggttgcattcttagggttttatgctcctcaatggagatccccggaataatagcttgcttgtggaacttggtactttaatgggggtacaaattagttggaagtaatgaatggaatggaatagaaaggaatcaattttcattttatttctttgtttgtttcattttaaagtatgtgtagaatgaattctattgtgaaatggaaggacatacaatttttatgcattttaatttttagtcaatcttatttctattcttatgttt

SEQ ID NO: 44645 - DNA, 1005 bp, Cannabis sativa
atctaagaggctcttgaagcataagtaatgtcattgattgaagacaggaagatgaaacttgagattgaagccaatgcacatagtgacattctcctcagtcttggtgatgagattttgagagaagtttcagataaggacaaggccttgggtctatagaacaagttatcttcaatctcatgaaaaaatgtcttgcaaacaagttgtatcttaaaataatagaaaacacgtaattttaaggttagtgacataagagcagagctcgaagaaagaaagaacatttctccaaaggagctagtagggaaagaaaatgcacaaggagaagcaggtgagaattaatacacgtggacaaataagagcatatagaaggagggaaggtaacatattttttgtgcctataaatagaagattgccttgttcgaaaagacgaggaattctcaaccacactagactagtcaaaactcaatcgggatacatcttcaagaacacattcaagctcgagaattagcagacccataccaagttaagtgaattgagaagaaaacttataaaccgatagagattgtattttgattagatcaaactcgatgtaaagaattgaaagtaataatataattttattgtgaagctaatttttggcataagcaatattgttaagttattcagtccatttaattctaatcctaaacctaatgtctctctataaatataatgtggtagcctttaattcaagtgactaacacttctctccttgtctaacaaattgaatcaaaagaaaggcaggatataaatatttttagtattaatattgtactaataaattaataataatatttactaattgaaattaaaatactactctaattaaatttatagttagttatatattatttatgtaacgtgtctatatttattaataaatatgctaatttttcttcttaaaattgtaaaattgtacattttataaagagtttatgtaataactattagtatattttttaattaaaa

SEQ ID NO: 44646 - DNA, 4439 bp, Cannabis sativa
aaaccataccctataattaagatgaaggctgttgaaatcgcaggtataaatagattttatttaattagttagttacggggacgactgttaattagatgatgaccgtacgaactgcctctggtggaccttggaagatgtctgatggattcagccacagcacaagtagacttacaagatgaattattgtaaatattaattaaaccgaacctgtcacttaggcttttcgatacctttgctgtagcaatattccaaaacttgggttgatgatcatggccgtggttgtcatggtgatcatcattttcatccttggaacattcaactagagcagcaatgaagggatcccatttcaagggctgcttgttattattaacactaatagtagtagtactcttcttgaacactttcttggtggtggtggtggtactggtagtggtcgtagggggcagaggaagaagaagaagagaagagtgatgatcatcttcttggtgtgtagaagaagaaggcttgattttcttggaatgttgttttttggggattcctggaaaatgctcccaagaaaatgggactccacgggaaatgcgaagcggcgtggctggactcagaggagagtcataattgtagaatgaagaagatgagccaagagaggaggaagaatttgatgagaaagatggagttcggcgagaagaagaattattactataataataagatggatatttcaaaggacgatgagagagagtagtgcatgagtcacattcatcatgatcaccatcatcatcatcatctttgcaagtagtgtagttcatgggcgttgatgaaggttccattttaggttaagagagatcagatttacttgtgatcaactatgatctgacacagagagagagagaaagagggttatgaggtatagaacttctcttaatgttcttgtacttcttatacatgtatacgaagagaaaaggagctatattttattttatttctctttctcaccctcttttcctttcttttttgttagtcatgatttcgttgttttctttctccacattttattttaatttcaagaataataattgaatagaaaggggaaaatattacatcattaaaaaacatttatttactactcacacgaccccattgcatttatggctagcctacccacatacaagggaaagaaattaaaaggaaaaaaaaaaaagtatcaaggacaaaatggtaaattagacggtacttttttttgtggatctgtggtttgaaatgcattatgtcgaagtgactcttgtgttgctcgaaataatccatacttattaaacatgacaacgagatgtttgaatattccatgaactttttttttgtgcatgaaattcttttatcaatttcactaattttttttaaatgattaatttcacaaattagtgtaacttcaagaagattattttctaattcacaattttccataaatttttttcagtgtaagatcaattatttgtttaacaaattttcatacctcaatataaaatgaaaaatttaatagaaagattactattaattgtaaattaaattacactaaaatataagatatttttttgaaaggtttgaaaaatatgacaatttttgagtttttttatttatacaattgtagttaactttttttgtttggctaaattacggcatctaatgaagtaaatcatttatacagtatacaagttctcttttttgcaaaactacagtggttaattgaagggtgtaattcaagaaaagaaaaaattgaggaaattacataatatacttcttttaaattgatacttttaatttttatcttctcttgcaaagtttattacgtttacttattttttcaatcattctaccaattttatccatatcacttcacaatagtctccattcttctctaattaaaattttgccccaactttccacaaacctacacatctgttaacgcagatttttattaacgataatgagcttattttcgtgataggtttagcacagaaattatcagaaatttaagaaagaataacataaccaaaaaaataataggtctttacgtgattttgcagttaactctgtatagtccacgagtcaatcttttttagatttttctgatacagaattagggttcttttacaatcagtgtacttttttttctctcaaggatttttcgtcccctttttagtataatctgcccctatttatagtaatataggtagacagttaattacattcaaattcaaatcccacaataatatttcctcaaaattgtgggccttaattatgctccacataaataaatatagttattatttgaaaatcacacaactgtcatttaaatcgcaacgctaacgtgaattaagacacgctgtaaaacgtgtctcgttgaggcgtctcgccttgtacgtgaacaacttgatttatttataagtcttccagcaatggcatgagcaccaatgtactgagcaaacttaagaactgctctttgaccataaggccttgcagactggacaatcatgtcctgggagttctcaatagcaacaataaccctggcagcgagctggagcttgccaggagtataccttcctatacatagcgagatggatgtctcgctatgtgttatttatgtcttccttgggattatgccttcgaacgtgaaatagtttctcgtcaatacgcgaaccaatagtttgcacatccttatctcgcttaagaccgtgcagtcagtgagttacaaatatactctattaattctgcatttaatgagttattccatttaatatttattgatataattatcaatatattcattgattcatatttcctaaggttgacacgtgttatcctttgaagtaccagctaaattttgggtataacaattgccctttaaaaaatcatttttagtgaaaagtgtattttaaatgattatagagggtatatttgtcataatctgttttaaaaaaaaaatgtgtgcctttgattttggcagttttgtagtttcgaggcacatcatgagcattaaataactattttttccacttccctctcgattctacccgttggatcatttatttcttaatctaacggggatcaacccaatggtataaaaccaaataaaaagccaccttttgaccatcttcgtcatttcaaaaatattttttgagctttttctgcaaaaaactccatcccagttttacaaagctttgcatgccctcattgtcacttactttctttttgtgagtatattcagatctattgttcgacctcaatgattcatgaagatcatcacgtcattcgctccattcctagttgcaaaatcgttcatcgcaccacaaccagatttcaaacagtaagtgtctcatcccttttttatgttttccgttaacgataataaagcctatttcatgatttatttgcatataaataataaaaataagaagaataatgcaaagatcacaccaagtttattacgtggttttacagttaaaattttgcatagtccatgagtctatcttatttgatttctctgatacaaaactagggcttttctctcaagattttttatccctctttcagtacattctgtccctatttatagttacataggaaggcagttaattacaatcagattcatatcccacaacaatattttccctgaaattatgagatttgattacatcccatgtaaaataaatgcggttattatttaaaaattacacagttgtgatttatctgctttcactgggtcaatgctgacgtggatttagatacgctgcaaagtgtatcttgctgggtcatctcgctgagatagcaacaataaccctaacagtgagttggagcttttctcatgtcttttcgaggttgataatgtaaatcctgtcatttctgctattgaagacataacactccatctgacattcgcagttcttggtgataaggtaaacttcaacagtcaacatcatgtaaatgtcagcttctatttgagagagctgactcaacggagcagtagatctcattgaaagatgtctagagctgattagtgaaggtaccaggaatatgccttcctatagcgagatagatgcctcgctatttgttgttcagattcgtgcaactgttatacttagtttgtataatgtatattatactctaagtgttctaacagtcaacatgtctcgttgacaccactttatatgcagcgatactctaagtgttctaacagtcaacttgtctcgttgacaccactttatatgcaacgaggttgatgcctcgctatgtattattgacgtcatccttatgattgtgtctttagatacgaaatagcttctcgtctatatgtcaattaatagtttgtacatccgtgtctcgcttaagactttacagtcaacgagttatagatatactctataaactccgcatttaatgagttattc

SEQ ID NO: 44647 - DNA, 897 bp, Cannabis sativa
atacattttttatatgcaaaaatagaaaaaggtctcttctagatacaacaacataattttatttcctctttcttgtgttatattcagtattatattgtatgtattattaaaataataattgtaataatttattaaaaaaaattagacattatgaaccaaagatatttgatgggatacttgaaactctttacaagtttggccatatataaactaaatttctattaatttacatttattttggggttcaactagaaattgaaagagagagagtggtaggtgacagggagatagtgccccacctatcaattatgaaaaaaaacttgattttttttttattttttttttattattattattatctcttataatttatttaagtaatttttttttcccaattgaaatgtagggtgggtgccactccctccctcgaaccttcgttaactaaataaatgtcataacattaaaaaaggaggggtccaaaacgacgggcgaaggttactaaaaccattgccgcgtccataaaacgacaacttcaagtaatttcatttattatgtaatttaattaatttatccgcaaattaagattccaacttgaggtttcgagttaggaccccaatttaaattttaaataaattattcaggttaggagttaggaccccaaaattcactctttttattgtccacgccgtgtattaaagataatttgacttacaatacatatttttagaattttaataataataatatcactaattcaataatatgttgatgttattgttaaaaattgtaaaaatatcagatttaatatattaaattaggcagatattttttaaaaaattaggcatgtataagaaatcaaaattaattttattatcggggtgaacacaacaccaagca

SEQ ID NO: 44648 - DNA, 1977 bp, Cannabis sativa
tctctctctctctctctttcacacgcataggctctttttatcacttgagattttccaactccattctcatattgtaatctttagagagctactacaaattccacaatacttgtgatctgagagtattatctctggtatcaatacaaccaaaggggagtaggcattacccgctaactaagggggccaaacctctataaaatctcgtgccttatttacctttttgttctcattgtgtaacacatggtaagtatcagtaataaatatgactcaactatcggttggccaaatctaaggtcaatagttttgtcctttcattaagagcgagttgttaatttatttgatcaatgtcttggttaacacaaagagaactctggctacgacatctgcctcctcgggtgttcctcaagatcctatgggggctgatcccaatgttcatgttccagtcataactggaatcttcaccaacttgacagatgtggcaacccttgccatcttggcaggcaccatgaacctggccaccaaaactggtcatgtcgacccaaccatcccagtgggtctcaataatcgacctatgtcacgtagggaggaccctccacttgcacctcctaatgaaggaagaacccacgtggagcaacccccaggcaccaccactggatttggtccccggtattaagttggagagacagggccaagaatcggcgagccagccattgacgagccccatgtagacttgagagaagatatcgagttagctagacttagagaagttgtttgtcatgttagccaaactgaagaaccatgtgttgttagctacaatgtatttatgagatggatggataagcatgagtacatcctttgatctcacctggcagagctggaccaccgtaatagagaagctagaacttgataaggcagttcaatgagacaacagctagaagaggtcaggatctcattagagatcctctccaagggagactagtcgacggatcggggaaggtctattgataaatttttgaactaggttcctcaagaaccaggacaaaccttccactatgagaaggaggacaagtctttccatgaagatctggtggcatgaacaaccaaatcctagtagctagcggtttggggggccagccagggatcaggctcaataaagcccccagccccttggtggtacacctctggctagccagcagggtgaactcctatctcggggtcttcgagagcgagtaacctaaatgccaatctttaaccggctaggtcttggaatgggtggaaacacccaagataacaacttaagaagtgagtctagtgaatttagatatctagatccacctcactccaacatttggtgtgatctaccctctgtcaacacacaggctacaccagccaatcaggggagaacgggcgatgagaccctattcagcatagggctagccaaccatgaaaaactacccataatagggctggctggccaacgcgagtccccttttctaggagtggccgacccgatcttggctcattcagggctgtagcccattcaagaggggcaatcagccaagtccctacagcaacagatccttctttgcaagcacactcggatcaaataagtcacatgattaagggcttagttggcccaaaaccttcagtgtaacacccgtatttaaaagcttgctaaaccagaattaatcttattatattataattatataaccttataggtcgggatcccaagttttaaaacacaattgaaaaattcatttactaatacaaaatcttgtaatgtatttttttttacaaacaataggcaacaataaaatacaactcaaaatgttgaaagactgaaaccctccaagctgcactgttgcgatatgtacaatcactgtcaagctccaactcattgcttctctagcttagcttttccttaccaacacaaggtagcaaactgatgagtcaacaaactcagtaagatatgca

SEQ ID NO: 44649 - DNA, 1637 bp, Cannabis sativa
tcatttgtcatttatcttgccagtataccaactttgctccctgttcgagataaaattttaaaacaatattcgtagcgaattttttttaaaattccatgctcttaaagtgacgtgtttgtaatgacattgagatttatttttatctcgttgatataccgactttgctccttgtgcgagatgaaattttgaaaaaaaaatattcatggcgaacttttttaaaatctcatgcccatacagtgacgcgttggcaatgactttgagatttattttgtggagttgcggagtatagttatcgcctataccctatatggccccaaagttataaaagtattggattacttttgtaacttgtttgggtgagggcgtaacattacaaaagaaatatttttgcaaaaagtgcaaatatttattgagaaataaacaaccaactttctaaaaaggatatttaaatgttgtgcttttgaaatggcacttgaaaactaaaaaactaataacattattcaattttcaaaaagtaattaaaagcttaaaagagtggctccacgtggcttctcctagccacttttgttgtcttggcaagtgtgttcaacgattggggttgacctttcatcgccacgctgttacattctcttgccgccaactgatccccacgtactatgccattcccatgatttgttgaaaactttacagccaagtgtcttactgatgtcactgcccccagtgcaaaaagcactagtcttcccattattacactataaacgtatggaatgtccacaacgacaaattttgtcatttttgttacagtttgcggggcctctcccattgtgagagggagagtaatttttccaatactcgctatgccttcaccagtaaatccatataattatgtggggcatggttgcaagtcgcgagtctctagtcccatcttgtcaagggtactggacttgtacaataagttaactccacttccattatgaacaagtattctcctaactctcttgttggcaatttaggtggttatcaccaagggatcattatgtggcatccgaacatggtctccatcttcttcattaaaaataatagaattttctgtatgtggttgttttgggggatgctgaggtggtggcacttgcgcgttgttgctacttttcagttcattaatgtagcggttttgggccccattgctagtttcgacaaagtgttgacctccaacaattactaaggcatcatctccttccaacggtggcgccatatctacattttggccttgtggcgggactggcgcattgtttggcgtgacctgggcattgttttgggcttgcccttgtgctcgggcatttggttcgtgattgttgcgcgcataacgagcaagtggtctggctagaatgagatcatcaatttctattttaagactttgcactcattggttgtgtggacaacgtctttgtggtatcaacaatactttgaggtatctcgactttttctgattcattttattggctctagaactctaaaattcacaattttctcattggtgaggaaaattatttgtggcgtttttgtcaattatgtgaagatggtgtaaaaagggtggttttatgccctaaataaaactccatttcaatgtaatctatttt

SEQ ID NO: 44650 - DNA, 2026 bp, Cannabis sativa
ttctctgtttccaatgacaacaagctcaagctcaaattcttccataaaaaaaataaataaataaacaaataacaacaggccaaattgtagaagaacacacaatataaaaataatattacatgcaaagtcgttgtactgtatattccctcactcaacaaagtcttccttttttttcttttaataaagaatcaattctcttctctctctctccaattactaaaacctttgttgttaagaaacccaccaccattgatgaattgaattgaagtaaagatagagtctttatagtattattagtagagttacagagaaggattatgatcaagactcaagtcaatgtaactaagtaacactaaagatgaaaggagaatcttcttcaccatttccaaataaaaagaagattttttcttcttctcaaccatttcagaataggaggaaaactaactatgtttcttcttcttcttcaacaactcaagttaagaagaaagctagtgctgcttctgatgatggttttactgatactgtgttttcttggtcttttgatgatgttttcaatcatgacctttacaccaacaaggtttgatttttattttcttaactattgcctttcaattagttatgatgagaattgagattttaagtcttttggttaaatgggtctttgactaattgtctttactggttgattagacttggtccgtacaaagggtttcatctaaatactgtcttttgaatggagaagatgaaaatgctttgactttaaattaattttgtgtatatatacagtttaaacgttaattatgtttattataagagtttacaatgtttgtataactatagtttagaattatataaatcaagttttccattgttgtttgttgtttgtttttcttctggtgttatttgcaatactaattttatctactgaaaaattggtgttagcaatagttatagatttgctataatctgttgttgagttcataaacaaagtctttattttttcttttaggtgaaaaagattcctggatcatttcgatcagttgaggattacttggagtcttatgacaaccctttatttgaagaaactcgagctgaattgcactcgagtatggaaatgatgcatcgagcacctttcgctgaggtaatttcttttgaagaagctttactaaatgggaaaaaactataccaagttcgagttagttcttggagaaacgtttctagtaatggtggcagggaatcttacaagacaattcctggtgacatttttgttctagcaaatagtaagcccgaaaatgttaaagatttgcaaagagaaggcatgtcatggacttttctatctcttgttgatcatcaagggggtgtaaataccactcagttcaaagtcaaggcatcaaaagggtttaagcatgagaccatgaagcagcagtcatcgtcgctctatgtcattttcttagtgaatgtaatgcctcagataagaatatgggaagcattgcatatgtcgcccaatctaaagatgattaatgaagtcttatgcaattctggggtaagctttcaagactttttatgtactcttcatatgtattgtaaacattcatttagatacagtttatttaagttaaagaaaaggtgtaattgttgctaaagacactctctaactcactctttctaattctcaattgctaagccactttcattactgaagtttctttctctgccaatttccttatttgttatataagtacatatttatgttttgactgaaagtcctgaccctatataatgacaggctaagattcaatgtgatggttgttctgaactgagtaatggattctgggatgagaaatggaaggagaataatttgtgttccgaactgaatgagtctcaatctatagcagttttatcatgtcttcatatgatagactgcaaaaacaaatcttctgtgcaacttatagggggtcccccagggacagggaaaactaaaacgaccagtactgttctcgtgaacctcttgagaatgaactgtaaa

SEQ ID NO: 44651 - DNA, 3210 bp, Cannabis sativa
atgtatgatgaaaagacaagagagagattagaacatatcgaagagcctgtccttaacaacaatcaaatagtgaaatgaatatcaatccaaatccaactaaattaagttttattgaactgaatgaatgactatgaaaaaacactactaggaaatttactactgtgttattcttatatgagttatctacaaactaattagaagtaaatgatgcaaatcttttaagaatttagaggttaagcttgtagtgtatgaatttcacaccataattgactagttgtttctcttttgctctttgtttggaattttttaacaattcatggattttacaagaaaatataatagaccaaatatcgactagttcacaagaaaatgtgatatgaaaagaaatatctcatcctaatacaaagtagtcaaattcatcattagtaataaagtaacacaatctcaaagaaagaactacaaacccttttgcgaaaaaaactaatagaagagtcgtacctatggaaaaaaatcgtcctcatcatcattagtaatcgataatatttctaaagaaggtgaaatccacatcaaggagtccttcaattccgacactctttcaggcttatcaatataagtaataactctgagatgcttccaattaagcaaaggagaacgacataatctcttaaacttctctggcaagatgagagccttcatgcaaaacgtataaacatatcaactaatataatgtaattacatactaaacaagtacaaagttgaaacaaagtcactaaatcaaatgaaaataatgaaagtatgtacctttgctgtgtaaacaattaggcttagagtattccaagaacaatcgagattcaaaaggaagttcaacatattggtataccagtcggtgttatagctcattgtgtcatagttaatcggcggatcagaaagtgttattttcccatccaatgaattagatgactttatcgatatgttgcgattggcatttcctttataataaaagtaagctaattctggagccgattcaattgtaacagcattgaccatgtcataaaagtatttaaatttgaaacttttcaagtgttgaccagaaactttaagatggtccaaacatgaatcgtagtctctcacagtcaaatgttcgagaagaggaagattataaataagagtttgtaatgttggctgatattctgcacagtgaaacacagtcaaatttctaattttcttgcaagaagagagattcacatcatccatgttaagaccttgaagctttaaagattcaagatttatggcatcaacttgaatctttaattcatattcatcttctacaagtctaagtttcaagaacttaaggcttgaactctgtaatcgaaactgaacatcatgattagttttaaagaaaacataatcgcataaattcaattcctcaagagaagggctacccaacaaaaacttaactaccccatcttccttagaagtttttgaatgttgaacattttccatattaagagttttcaaagatggaaaactaaatgaataagaagtatccaactctactccaaacaaagtcaaagaagttaaatgaatcgccttgtcgaatagtattttaggtatgtagtagtagtgagaatccacatcaatccaaagacttatttccttaaccttattctcaactacaaaagctaaccattcatctagtagataagcatgaattcctcgaaagtaattatgcattgaaaacctaaagctcgttatgactgaatcgattgtaaaattcacacttttcttaaggtgttccaaacaattgtcaagaaaaatgatgaacatctgatcaggccaaatcaaattggagaaattaagcattggcattgaataccacaagagtttccaacgctttgaaagaacacatgttcgaatcatttcttcagtttgaagaaacgacatgatgtgatggatcaatgcatcaggaagttccgaaattctgtcaacagccattgttggcatctttttaaccctttttttggcaggactacggctatattttttcccaaacatattatccattacttaagttgagaaaccaaacctaagtaagtggattgtgaagtgtggatgaactgtaacaacattaaaacaatcaaaaaaacaaatcttaaacatagattagatcaatgctaataaaatttaacaacagtatttcccctaaaaaaatgcacatttcagtagttaagattgataattacgcaatacactattttttttttgtaaattttttatatttttacaaaaaaaatttttacatttttatggtattctataaaaacaacaccaaaacaacgagaaaactacataaaaataacagagaaataacatcaaaataataacaaattaacaagtctgtaacatataaatacatcaaaatatagtatttctatcataaaaatcgtaaaaatctttaaaattccgtacaattgtatttttgtgtatttgtgaaatgatctcccttaacaataatatcatgaaaaaaaaaaaaagaaaaaacataacaatcttgataacagtataggtgaaatctctatcaatcaattaaattttaggaaaataaatggattctgaaagtaaatttgagcatatagagaaaaacgaaagaagtaaagtaaaggtaagattattggttaatgcttacatgaacatgaataagtgtattgtgtttcttcaatcagagactcgaaggattgagctttagggcttcggaaggtggagactgaagagggcttcttctcagagagagagagagagagttacaacaatggaggaaatgaaatgagagagttttgccgctcaatcccaataaaaagagaaaggaagagacagtaggtgggaaattataattttagaaaaataataaatagttttaaaattattaatgattttcagattttttatttttattttatttataagacggttttttttttttttgtaaataccattttagattatgtgttttacaaaaattatcgattggattctttgttaaaaaataaaataggccttatattttctaaaatggtaaaaaataagactttatttttaacaattttttctttttaatttaaccaatttgaagataatttctaacacgaacaaatacagaaaatacaatcagttttgtcataatacttctaaattagattattattaaatttt

SEQ ID NO: 44652 - DNA, 3287 bp, Cannabis sativa
attgggggccaaaaatatcataacgggtttaattaatagatttggcaggaatattatgataagttgatagtgtaagtattgaggtaattaggagtatgtgggatttggcctagtgccctaaaagtatagatttcttagtggctaagaaatgataagataactattaataataaagttttattattatactaatattaatattaatattattattgttgactgagattttcgaaaactaaatcataaatgtactaagaatgatttgaagagagtaaatgcaaatattttttcaaggttggggcattaatgagctttagtccacaagtctctgatattaatatgtaggtatttcttacagagaataatttgctctcttcgtttttttgtatccccctgacaaatatggttgggggtatttatattagttcatagagaggaagaaaggtctctattgtcttaagtgtccaccttggctataaacaagttcccaaatctacgaagtagggtatgcctgcctaataggatgcgtagggtttaggtgagacaagaccttatccttccgtgattgatgtgatagtacataataaagttgtcacttacatccttgattagtgcataattgctaaagaatgggtttaatgcatttgacacgtcttttcgtatttgtccgtagatgcttcctccatgctgcattaaatgctaattgatagttcatccgcagtaccctaagtcaagaggagctgtaggctaccctgctctcagaggtgaacaaaagatggatcccttcggatctaataatggctctaggaggaactattgggttatcttaggggctcctacccatgtaacattttccttttgaatatatttgggtccttaagcttaatctgccacatgtcgtgtcgtgggattgccacgtatgttgggagaaatccggggcaatatttacccaccaagtcgtatttaatattttgtaaatgagacttgtatatttcttttattctcaaggagtgacgtggcaaacaccttacgcgcgcgtgggccatttaatattcgtaatcatttcacctcatttttggcaagcaacgattcgattcctacttgtttgacagattcgttcattaacgcagaggtcagagaggtactcaaacgcttcaactgcctttttcttttcatctcgtgagtttaccctacccgtcaaattaatggaatttgaatcggtttgatccctcaccatacgatggtactcaatcgctgctggctcttaccctgaaggcctataaaaacttgtacctcttatgactggtcttttcacacactgcatttaatttctaggctttacaaaccctctcgacaaaattccaggctctcccgacttactctactcttcctccaccattaccaggaaaactactaccattgctcgatgacttccacctctacattgcctccatcgtgtaagttcttttttctttttacttttctgtatagtggagcaaagtgtgacagatagtgattcattcttttcaaggaaatcgtatgcatgtttttcctaggtaatggacatggcaattatccatggaatatcttttttcgaaatgtctgatgacatttttgtcttcttcttctctctttttttctttttgaggggagcgaagggcaagagacatttcatcccacattttcttcatgtgaatatttcatatatttagggtttttagcagattgaactatctccgcacattcttttctcttaatttctctatattacttggatgttttgcacccgatgtttgccactgcaaatcgttagattccttttgtcattcattcagaaggggcctcttcctagcggttaggggacccccattcccctctttgacctagggtttgatgtgggggctaagtgctgggtttttttatctttcagatgagtgaagttctcaaagaccttcacaaacacaatttctttgggtttgacaaagaaattcttgagctccattacgccaacaccatgtcgaactctaacgtgtccaacgccagatcctccacaaaaggtgacaaagaaacttgccacaaaaggttatgtagggctcggttgcatacaagaaatacttttatcgctccaatggttaggaggctgatgaactccatttaccttgacttgtgcccaccagcttgagaagatagtggctgtaaatgggattaaaccgtccagttctagagtttaccctgtctacctagggatgaagagacaccgaaccataattataatggttttagagcctggagccagacccatcacatgtctagggccatgctgcccctacataactacttcattgactttttagtgtttgttggacacgcaccataccaactgatcccctaagcctaccacctgctttcaggcctttttattttttatgctgctaggggtttggccgctcccaatccctaaaattttatatttttacgagcttctttctgtccctaagaagggtaaaaaatttaaagatggtttttataagttacaagcacatccagccaacaaaaccccagtaccttttaattttcaaaagaatgttaaggaataccgtcacatgtttttcttttcttttgggtttaaggcctttgagcatccaaacttgttgacggactgggtccctccaatgcattacacagctgccactcaactcttcctgaaccacgcctaggtgtttgctagctagaagaaggaagatttgaatgtgggagatttaataacgaccgccaactgctagagggccaaactaattttggagagccaatcaatcgaggattttaacctgtccaaggcgattttctccaacacacgcaatcctaagaatgaaaaggcactcaaggctgacattattgtgactgctgaggacaaatacaacaagtatagatacaagaaagaacaggagctccattatgttcacctccaaaacgattctaggaggtccaacgaggagaaggcaggaaaggaaaagacgccagccaggcctaagttcgcctttttggttcccaactccgggacccctggtgcttgtaagtccatttgaaccttcattttgatcctttttcccaagattactcttacttaaggccaatgggttttgacatgaggttgtataagtttcaaatgccccatacctagtggggcaatcatgcaaaaggttttaatttttcaaatttgagacatttcttaggtcagtctcaaatgggttgtagtcctcctgtcccatccttttgggtcatacctc

SEQ ID NO: 44653 - DNA, 5442 bp, Cannabis sativa
  modified_base (2645)..(2651): a, c, t, g, unknown or other
ctggtaaaataagttccaacagtaggtgcccccaagtgaccaagaaaacttttgactcttgatcacttgcaattcaacaagcttcttatttgtctgtttggattttgggtatgggcatacctttttgcacgcgtgtcaagtagttttataacttgccattatttgcaaataaaaatataaaattgacacaatttaaacgataattattctctttattcatttattggtcggtatgtgtctttacttaaaagtaacttacatttattgaatgataaaagttattacatgatctactcgaatcttggctaataaatatagaaaaaaaatttaaacggtatattccgcccaaaagacattattaaagagaaatcattgttaagatgaattgtgctttagaggtggtcatcaaaccttagcataaggccatcatttacgagcaatgtttgagcatcgtgcaattgtgtggtcctcggaccttttgcatttactaaaagtattttcttagatgtattccattccaataccatgatactataactaatttcatgttttcatcataccgaccaagcttgtatgctctagatttcgtaactttagttacttggtatgagccttcccaattatgtctaaacacaccgggtgcactacctttagtgttatgaaacactcttctgagaaccatatcccccataaagaattttcttacttttatttgcttactgaagtatcgggctactttttgttgatgagcttgtagctttaaatttgctaagtctctttttcttcaattttatcaagcgattcttctaggaggatgtggttggtctcttgattgtacatcaatcttctatgggacggaggtgttagttttatggtactaaatcaagtacgcagtggaagaattttatatctgattatcattgtaccatagtcctaagtatctccagatgtatatacattaaattaaaatataaatttcatgaaaaaaataaatacctcttgaggcctatcaggatattcttgattcttttcgtaagttgtatcctttcagatagattagaaactcacaccgtaatcttctaaattgatccactacatacaagaaatagtgcgggctagtaggataaagtgtatatgaagtttttgtataaatctcaacacatgagcaaaaacaatctcttatgtgatagagagaaaaatatttttggtaaaaactctttttaggctttcaaaaaagtttacaaaatctgtataccaaactttgttatacgttatatttaaataaacctaataaatgttttatttaattaattatattaaaataaatttactaaatcatatttaattatttgaataaataatataataaaatttagttatatatttttacatcaaataaccaattgagggaatctctcaactacttgagagaatatttcaactacttttcaaatttgaatatttgtccattgaatagaataatccaaaagacagaacaatagggacttcccatagcattggcgcatgcgctgtgtctggacatagtgcacttagcgtcttctttgtctcatttaagacaaggaatgtgctttttttccaaacagttattgtctcaacaacttttatgttttttcttatttaattaattttaaaaaataaattatttattacaaaaataaataattattattttgctaatttaaaatagatttttctgaactttctctatacaacatttatcccaccccttgacaatgtttcataatggcaatcataggaccgtggacctaagatccaacaaactagatttatttattgaacctcatcaattaaaaaatctttatttattaatttcacgattactccattataaatatagaattaaactcatagtaattatagaattatatttactgaattttactgcaatgtctattgatataatcaattctaatgattatccctccttgtattggttcataaatagttttggtcaaattactattttattcttctaattacttctttgtcttttaataccatcaattcactagtagaagtataatttaaatcccatcgaaatttacgcgtacctttccaattccagaattaacacataaagggaaccaacatctgatctgttaagaaagtcaagattccatagctatagaccatgttctcaaccattcacattattaaattctcaaaacaaaagttgtaagaatcatcttcattgaaaaactttaacgagtgaatcaaataaactaattacataaataggaattcatgattacttgagatttatgccgatctactattgatcatctttataatatgaagtaggtctttatagtaaatggtaagtttgataaagacaattttattcatatcattccctgtcatatataaactctattatatacaacaccttcactaagatgtgatactacatcagtaatttgaatcaagactacttgcactgaagaatgggcatcggtgtttactagcaacgattgattaaagattcccaaactttaatatgattttgactattttattcatggctaagtgatcttaattcttcgtacaactacaaatcacaacctcatatatgaataaggaattttttgatatttatatataannnnnnnaatattaaatattaataattttacattcatgcatatatcaaaatgttcaactcttatttaataatcataaatatctttacaagcgttttagggcatagtccctaataatcttccacttgccctaaaagcaaattggccatctcccttattcccatactagttatatgatcgatacaaaattttgttggtagcgtctttataaatggatctaccaggatatgttcggatgcaatctttaagatcgtcacatcacctctttctactatatttcttagtagatggtacttcctctcaatgtgcttgtctctcttgtggtttattggttccttggagttggccactgctccactgttgtcacaatatagcaccggtggctttcctacctctggaactgcttcagatcaatatagaattttttgaaccaaaccacttccttagctgcttcggaagttccgatttatttggctttcatggttgaatttgcaatacgggtttcactactacaaattagacttttagtgacactatttagtgacccacataaaaagtgtgtgtcactaaagagttaggagtatttttagtgacaaacacaaatagactctaaatgttctgtgttagtctcttgcaatgtgggtcactaaatattatggagtgtcactaaaaggtaaaacccaaaattttttaatttttattaatttgaaaattactggcctacagtgacgcgctaggtgtgagtgggtatatgtgtcctcacacacttagcgcgtcactatatcataaccctaaattaaaaaatatgataaaataaagtattaaaaggtagcagattttttatttaaaaaaaaaagtggcagaatttaattgaattcataaaacaataaaagaaaaacattaaagaaaaacaataaaaaaggaaatttattttaattttttaataataacgtttcccatttctttctccccacaaatcctatttctttttttctctctcttaaacttagcatttagaaaccctatcacttagcaaaaagaaacccagccgttcttcttctccctatcttcgtttctaaaaccaccacacaagatccacctccaagacgacaaagcaacgagcctccaaaaccttgaggatgccgaaccacctccaagacatcaacgaaccacctccgaaggcctccctgccatcatcgacccaagggcctccctctccgacgtccttattgctcgtttaaggtgtattttcttatttggctattttattctctctctctctctctcttctttctgatctgtgtaggtggacgatattttgaaactcatcatggagatctcgtcgttttgcgattgctcgtggtttcgggtgggcagtcgacgatgcttcttggttcgacaagaatcatggttttgagtggtgatcgaagaccgctttgggtttgtggttggtggcgcatagggttcattgtcgaagtggaaagaacattgtgatctgatttgtatttttatttttttatttaggtttctaatatctagatgtcttcatgcccatttctgggtttttatttttattttagtgttcacatgttttaagtatttatggtcaaatttttttgtatggtatatattgttcatactcaatgtttgatgaatattatggaaaaaattttaatttggtgtttgtatttcagatttttattggtttaattcttcttttgttgttgaatgtaaatatatataatgtatatatcaaattttgcccaatatataatgctttatttttttttctgtagttttatgttttgttttttttttttttttgaaagattatgttttgtttttttaattgaaaataaaaataaattaaatttgatatatatattttgaaaataggaaatctgatatataatgtatatttatttattttttttttaattttaaaaaatatgatatagtgacactctttgagcgtgggttgttatcagaaatataaataaaaaatatataaaaaatacaaacagtgacgcgccgaaagtctatagtgacatgcaatgagggagtctaaaatgttttagtgacatgcttcagatagtcactaaatattacttttcctgacacccacattaaccaccgagattaaatattgacccatatgttgactttcaactatctttgtctgattggaaattagaatccgtatatccagtaggatataactctccaatggaatatataagcatgagatccctcgttcttcgaagatacttaagaatgtgctttacatctatccagtgtttcaaacttgaattagattggtaacaactaacaatccctatagtgtagcatatattaggccttgtacataatattgcatacatcaagctcccaactggtgatgcataagggtactttcttatgtcctccacctcatgaggagccattggatattgatccttatgtagagtaattctatgtttggatggtaactgtactttcttggaattctctattgagaatctttccagcaccttatggatataagttgcttgagaaaatgctaatgttcttcgctttctatctctatagatttcgatccagagaacttagcttatttctcctaaatctttcattttcttcaattttgttcaccattaccatcgaaaggtcataccttatttatttttatttatttttaagaggtcatacctaatttatatacgagtaacattcattataatacaaaataaataactcaaaaaataatatatttgttataaatattaataattatgtggat

SEQ ID NO: 44654 - DNA, 1265 bp, Cannabis sativa
ttttaattttaaaaacaaaaaactgattgaaaaagtgttaccaaacgtcaccaaagtgttaccaaaaactacttaaaaaagtattttcaaacgcaatatttgtttttctttgatgcggagattgaaggaataaaaagagcacaagagatgcatggtaattcatgaccattagtacaagataagagtgtctttcataatatatttttgatgctttaaataaaaggatttgggtcggggtcgaattgtgtgattatacattgattttggttaatataatagttaattgacacataatcacttaattaaagtgaaccaattttcttatgatcatcttacaattttattatgtattattttttaattgatcatgaaaattatttcagagacaatattaacatgcttattagttgaaggaaataacaaacattattaaaatttcgatataatgattatatcttaataatttagtggagttgagattttgttacatagatcacagcatgatgaatccatttaattagttataaacaaatttctagtggaaaatttgttgagtgtgtgatgaaatatctcttaggttgtcaatctataattgagatttttgagtattttatatataatgctcataaaattgttagtgtatcatatagtacacacataatgaaattgttggtgtatcatatataatgcatttattatattgctatttgttcattaaattttattttatatttctatatgaaaaagtgttagtaactatttatagtcactatctatgtacttaatttaatttataatattttgtacatagataattatagataaaaatcttcttaataggtattacacatcacatcgatacatcgataattactgatgatattaattttagaaatattatattattagaatttaatccaatgaccaataataaaaaagaaatttgattttctatacttaattttaattatataattattttttttacattatattattaatatgaatatatcaaaaatatctaactcactcaatttttttatttctctaagttggaataatcgaaccctagcccatataaggtaaaaatgagggaaaaaaatcaatttaataacaaaattaagcataggaagtcaaattttgctaaaatatatagtatctattcatgggtaatatccattaaaagtgcaccatgtatatatattcttagtttttattttggatatatatttttaattgtataattagttttttattttttatat

SEQ ID NO: 44655 - DNA, 1553 bp, Cannabis sativa
  modified_base (1523)..(1527): a, c, t, g, unknown or other
ctgttcaaaattcttccattttagttctgtaaaatcatttcaacaaccatagactgcaacttcaactcaaaattccagccatgctcacaacataaatcaatagccatattgaataataataaaaaaaaaagcaaggtcgaaaaacaaaaggaaaaaactagcagaaagcccaattaacatgatgtatcatcaagaccaaacttcaaatgggaaagaagctaaccactgacgtagagcttagtagaagctttcgcgttcgtcgaagaagaagaagaagtagaggccgaaacagaggagcgaccatgtctgaattttaaagacaaggaagggaatgaggtcctactgagactgcattctggttgcgaagaagaagaaaaagaaaacggcgacctgcccagatagaattttcgtgcggttatggtagaatttattggagttggaaagcctgtgaactgaaggttggcaaccatttctgctgccatagaaccacagaccgactgtccttaccaattagtcaattacgattacgaagaaagaatgaaccaactccaactccaaggatagtaactcaaataaattgcatttggagcccttctatatttggttgttatatatgtcttatttgtaaggttgttccctaaattatctaagatttagtaagttggtttttaaatgttacattttggtgaattaatcccaagactatctaaggctagcagggccaccctgataaaatctgtgggcctggctatgcctgtatatgccatacaatctaccaagcttttctaatcgcttgtgctcgaaaattgatggcttggtccgtgacttttggtggggtttcgaaaaaagataatcattgaattcacttgaaggcttgggacaaaatgtgcctgcctaaatcccgaggaggtctgggttttaggaaaacaaaagcgatgaaccagacctttttggctaaatgggactggaaactccttacaggttgtcaatctttatgttgtaaaattcttgaagccaagtatcttagaggccaaaatatcctcaagtgcagagctaaagttactgattcttggttttggaaaagtttggtgaaagcaactgagatccttaggcgtggggcctgtaaagtggttagtgatggtaaagatacgaggatctcggaggacccttggatcactcatggtcaagggttctaccaaactacgactagtaaccaatcccagaattttactatggtgtccgaacttttgacggaaattgatgattgggacatgattaaactgaacggcctctttaatcaagaaactgttaccgccattttgaaagggggccaaccctcagaccaagggagtgattactaggtgtggaccaaagaaggaaatggtcaatttaccagtaaatcggcatacttaattcaagcaatgaaacgagccccacactatgatgtggctccttctcattggaacaaagtatggaacaacaaaattctagagcgccacaatgttattgttgggttttatgcnnnnnataaaactctttacaatctgattagt

SEQ ID NO: 44656 - DNA, 1408 bp, Cannabis sativa
tcaaaaacgagtattatttttgttaagccatcaataggtggtgtaaattttgtgtttcatttggttcaaaaattgagttaagttacatttggttctaattttataattgtgttctaatgcacgatgtaaaaaaattggtaaaagcattaactattacaacatttaaatcatttatcagtatgtacacttttttttttttgtgtcaagacacataattttcacatttagactcggatatctcccaacttggaaatcttttttccaattgctacttaccttcatgaattgaaattggcttttagtttctcattattgtttaataacttaatagaagagtctaatttagctttagatgcatgaagtagaaaaattaaaattcttaattgtttttgtaccaaaaataaagcaattgatttaatagtaaagtttaggtttagtggcaaagtgcttactttgaagtagtttctttaagttgaggtgggtttgatctctattgggcgtcttaaatgtgaagataatgtttgccagtctagccatccatcttaaggagcatttatgcatttagtgttcgtttaggactcatgtggcgctccccatcgtagacgggcctgacacgctcagggaaaaaagtgtgtcatacctagcatctccctcctcccttttattacattaaaaaaggaaaaaatttacccactacaacaaatcaacgacaatcgacgacttaaactaattataacataaaggttcaataaagttatatcttcttatattgtattaaaatgaactaatctcattttattagttatataaaattttaaaaattttgataagagaaatactaaagggtatcttaaagtgctaagcgctataagacatgatatattactactactgatgtattttaatatcgagttcttcatagtagcggactcaggatttaaagtaagtagagcgtaattttttctataagtgaggggcaaaagtaattttaaaaagacaaaaaatactcttagtaggatttgaaccattaacctctattctaaatgcaatctaacttaattattacattaaaattaatattatgtttgtaactatcatattttatgataaatatatgtcgcaacgaactaaaatatatatatgtttttttaggagatgagtgtcctgccttacttctatataggtctacccctgactctacacatgaataaatgatatgaaagaaatgctaagagataccttaagttactaagcaataagagtcacaaaatattatatattattattagtgtattttaatatcgagtcgctaaccgtgttgacattttaagcttccaaataacaatactcttatggcatgtttactaataggtaatgggaatcaatagtaaggtaatcattcccttac

SEQ ID NO: 44657 - DNA, 1344 bp, Cannabis sativa
agtaaaggcaaaatagagagccaaagacaaaatcagctataaaagttgtaacataattagtagattcctaactaaatttctatgaactaacaaaataattaacatactaattaacaccccctataaattgagcttgggatagagaagccagactcagtttgcctcttaacaatacaaattgaggtgtagacaaggcctatgttaggatatcgactattggtcttacgccggagggtgtttgacatgaagttaatgattaagaatccttttatatataaagtgcaggtcaagttcaatgtgttttgcccgtgaatgaagtacatgatttaaagattattgacctcgtttttagccaacaatcgcgagtcaaattaaagctattaagaataagtgaataacaacaacaaataaagattaagtaaatatagatgttcggtcatgtgatgatggtactagcttactctccttatacttgtattgacttgtgagaagagaagcaaaaagtgcttgatctcttgaaagctcttataatgatctctgagtttcacactcttgaacctataatcatttgctatgatttctcacttgtgttttttgagagtactcttgtgtatttttcgtgtccatgaatagtgagatgactccattatttatagggaaggattacatcaaattggcttcccaaaacttaaaagaataaaatgggaaacttatttactttggttatccaaatttcttcacaaggtgacgtggcatccacttggcacttctagaaaagggacattttatcccactttttatacttgaaaaaataaaaattgggataaaatatatcttccaatcttttatcacacttttctaattagaacaagggacctgtttggttgaacctaaaaaaataactttttcccatagttatttggtttttgccaaacacatccttacattttttaatgggatattttatcccaatttttgggcattattataattattattattttattacttttaatacatttgaaaagaaagggctctcaaggtttcatctctttcatattttacattctctctcttcctcccaactctttcttttgcccaaatctatcgccaactgaacatcttcgatctgacaagtctttaccccaactttttgttgggttttgtgcactaaataaaactcatttcaatataatcagatttaataattaataaaagatcaaaaattgcatttatgttgcatagatggttcacataatttatttcataattatatttaatgtataaattctattaagtccaaaacgtatgtatttgttcatgattatagtgttattagcacag

SEQ ID NO: 44658 - DNA, 2337 bp, Cannabis sativa
cccctacactaactggacccttagtagtttcgcccctgaggaggaccggtataaccaccgggagctcctcttgggccaggtacaggcatgccacttccaacatatggagggccacgtccttgtgctgggtattgaccactactatagccaccaacttggcttccagggccacgtccatgagctgggtaaggaccgccactatagccaccaacttggttcccacgatttgggtaacctccactctggtttccacttgaagggtatctgttaggaccagtaggtggaccacgaggctttccgtagtggtgatgactaggtccagaagatactgtgccctgtgcattgttaatggggtgattagaaccgtgccaatgtgatggagcttgaccaacattttggataggaggcaagcgggcatgctgctgaggatgctgtattttttgcctctttgcttgctcttcattttgtcgttgctgctgccttttcttctttgtctggaactcgtgagacgattcatactttggaagactatgagatgaaataaaaggaagaaaaaaaatagaagtgtggttcaaacatttgatcaagtaaagaagaggtacaggagggtaagaaagcacattaaagcatattactttattaagcaaaatcaaacaactatgtcacaaatatgaaagccaatacataaaggcagagactgtaaaccgagaatgtcagtctggtttgtgaaatttttataaagacataaataggtaggaacgcacctcttggggtcacagggtaaagggtcagtccagaaatactctgcatccagtgcttgcttagctgtccatctctgtgtatttaacaggtaggtttagatagaatttacaaaaacaaaatgaataagtaggagtgcagtaaagacaagtcgatcaaaattctttcaagacaagaaaatacaatggagctagtaaatgttcttatggattttctacagagaagatctaaacaattaaaacccaagattgagctgtttgggctttttaagagaatgctatagataaaataaaccaaagcgaagaatgcaaattgcatcagataggaatttgcaccatttgttcattcattgagtgcagatggcaaatgtcacacaagaatgacagacaaggagaaaaacttaaattgcaaagcaagatagcataatcagtatttgagagttgttaagaatatagacatccattatattagaaaaagtatggaatcatggttagttaataaattgataaaggttacaactaaaagagatacaggtaacaaaatttaagcaagtgatttgatgtaataaatacaacataaggattatgaaagaatgatcatgtagatcaaagcttccactctttataaaataggaggtaaaatataaggaaacttgttataagaagaaatacaagtcaggtggcagcctcaccttgtttggatcaagagctagcaagttgtcaagcaaatctaaagcatggcgatcaaaactgcaacaaaaaaaaaaatgcagttactagcattcttatagcctaattgttttcaataaagtggtcaatgcaaagaatagcctctatttacatactgtctgaaattgtccctgatacgtctcttcagtggtcttgaaggcttgaaattactataccaaggagtcttagaagcctctggccagttgatttcatcaggagatccacaaagctcaaatatcttgtttatttgttcaggctgcaacatacgtagagaacatatttaatatgtattggctaaaaaaatctccatttcataatatatcactaaaacaaactcagtggcagaaggatgagaaaccaagaaatccagatcaaatacatgactacaatctaccataaccctttattggatcaacttcttgaaaatgtcaattaaaagacttaaacaccatcaagaattaaaaataaagatgctggtaaatatgaagttctaatcgcctgactcctatatatccttcttgaaaatgtcaattaaaaaacgtgaaacaccatcaagaattaaaacaaaaaaaaacaagttgacagtaaatatgaagttctaatctcctgactcctatatatcctcagcttgcttccctcaacaagattgtggacttcagcaaagatgtttattataaataatgttgaaaaaaatacccagagtaatataaaagacacacagtagtggtaaatataaataatgatacttgtgcaacccctattctattgtaaaatgaactagatgaataagtgaccagttactacaatgttaaagttaatatcagaccgaaaaataaaaaaaaataaaaaa

SEQ ID NO: 44659 - DNA, 1672 bp, Cannabis sativa
agaaattgaattgaataactcactgacataatcagttatcagtcctcaacccgagacaacacgcaccccaccagatcgcgtgacatacatgaaccaataggggatcgacacatgtattaaacagatggaacacaaaaatgttcaagtgcctccataacgtttcataatggaacattaagaggccaagtcgttcatggccccatatatgatgctaaatatggatgaggactacaagcctccgtgactcccgagctgtgaaggtttggggtaaatgttatctgtgtttttagataggtgacacatgggccttagagcaagccgaataaagctatcgtgcccattcattgggtccctgggtttagatgagccaatcaccgagccaatgggctaagtcggatgtactgtctggatttcacaactacttcccaatgatgaagtcggacacaagctctcaagaagtaatcttacacttagccgataggcactcgaagaaacaaagatggataccttcagaagtctttcgagaatggaaattgaagagacgtctgaggacatatgatgttcgaaaggccaacatacatggcacttctttgacaagaatcccgaaaactctagcggctgatcccctctgtcaggcctcgataatcaaaagaaaatctcatttttggaccaacacccaaactttgacattccctctcataaatggcgattcatgctaagctgtcactggtaatggtaccatcgtgtacagtcgatggttgcctacatactgggcatcagcttctcagcccaatagccaatattttattgtatttatcccatcagtgagatttctcaccaagcgaaccttaatgggtcggagtctacccaactcgttagccaaatgtctataattatggcttcatctctttatgcaaagagcattgctattggacatcattaatgtccaacacattctataggtggtgctctagattggttagcgatatttcgtaaaaactattttcttaagttatataagactggatacttaattacaccaataacaatatgacaccaagaaaggtgctgaacaccaatagtgcttttattatttctcttatggaaagtgtgaaaattttatataaaaaatactccatttaatgatatttccttagactaagctcattaatcctctaactaccttatttatctcttaatcttcttttctgtagctcaaagaaatagtatctttattttttgagaactattttcaaaaaaacaacacccaaacacacctaattgttttcctaaaataattttttatttttaaaaacaaaaaattgtttttcaattatgatacgaaacatgaaaatcatttattaatttttgagtatagaatgtatttgtggagaaagaattgtcaaaagaaaattattttgcaaagtttgtttttagttattttatttatttattgtttttgaaaacaaggtaacaaaaacatataaacattgctattggataccaatggtatctagcacttctagacatgttacctggttaatgatacttactaaaagttattatattaaattatacagagtctgatacttagttgaaccaatattatagcaatattgacacataagaggatgttagacatttctgacccctttaacatttttcaaaacat

SEQ ID NO: 44660 - DNA, 1522 bp, Cannabis sativa
ttctcatgacttcataagacatgacaaatatgtaactaaagtttgagggagagtttcaagtagtagtagaaaatagtaagcaaaagctaatattggtgatcttctctatcatggtagagtcactttgaaatgaccttgaattcaccctccgagtataggtttccactttgaaatcacacaaaagtagattgatacaacataaatttttaataatgttcaatccaatgataaagtacattacatacaaatagttcttttttttttttttttgaaaaattatgtgtagatagttcgttttaaagattgacaatccatcattcagggctcatttgaaaagtcattgtgtaattgaaattgagtgtaattcgaagtaattacgatatttgatgtgtttgtttaactatgtacttgcacaattttcatgtaattagagataattgagtagtttcaattacatattatgacctccatgagaatttggtataattatactgtgtaattacacaatattaccatttttagataattaatattgttaaactttataattactatttactaactattaagtaattacacatttgctttcaaacgcaacctcaataattttggtgttagatattcttaaattaggtactatcgaatcgagtgaattcaataatacagagatgttggcattccaacttccattatcctttcaagttttattcgaaagagattattgatcgtaaatatttaaataaaatgaatcattttgtagatattttttacttcggaataattaatttaataaattatttcaacattatgggcaattctctaacgaatgatataagaaaattctcatataaagatcaattaacaaggattaaatttgtgacaaaaagcatcacattttgatttatatatttgaaattcagtttttgttgtagtttttgaaaatgaaatcaaatattaattttgccctcaccactcaagaccatagacattttattttatttatgaaaatatagttatatatttagggaaaaaaaaaaaaaacttgcattgctcattttcaagtttatttttcaattggaagcatgattttttattgatcatcctcttttttttttttttcttatcttatcattatatattaataatatttaataaaaaaattgttattactcttaaataaaaagagtggtatttacaacattgattggagtgggtgattgacattattaacaaattaagtgaaaactctttaaaaaaatatgactacaaaattaattcttataattatcttaccaccacatgacagaatactaattttgtattatatataaaacatgtatacactactatgatgtaatgcaacatacatcatttatttatatttatcatttttcactctaattcacataacaatatagggaatgagatatgattttgttccgttattgtactttcacggattgtaatctgtgatgtacgacagccgtcagatgagagatatttgatctgacggctgagtttg

SEQ ID NO: 44661 - DNA, 2707 bp, Cannabis sativa
ggtatcaaggtatattaaatgagtggcagggtacgtttttactttttaaccctaattaccccttgatcaatctcagccgtcagatcaaataactccctcatctgacggctgtcgtaaatcataaattacaatctatgaaagtacaataacgaaacaaaatcatatccctaaatttatattatatatatgggattcaatgagatcccatgtattcccactgatgttaaagccatattttgatatacatatataaagagttacaatattgcttccaatattgcttgctttactataaatggtcgacaatcgtttccattatgtctaattcatagtttcttattatgtgggctacacagtcattagcatatctgctaccactttgtcacatcatcgtatcataatatagtatgagttgagacaaatcaacattgcaatactttatcataaataaacatttgtatacaataaatataattcaactaaaacattttaagttacattaaattttcaactgatggtcagctaatttgacattttttaaaattaattaattggtgaataaactgatgtaactgcttgtataattatattttattccgtgttgctactactataaactcaaaacttccacctgtcaaaatataatgtgacctttgtatatacgtacttgaatattttcgaattttaaattcatgacaatccattaattactcatatataatgtatacatgcatacgtagatctatacagttgggttccaataagtcacgtttattgctaaatcaatataaatatatataaatatacatataatatactttgctcactcactcattctctcactagcttgtttcataatttgatctatagtgaaagagagagggatcgagagagagatgaagaagatatgggagggaatgcatgaggtgaagccagctctattgatgatggttgctcagattgcgtatgctggagttaatgtgctctacaaattggctgccaacgatggaatgagcttgaaagtcattgtagcttatcgctttcttttcgccactgtcttcatttttccacttgctttcttcattgaaaggtctaagtctaatatatatacttctttgtttcaaacaaattctaatcttgctctatctaattagcttccaatacatatatatataatttgtttttattttaccatgaggaactttattaatatcaaacaaaaaacatttactaaatgcagaggttttatctttttaattaacaaaaacttctctctctggctctccattctctttagttcaaggtttctaatattttcttcccttctcctctcggctaaggaactgttacgggtctaggtcgtgtgactcgcgttcctggccaaggggcggcttccgggggcgactcgtttttagtttggagacacaaaaacaaaactagtttttcattttattatttttaataattatttaaataatttttgtaatcatcatctactttgtattttatttttttttattattgtttaatagtattttacaatcaattaataatttaatatcttaataataggcttggcccggttcgaacccatcactttttttttttttttccattccttatatatattaacttcatttatgtgacatcattcgtttttccttactttttctcattacactttttttactttctttttcaagaatttaataaaaaaattaaaaataaaaattagaaaatatatttttattttttaacatttaaaattgtatttttaatacaaaaataatatttttatattcttggtttatattttttaatttgtattttttatttatttgaaaatagacatttatatgaagaaacaagttcggccgtacatatattcatatgaagttttctggtattgaggtagcctcaacaatactaattatattatgaaagctcagctagcccattatgggcaccacaatgaaattatctatctaaaaattttagaaaagttacagctcaaaaaagactttaattagataaatagttctcttgtttttttttaggaacaaaagagctacataattcacaccactatttttaatttttcatctttttatatctaaaaatatatttttgatagaacgcatgtatctaatattaacatatagtttgcttgctatatgcccttgatctataaactaattaattaattgccaatgtataacttcacaggaaaataaggccaaagctgacttggaagattctttttcaggcatttttttgtgggttgtttgggtaagtttagtgtactcatgtattatattcatatattggggacacactttaaatgagtgtttcgatagagcttttgtttccgtatatgaaagagttttttaattaattaatatcttttcatgatggcacatggtaaagttactaaaatggcatgtgtaaatttttagaaaatttacaatagtttataataaatatatatatatatatatttgatctcagggttggagttgatttaaaagtaattagggttaaaaaatggtaacgtaccctaagatttattattaagtaccctgagattcatctaatgttctccgtacatcacggaatatattttgtgaaaagtacatcacggaacaaaatcgtgtccctatatatattattgcacgtggagtacttttttttaattaaactagtgatg

SEQ ID NO: 44662 - DNA, 2321 bp, Cannabis sativa
tgcaaatatctagggtttcaaactataatctaaggtttaggcctcctataaaaaggccttaaccctagcctagaaacctaagttgaatttaagcctaaaacctgcctccaagctctaaacctaagtttgacaatctctctcttcctcacttcccctctcttacaggcctacacaagaattatctcaacacttgagttttgccattattgactcatactttgtattcctgagggtgctatagtggatcccatctatagtgatttggatagtattaaccctcggtattaatacaactaaaatgtgagtaggtcattacccgtgatcgcaagggggctgaacctctataacaaatttgttatttattacttttcattcttatttgtgcaaacatttggcaagtatcagatctatatgaccccactgtcggttgatcactttttgaggtcaatcgctggaaaggcccaaaataatttgagaagtgagactgatcacttgaggtatctagatccacctaactctagaaactagtgtgccaatgcactaacaacatcagccaaccggggggtcatgaacagccagaccctgcccagcacagggctggccggccatggaaagcttcctagctaaagctttgctagccaggaccaacctccttaattgggagtgatcgaccaaggccagcaacaccacacaggactggccaacctccaccatacactctcttagagtatggtcgactgcaccctgacatattcaagtctgtaacccatccaaggagggtcagtcaattaagtctctacagtaatggatccttctatgcaagcatttttggaccaaataagggacatgatcaagggcctaggtggtccaaaaccttcagaccttgagattctcagcatacataaatgtcttgccctgacccaagttcaagatgctggtatggaagatgtctatcgagcaagaagactcactagcacacatcaagtacttcaagatgtagcttgatatccaaaagatcactggtcatgtgtggtgtcacatagtcctaacaactttgtcagaaatggcttagcaatggtacttcaaacttgctccaggatgattcaattcctgaatcaagttttctggagaattttacacacaattctcgtccttaaggctcatacaatcatagctagaagaccttgtcgaagtcaaacaacgatgaggagaacctttgaaggattacatccaaaggttcatggccgaggccgccacggtcaaaggccttacagaagaaggccgatatatggccatactggggggaatccttccatcgagtgacttctggaaagatatccaaaagatcttaactaaaaaaatgaaggagttccttcacagagctgacatttatcaaactagaagaagctatttgataatcctagataacgcaagttactaataggcagtcataaggcatcctaaagccccatgacctgccaggcgcataggcatgtaccagtaactctgcccaaacctctagtggtaagaacactaggagcgagcgcaacagtaaaaatgctggaagaaatagtggcaaaaaggggaagtttaacatttttcccacgccacaaaaccataaggacaggaggagaagtatgcatgcttcaccctcctaataaccaattcctaatggagaaacccgaggctatcttcatggccactcagggaaaagtcccataaagattgtcccttcccattaaaagggaattgagcaagagggacatgtcaaagttttgtcagtttcacaatgactttgaccatgacaccaatgagtgtcaaaatttgaaaagggggattgaatttctcataaggaagaacaatccccatctgcgttgttatttgttgaacgactagatacaggcacaagttgcccaaaatggagatctaatgccaccactagtggcgggtcacttaggagtcatcattgccagacccatattataggcatgaccagcaaagctagggagcgctatgctcagacactccgttatgagcccaaaagcaacatcctagctatcaaagaaaggggctgtaagcaacaaaagcttggagagccaacaatctctttcacaaaaggagatgctacccaagtcagtttcccgtgcaacgaccccctggtgatcactacacaaatcaggattatgactgtggcaagatgcatggtggacaatggaggatcctccaatatgaatttatattgaaccatgttattttctgttattaagttctagtttaatttcgaatcttcattgtttgtctaacttggcttgtttatctaa

SEQ ID NO: 44663 - DNA, 1667 bp, Cannabis sativa
caaccaagagttgaactctactggtgagcaatagctcaattgggttcagaagaattacttgatctacaattactactctgattcttacagatttccctctagaatgcaacttggcctaaacaaaagatgacataataaagaaaatgattgcacttagtaaattataccaatattataattcttttattctttttatccacgtctaataaataaattcatttgatattcaagttactgtcaaaaatataatatatacaatgtacacaaaattatcttgtttcactcaaagctgctcatgtaatatattagatatcattactcacacaaagcaaaattgcagcccccaataagctcctcatagaaagttgccaaacagtaatatgaaaaaaatttcaatcttgcaagataacaaatttcattaatacattcctaatcaattttttcaggaattccctataaaaaagatatacaatattttagcaatggcttgatttcattactttatgacttgcgcttgacaaagttgtattttacattctttggtaaaagataaatcactaaactcacttttcaagaaaacaaaaattaggtagatatatctcaactaaacaagaaagtctgcatcagaaagttcaagaactttgtggagaccaacagggtttacacccgatcgaaatgagtttccttcaatgtacctataagaaacaattagcagagtaaattttcagttccctgcaaaatttaatgaattgcagtatcatttgaagatttgattgttaagaactcacatttctttcaagaatgggtgtttatagaaggcatcgggaatccttccggagaactggttgtgatccaaataccttaaaccaaataaagaaatattaagtttttcactatatgctttagctcccaactgattgaaccagttgaatttgtagaccatccatatgaaatgttgccaagcaaaaaacaaaacttacagatgagttaatctaggaatgcgagcaagctcggatggtattaccccagacatcttgttgtaggacaggtacctgtagccatgaaacattcaatttaataaactaaacagatggactttggtaaacatttctgatcaatgaagatgttttttcccctccgagaaaggagaaccatcgaaggcaataggcaacttacaaaatttccaagttggtcaagtttgcaagctgtgatggaatccctccagtaaaataattgttattcaagtagctgcacatcataagtacaaataaagtttcattcatatcctttgtggataaactttcacagaataaataatgagtaaacgaattggataaactcacatgttgcgaagagctggaaaacaaccttcaatccgaataagttctcttatagtgcccaccaagtgattgttaccaacatccctataaagaaatagcaattatagtgcaaggcattaggattcaggtacaaatgcttgatctacaaaatgtgctcaaagatggaagtttacaagtgttgaagcttttgtagggtccctagttctgctggaatccgcccaataagacgattttcatgcagatagagatagcggagctctggaaggttagcgagttctttaggaatttcccctttgaagttgttgaagctcagatatctgaaaagta

SEQ ID NO: 44664 - DNA, 2006 bp, Cannabis sativa
aacaaaataaaatattgtttccgattattttatattttaacctgattcatttcttccattgattattctaattccaattacagtttagtaaacgtgccataagcattgttagcagtgtatcctaaaagcatgtaaggatatttattattttaacatgaataaataattacaatgatttattattattatatttgaattgttaaattattgattcaataatttatgtaaatatcaaaaaattctatattcattattgagaaatgtgatcttgtattagcacaaagagaatttaagatccacatgaaatgaataaaatagtcaacaactaattaaagtttttaaattttttaattagagttttaagtgtgatttagtgagtatcataaaatgattatatatgacaaggcccatatgaatcaaagtctttatacaaagtcatttaataataaagactagtattcgtatcataacaaatgatcgtttatagatcaacctaaatgctaagtgttcatgaactcctatccatgttaattgaatttttaattcatttattaagatctctttgtaaaatgaggctattaacttttgttttagagatttaattacttggatagttagaaacatgaattaacaaaaagaaatctaatccttcttaacaggttgtatattggtttccttaagggttaattctagtactaaataattttgagctcaaatctataattagactatagattaattattcaatggtgaattaatggtacttaagaaataagcaataaattagaagagtaaaatattaattattttattttaattatatgaaccaatttattgaaggggtgaactattgtaagatgattatatcgacaaacaacttaagaaaagatttatgtaaaagtatatctacaacataaagagttcaattctgaattcaaatatcataattaataaattaacttatataattaaagagtttaattatttagttttaatttattgaaatttaatgttataggttcatggtttctaagatagttcaatcaataatggtctaaagggccctgctctgtgctatagtttctgactgcagaatgatcgatctttttgttttactggtatgtatggcaattggtggcggtggagggaatttgagtgagactgtggatgatattgtttcaatgacaagtaaattaggggtcagtagtgaggaggattgggaggagaatgaggaggcagcatcctcgttcggtgaacattctctagttggcagactggttgccaagagggagattaaggaatctctgtttaccacaatttttaatcgtatgtggaaaggaattggagggtgggaagttaaggttttagaagaagatgaggaagactcatttgtaagaatcacatttaaaacccgagaggaagcagtgggtatcctgaataagcagccttggatctttaatggaggtctcttgttgttggaaaagtggcctagctcaggtctgtggagagaggcacggttagataaggtctgttgctggataaagatgaaaggatggccaattagagcgtttactcgagccaatgttatgaggttgggagagatggcgggtgaagtacaggaaattaggtggattaatgaaaaccgaatgtttttgaatggatttgtgagaatgaaaattggattccctttgaagcagagcatctttgtgggcaggtatataccttgtggtgggaggaaattttggattcaatttaagtttgaaagattaccaactctttgctttgcttgtggagtttggggacatgaaaagagagaatgtggtaaaggaactttaatggagacttctgaagatggattgcaagttcctaagtatggtcagtggttgaaagatgatgatcctattcctcattgttttagtgcatttcaccagaatcaagcagaaacacatctttcaactgggatttctcgggaaaacgaaggggaagggctgacggaggtagatgat

SEQ ID NO: 44665 - DNA, 2196 bp, Cannabis sativa
tgaccattgatagttgttgctagctatcctttccaagatctgaaaagcttcattgtaagacttgaaaagaatggatccattggttgaagtgtccaacaccatcccagaggctgcattgagaccattgaggatgtggattttttagtggtggtcttccccttttctttcctacaacaggctatagtacaaaataacacaaattaatacttgaagaaataaaattccattgaaataaacaaagttgtttgaacaagaaatacctgtgttgtagctgaattcttgcaagttacacgtgagtgccctgcttgcttacaattgctgcaatggttaggttggccaaaccttcttgttttaattacatttggggcaggttcatcatgttcctttcttctagctttctttggtttcccaggtaagtttgattcagctggagggtaaataggatttaatccacgttgcggccaatgatcagatctaggcattggctgaataacactagcatattgagcttggaaggcttctttcttgtaacaatcatcaacaaaatcatataaatttagtttggcactctagatacatgctaatgcatggccacatgggatcccagttagttggtaacctctacaagtacactctcctttagttaagttgactgttaaactttgttgatcaagaaagttaacttgcaatgtggctgccatctgccatcgtacaaaaataatatttggcgacattcttacggctctctataatatcccaaatgcgtttcccaacaggatgcttccatttatgaatactctcccttctcttacataacatagagatcaaccaaaatttgattttttccaacaaagaaatgataggcttgtcccttgcatctaatattgcagcattgaaactctcacatagattgttcaatagcatgtcacattttgcatggaatctaaaatgcgacttcctccattcgatcggagccttcttcttcaaccattcaaaggcctttacatttatttctttcaattcagccatctttcttgtgaaatcttcttgtgtggtggctttagcacaagcccacaacttttgttttaatagaagaccaggaaactccttcttaaagctggcatgtaaatgcctgacacaaaatctgatctctcccccttcaaagagagatcctaaagcattttcaagtcccttcttcctatcactgatcgtagtaaatcttgtagggtcagtcacattcaaatcctcttttaacaactttaaaaaccagttccaagtatttgtattttctttttcacaaatagcataggcaattggaaacattgaattatttgcatcaataccaatagcatcaagaagaatacctttgcaatatcctttaagaaagcacccatctagccctatttgtggtctacaagctttaaacccatccttacaagctttcaagcagatataaaccctctcaaacaatcttttattgttgacaatattgcttttaataattgttgtgctccatggattttgttgtataatttacttgcagtaatcctctaaaacagcaaattgttctttcattgatccttcaagcattgattttgcttttctccttgcattataaaacatccacctggttgtgtttgagaatttggttttcgcagtcagctcattaaagttactgtaagacatattggggttcattctaaagtggtcgagaaagtgcttagccaaccaagccccagtgatatgttcattatcaaaaacaatcccataatcatgaacattctcacatgtattcaccgtgaaagttgtattgtcttttttctaaacccgagcatataaactccacttgcaaccaggtgccttacaaacagctttcactctaacttgatcattcgttacatatttgaactctttgttattatgtataaagtgctccaccaatgcctctcttagctgtatcacacatgcaaactctaaatagggttcaaacttaaagtctttccaatccactttcggatagtactcctttcttcccttccttttcggtccatcatcatcatttgtatcactgtttaaacttcttaaatcatcttcagaaacataagcacaatcaaattgtgcatcatcacctctattgcaaacattattcattggaccccaccattggctagaatttgtaatgttttcatcttgttg

SEQ ID NO: 44666 - DNA, 1518 bp, Cannabis sativa
ttaactgaattatttgggccaatattaatagatggcccaaataatctatttcgatgttagtctctctcccagaaaccctagtgttcttcaccatcttataatctcctccataaccctaaaaatggagcttagacagagaaacaccagaaaaaccagagtgtcgagagggacaaaatggtgtcaggctcaggaatctgcgcaaagagagtggtggtggacgcaaggcaccacatgctcggtcgattggcgtcgatcgtagctaaggagcttttgaatggtcagaaagtggtcgtggttcgatgcgaggagctttgtatttcgggaggtctagtgaggcagaagatgaagtacttgaggtttctccgtaagcgaatgaacacgaagccttcccatggtcccattcacttccgtgctcccgctaagatcttctggcgtacagttcgtgggtcagttcagtatttcccctttcattttgccctaaattgagtaatgtaaagtttcatttcgctgaaatcgatttgggtatcgtttttctttttggctatgtagaatgatcccacacaagactaagcgtggtgcagctgcactcgagagattgaaggcctatgaaggtgttcctgcgccatatgataggaccaagaggatggttatccctgatgctctcaagtaagtatttttatgtgttttgatattacagtttgatttattccaattttgtttttatttgattggttttgtgatatgggttctattgaatatgtgaaattttagggtgttgaggttgcaaaagggccataaatattgcttgttgggaaggttatcatcagaggttggatggaaccattatgacaccatcagggtaagatttatttctctaattaaattatacttgtctatctagtttattgagcttatgaaatggatataatatattagccaaatctttttgttgaaatttgaattggagttattggtaaaatagattgtaaaatgttattatccaaattaggatcaatattgtttcagattgtagtactagtaagtaagatacttaatgataatgtttgcttaagattttaggaagacgtttagatttagcttatgttgatattattttgatttcaagttagaaattatactcacattttaatgcgtaattagactctgttatttcatcagtaattgtaagaatgtattgggtgatgacttgttggaatttgaatggtagttattggcattgtagattgtaaaatgttattatccaaattagtatcaatgttatttcatattgtagtactagtaagtaagatacttaatgatagtgtttgcttaagatttcaggaagacatttagattttgcttcaggtgatactatttagctttcaagttagaaattatacaatcacattttaatgaatagttagactgtcttgtttcatctgtaactgtaagaatgtattgggtaagactgtcttagttccaacgatcttggccatgtaatgtctatcaatatgtgaa

SEQ ID NO: 44667 - DNA, 2350 bp, Cannabis sativa
tagatttttaaggggcatatttgtttttttcatttttagttaataaaattaaaattaaaataaattaagtaaggaaagggaaagaaattccctattaaaatggggggagaacctttccctttgttttctctctaatttgtgtgggtcccactagcttctctctttccaaaatttagtaaacaattgtatgggaatcaataccataccattcattcccattccctttaagtaaacatgccactaggttttacccaaaagtagcttccaaagaagttgttcgcttcttgcctcgcttagtggaaccagatggactacaaaagaggtcttcaaaatccatatctgtaagataaaagatatcacatcaagacttatataaacaaataacacaagggtggtgagtctaaatttcccacttagaatattaccatagtcatcaaacgaggatgaactgctataataattactaaactccctagaaccaataatcatataagggtcaaagggattaagagtagagatgtcccaatctgaaaaaccaaccctatcaaaattagttacatagtgcgtagttgttatacctaaatttcgactaataatgagaagctaacacgtgtatcagggaaggaatacgaatcagccaaagcagtgtattattaaatgcacatataataactcacctcgggaatcacggttgatagaaatatttgaacttgcaacggcatagacaaaagcgagataagaataataactattaacgaataagatcgacgagacaacacctccatcttgggatgaacagaatacataaagaaagttgttcaagaagagtaaacaaagagctcacagctcattgacccacatactcgtgagagtaagagcttgcaacttattgacccacatacatgtaagagcttgcagctaattgacccacatactcatgagtatgttcaaagagtgatattaacattcattcatctcgctctttatgcgttaaaataactgcctcgctaataccttccaaaatggtaaaagagaactgcaataagtattgtatctccacagttagcatttttcctacaaagacggtaaagaaggataatgtatactcgatgagaatcatctaatacagtcagcataaccgtctatagataaagataaaagaacagttgaacggttatttaatattatcacatatgcacaaaaataaaacatgatgaatgttaatgtttcatgagcgattatgaatgaatagatcctaagaaaataactgacaccctatacatctataaatagggacacaacccagggtaaaagggacaaccaatctagagaaaaaacaagatattattactactaatatcattgtattttgtattcaaataatattattcctaataagatggactcgtggactatgaaaaattaacttcaaaactacgttaaaaactttctgtcatttatttattaccataaataattctatagtttatttattacaaaaggttaatattttttattaataaaaatctacgtcaatagcatctactatgtgtgaacatggtcaacaacacaacaacaaccaataatacatccttctttgtaatgagcaactcattagttgcataagagttattttaaggttgtatgtcatatctaaaatattaacagaaacatcaagtattatcaacatcatatttgacacattaatgtgaaattctaaaactttttttattatttgactattctgttgaatttttaaaagtttcttattattaaaatagtaaaaattttaaggttcaagataagtgttgtcacagggaatcgaactccgaagaacaaccaaatgaggaatcttatccaaagcattttagccgacaaaagtgtgtgatgatgtagaaaaaagtgggtgtgtttgatgttattatcattaattagaacatttttgactcttctcttaagctcaaaatctctcttattttcaattcctacaactctgcttcttctgactattcaataaactcctccaataactcttcctctatagataatttttatcttctctttaatgtagatctattctatagacaaatagatatatatatatatatatatatattttcttgtgtatataatataaattataggtatcgaaatatatgtatatatctctgttttagttctaaataacacagtataaatgttttaaatatatgtatagaaatatctctattttaaatagagatgctattaatcttcttttttgacaatagttttgaataataatttatatgatttaaatggtttgagcgtgatagtctgtaagtgaggttatcatttttttttttttttt

SEQ ID NO: 44668 - DNA, 1258 bp, Cannabis sativa
aattaatatttataattaaatttgtttagtaactattcatgattaatacccattaagaagtgttccaaatatatatagatagatataaatttatataacttttaagatgtatggaagcaaagaaacaaaaagagatagtttagtgcttgttattgaatcaaataagatatatatatattttattttcttgattttttttaaacaagagcttagcccttaagggaaaaagacagtctggaaagggtagtagtgtgaataggaagaaaacactttactattttcaacgaatgctaatttagtagttgtattaattattccttaaaaaaagtaattgtattttaacataactaatgtatatttattaataaactaagtatgaaaatggtagaaaagttttctataaatatagattaattagtcaaattgattattatccaactattcgtcaatgttcatcacctaattctcatccaactaacaattaaattaattgtgttatatgttgaatttactagaagaacgtagaaaatgtataagctgtcttaggtttgagtggcaacacataatatagaggttatcatataataatatatagtggataaagtatgtaattatgtatgtatggagtggagatgagggaccccacgaaagaggattggcagttaatatagtttatgttgattattattgtgtagtagcgtatcaataaccaccattcaaattgactggtgggggagaagatgatatttttgcctttgtttacaaaacttttttcttacagatttatctctctaattcaaaattttatgaaaaaagaaaaagaaaaagaaggatattatataagttagtgatttgggcggtttgggttgctttcgtagagcatgggtcagactataagaaggaaactgtagagtgatattcccaactgtcaattaccctttttgtcgaaaatctcgatcatcggttactgttgttaaccaaaccttaattttttaactaataggaaaaacgttaactacaaaacattgtttatatggtatttgcttcttttatatatgtttggtgacccacctttattattattattattttgaaattagaaaattaccacccttattcaaacgttaaattaggggtggcaaaacgggtgtcgacatggtacacgaacaccaggggaggacccacattgtagcgaggggggcagtcgcccctcctgaaaaaaaaatcaagaaaaaaatgtatatgtattttaattagt

SEQ ID NO: 44669 - DNA, 1016 bp, Cannabis sativa
tcataatttaagtcacatattcgttcaataatacaataataggacataaagcacttgaggctagctcaagtaccataacagggtgcgtgtatattagaagtcttgagttcgagtcccaaattatacatgattataatatataaacgcttaaataaaaaaaaatacaataatagaacataaaatgacactataagatgacgattttatttatgagagtcatcttatgtgtgagacaaagtaacatactcgacattttacgtaaaatatggaacatattacttgctcgagaccatttaaataaagttcgatatcattatcattgtttacgaagaaaaatagagaaaacgaaataaagattcaatactgacaacataaaccctaacacatatttcgcttgcacatagtcacatactatacataacttaatgacatgatcattaaccgtgtaagcaatcgcgtcttaactatgttgttattaggttaatgagaaagatattgggtttgtaatattgttttatttactcgtataattaaatgtaggtaaactcttgacctaaaaatgttgctttcacatctccatccttattttatttgttagtaaaagtatttatttctacataatgaagttttacttttgttttacttaaatcaagtaatgcttctcttgttggttttcctcaacaagtttgcttgcttctcttcttggtgacttatatagtttgagttttattagattttgttagatgtaatagggaaaataaatttgggttttcactttgttgggtgttttgcaaaggacaaatgatcattatgatccaattggcttgtttgactattaccatagaaatattacttttagttactaaaattttgtgtttgaaagtaaaatatttgtagctaataaaaaatatatgatactaattatgacacattactaaaaagttaagtactaattataaaaatacaatttattatgaataatatctcatccattccaaattagaatttctttcaat

SEQ ID NO: 44670 - DNA, 1474 bp, Cannabis sativa
tggaggcttgaagcggggacgttacaatgcaggtacggcgaaagatcatcgatcgatttggtcagatatgagtttggggatcatcgatttggtctgagcttttctctggtttgggtacgtattttactttgtgggtttagagaagacaaagaaaagttaataaataaaaggaaataaaaaaatccacggcaaaaccaataccgaggacatatccacggtacaggaacttagccaaaaaaaaagcgcgaatttctcccgcttgtgggaaaatactaataacgacgacatgtccttgttcaaatgtcctctttacagacccaattttttgtagttatctaaatactatattttcgttacaagtaagtttttgttatgaccaaacactactacaaattatacaaattattatcaatatccctcatgacaagtcagtgactttctccaactcaaatctaatggtctctttctgattactacaaaaaggttcttttatagtctctttatggaaatggaatgatatgatatgatagccaagtggtagtgcaagaaaaagtctgagtgaataaagccaaagtctgaacctgaaattattcttagcatttcactccatggtgtttttagtttattaatgttttattttgtcttttgtgtgtagcgttacaatggttagagaatgaatctaatgtcacacttagatgtaaagattgcattgaggggggctcaattgaaaaagatcgctccaatgtttttgtcaattgggttaagaataatcaaattaaagcggtgagatttattagattctatttgtcttgtctcttgtcattttcttttggtttatgttgtttcttgactaataatttgcaacctcttttgttggtttttgaagatttcggtggtgggtatatgtacagatatatgtgtactagactttgtatgttccacattgtcttcaagaaattgtcggcaccttcctccccttgaggatgtgattgtgtattctcgtggctgtgccacttatgatatcccagttcatgtggcaagaacatccaaggatctaatatctcacgtccctcaggtacctttttcaactatcaaatttgtgtcttaatttggtgttaacctgaaagggtagagcttgcttggaaacacttttaagtgttttactaaactcttgctcagttaaatcttcatattttagcaataaagcagtaaatatcttgaatttgagttcttatttttctgtagtgaattagactaaaaccttaattaattttatgccagttttttggaggttcaatgcttttattttgttgaaatacattaaagatgcgagttataaacttttacttttcctgtaaagtgacttaagatcgaaagccctttatatcggcatagaaccaatcagccaaaaaaagtaacaaaaacttgaattgtatgtttttttggattatggtaacttagcctttaattgttt

SEQ ID NO: 44671 - DNA, 1910 bp, Cannabis sativa
ttttataagaaaaaatcgtgaatgatattgtatttttaattatatagtttgcttgcatcagatctatatgattttagtagttttgtaattattttatctttgaactaagtagatttggttttttgcatctttcggtcgtttagccattttttcgatagtttttcgatgctttttcaattgattcttgatagtactcctaaatgtgctttccaaaggttaaggatgatatatttcgatggtttcacaatagtttatcgacaattttttgatagattattctcgatggtttctcaacattttttctacagacattttcaatggtttttcgataggttttcgataagtatctgataaaacataactttgaagttagcttgaattaattcaggttatcgataagatttcgtgttcacaataatttttcaatagtttttcgatatttttgctattattatcgagactctaacaattgtaataataataataaaaaaaaattattgcagatcatcgtcctctggttcgtcttctcagtggtggtgacgataaacaaggatcggtggttcttgacctttaaggctttagttcggtgggtcgttgacgaggagaacacgaaagaaccacaaggcatttatgcttttgaatttgggacttctggggtttcgatgcaagaaagatgggaaaagaagaggtggcactataagaacttagggcttcaatgggagggcttccggtggtggcgacgatgatcggaaggaaatttaggactgggcggttctcttcatatctaaagagagatattttttaattgaaatgggtagaatgaatatgctaaaataaactaaagatagattagtatcaaattattttgagaaatatttggggtaaagttgtaaagaaaatttaaaaaatttcttattttatatatttttttattcgataatctgaaacataacttaaatttagtggttataaacataggctcatgatattaagactcatctcacaattaactatggcagaaagtggagctggactcaaattgcttggtagcagtccaagctatttgaaattcattatttatgctttcttcttttagggttattatagaagattgtcataaacttcttacatctttaaacaattttttttttttattaaacaatctgctaatatggttgcttagaacatcttgttcttttctagatcaagtgctcaacagagatgatgttcctattaaggtacaaccttatcttttagatgatttagcaaaaacattagtttttttttaaaaaaagactcatctcacaaaaagaggtttcaagttagagtataatgttttttttaataaataataataagaaaagaagtatagctatatttatttaaggctaattaggatttttgccccctaaatttttaaggatgttaaagatgcccctgaactattaagattgttagatttaaggacttttttctaattttagtaaaacaatctaacatagatgaaaaattcaagggacatgatttaatacatgtcaaagttcgagagacatgatttggtaaatatcaaagtctgtggaacatgattttatacataaacaatcattaaaatagtaaaattgaataaaattagatagaacttttcattaattccaacagaataagcaaaaatttttgtaacattggatatgattttttcttcaaaatttattgcacgtgtaacatgtagattctaactccttagcatttacgtagaggatgtaaaaagtttgttgtgtacattttcaaaagtgtccctaatttatgtacattaaacaaccaatgtagtgcagctctcaaatggacaaacaacttgctcggctaaattgactttctatttcttttttcttttgagaaatataatcctttag

SEQ ID NO: 44672 - DNA, 3397 bp, Cannabis sativa
agcaaagaactatccaatcaacccaagttttaataaaaccaataaaatttaatgtaagcccaaataaaagtctaacaacaagcacatgaaatatgaattgtttattattagtgctttaatgcacagaagaagtacctagccatattgtgatgcttggctcctaaaaagataggaaaaaagcttttagttttatcctagttttactttgtttcaagccttatttctctgttatgcctttgtgagtgttgctactaatattgtgtgtaatcttcttaaccttttgagggtttatgattgcttggctgatttcaagagaaatggccttaatgattatatatttctctattttatctaactaagttttatttatttatgtgaaaatttgaagttggtaatgcgatgatagtagcgatgacattatcttgcaaagatgagagcaaaattaccatggacaatagcgagtacaggtacaaaaatattgtaaagtaatgtgtatagttactatttttcagtgatgatgttactccatttcactgtacataaacatgtcatattcttgttatcacaaactattaatggtattctagcttctctactaattgagttttaattttctatggtagataatattcttattcctatgatagggatcgatctttaataattatcgatgcaatccaaccattttttcacactctgtttcagattcttgagatgactcacactacttaccaaatgatgaattgcattaatacttaaaaaacacatttcatagcataaattttaacagaaaataatagagtaaaacaccaaaatcaagcaaacattgattggtgctactaaaatgaggattataaaaagatttttttaaaaaaaaaaaaaatctttgatcaaaattaccatattttgaagaagcaaaaaattgaaaacgaatcaaatccaccccaacaataaaaagaaagtggattaacaaatacataggcttcaataatttaacaacattggagtggttacataccagagttcttaattattgaaaacattgaattgtgttaagattgatacaactatgcatgttctccaaatacaatgaaagaaaacattgtcatttaacaatcatcaatcaatggaattaagcaaacgatgaaactcttctctattattgttgcttttctttcctccattaaaccattacacaaattttctttttgttgtactattttttttttcatttatttatattaaaaaaataaaaataaatgtgatgcacacgcatggtgtaataggggcagctttgtcaaacaaaaacttaaggccaacttaaaaattattatagctagacacacatgacatgaccaaatcaaagtatatattaatcaaagaattatattttgataaaatgtatcggaattaatttgctaagtaattagcttaattaaagatgcttagataacaaagagcgtctgcccttgttcatgctctgaggcagttatagttttctacagttttcttcatctccaacttcccatgttcatgttaccattacccttgaatttctgaccactaccattaatttctatttataattctgtttcaatccctgttcaatcaatatgaatccacttttggataaactgcaatccaccatgaaattatctgacaatgaaagtagcattttaaccatcacggaggatggtactgacgctgaagttccagagaagtatatcctcattgctcgagttctttcaactaggaaagtgtggctgactacttttcaaagacaaatggcggaacattgggatggaaggttcaaagtgaatatcaaagaacatcattctgatttgttcttgctctgttttggctgtgaaggggatcgacttcgggcattagaaaaagagccttggcattttcaaaataaccatattatccttcttgatcctactttgcatcaaactattacccctaacattatgatcttctctcctttttgggttcaggcttacagactccctttcatgagcaaatctagatctctggccaaatctttggcctctatcttgggagaattcttggctgtccatgatgattctttaaatgaaggttggggacctttcttacgttttcgcgtcaaaatggatattacgaaaccactcttaaggggtcggttgatctctcttcctaagataagggatgagttttgggttgagttccgctatgagaggttaccaaactattgtatggagtgtgggcttattgggcatctttaccaaaaatgttctgtttttcttgagaaactagaccaaggaattgaacccgaattaccgtatggacctgaacttaaaggatcgagattgccaacctcatcctatgatcgttatcgcactgatttttcaaagggaaatgcatggcctttgctcactcgtttggcacgaaacacattaactgataccattcctagacttcgtactactccaaagccccagccaaaaatttttttgatgggtgaatcatcaaattccacaccagaagtgcctgttacttgctcctccaatactgatccacgcatgctggttgtgtccacgggtacttcttctacttcttttgccactcaaccaccgactacatccctattcacaccaccctctcttaataattcctcactcattaaaccaccactgcctttcattttgccaaacactgctcctggttttgatgtcccagttaataataaagggaaatccatttttgttcctaacagcaacaacaattcccctttattgatagatgtgtacacacctgatttagagacaaaagccacaactacaaatgtctttgccacatatcctccaatgattaactcctctcatatcaaatcacaatcattgcagccacactctgttggtgcaatccaattctcagcagtttcaacgactgcccctgctactttgcacactacaagagcaactttcaaaggtcaagagaatattcatcccaatcgtacttttaagagacaatatgacacgaattcaatgagacaaactcttaaaaggtgtcgagccaaccaatctgcacagccttctctgtcagaaggaatttctccacatcagtcggtttctactggtttagattcaattgatgttcaagacaactccgcggtgattgctcagcaatcccgcgattcaccatgaaaatcatcagctggaatgcacggggtttggggaacccgagtgcattccgtcgtcttcgtttgcttgttaaagagcaaacacctcatgtattgtttcttatggagacaaaggttactgttaattctctttcacgttttaaacaatctttaaattttagcaatggtttagaagttcctagatctggattgaagggtggaattatgttgtta

SEQ ID NO: 44673 - DNA, 933 bp, Cannabis sativa
tatatataatatatcagtataaataataagatcgaagggaatacactcaaaattataattataatatattgtctacattcatatcaccaatatgaaaactaatttacattatacgtttctttaaatattttacaaagaacgaaaacgacgtcacaaaatgtccatagtttatttagcaataataatatctttttttttttttttataataatatcttcaccatattttgggacacctatttatagattagttttttacttttagattttaaatattacttttatgtaaggatttgttattggtttttggttgttatttgacgtcttagttcagtatcgcaagttaaaatttggaagtttagactttgaaatgattttaagccatctttggtgtccattcgactcatcagtactagaatcagctcgtcgaggagaataatatatactaagtcattttgcccagcacgttatttttttaggtgacgtttttgttctttttctagcgatatcgtatactgttttgataaataattggcatggatgtgatctactcgtcgaggtgattattttgatgtatgttactcctatttttggtggtatttctgatacaccaatttctaccaccaccaataattaatatgtaccgcttaagtgagattttggaactctaaactttaaaaatagatgttatatgtcgttggactcaattttgaatgtaaaatgcaatgataataattatttagccatttgatggtataggtagggtgatatctaagattggactaaacaattgaacctcaagacttagaatctgtacaggaagtaaattgaatctaaactcgatatgcactcacataatttgtgcaagtttttcatgtatgcacatctaatttttttttctatatatataaattattttattttttttaatttt

SEQ ID NO: 44674 - DNA, 1191 bp, Cannabis sativa
aatcaatggttaaaaaaagttccctaccgatagggaacttttattaggtcctaccatagtcttgccatatatatatatatatatatatatactcgtaccgatcaagtaataatatacattttgagttgcatataatttttttgcttgaatatttttgaaatagttatgaaagtaatagtgatcaaagatgatagaagatatgaagatttataaattaatacattcaaagtcgtgcaccatccacctaaaaaagaaagagtagacatagagttagagagtttataaattaatgagtaaaaaataaccctaaattattattacaaagtaaataaaaaattaccaataaaatattaccagttaacttttataaatttataaagattcgtaagtatatatatatagtaattatatatattatataattttttagaagatacttacataaatataaattatatatagttataaaaaataattaaatacaattttacgaaaaatacctttgatgtattataaattaatcaagttttgaaaaaatttcaataaaattacatgaataatattaaaaattagaaaagaaatgtgaaaaaaatcgataaatatttataaatcaaatagtcttgactagtaaaaatagaaataaagatagacagaacaattttagcttcaccctcatcaaaaagagctttaatcaaagagacattccaatgacctgaaacaaaattgagatcacaaagtcgttaaagcttagcaccactccaaaaagaatagacctaacccaagcatcttcacaaatatacgaacgtgagtcctatcacccacaagccaacaaatcccttttttccaaaaatcccgacccccaaaggatgttttccatagaaacgaagcccgtttagtttcctccacatcaaatatgttactcctactaaaatagaagcctttcattaccttagccgacaaggaatcagaaaagttgtaaaatcgcgtaatttgcttagctaataaggatttattaaagaggaaaatatctcgaaagcacataccaccattcgacttgtgccaacacaaacgagactgaaaaactgtgtatttgcaaatgtcagttgtatataagaaaatataaaaactggaagcgtttgcagaagcagaaagtaattctgctacagccaaacggaacaggcagaatataaa

SEQ ID NO: 44675 - DNA, 1124 bp, Cannabis sativa
aaaaaaaagaatctttatttttattcaaaagaaggggaaactagtggattggatacaaagaaagcttagtagtgatgcattgctaattctatatatgcaaatatatttatatagaaagagaagttgagttcttttttttaggaaataatgtaagcaaaagaggtaaactgataggttaatgatgtaagtgagggtacactacacactcactcactcactcattaataagaataagaagaaaaaaaaaaaatctataatggagatgaacaagtctgacaataactgatttgtttgtttcccgagaaaattagcataagaaagcggtgagaaaaaagttagttgtggtgtggaaaatagtcaggtgtgtcctaacacttgtaccggaagtgactgtatattgttaaatatcagccgtacaatttaaccacgtggcatttatcagacagctctgaaaactggtcccaaatttttaatatttaattttcagaaaataataaaataaaattaagatcatcagatctcatcaggccccgcccaccgccccatattaccactcgccagctaattttttttaatattaaatattttaacatttttgggtaaacaaacaaacgaagaaaaaggtcgagagataaaatacatggtaatgtgattctacatgcatgtgatccattcttgtttatttcttcatttttttttacttattttattgtttatgtcattttcttttttctgctcaaaaatatagtttgtgtttttagtctctcctactcctacatttaatttatactattagtagaagccatataattaatcttaaaatttgtttatcgggtttgcgaaattcttacacaaaatagttaaaattatacttattttttcttacttttctaaggattattcattttgtttttgcaaatgtcattttttttacttacatttgaaactatggaacaaaattttggcttccactttatgaggttggaaacacccttaaagtgcgcttagaaaatgtaacaacaatttgcctattataatcacgatctagaaccacaacacttatactcaaaagatttgtcgcgcgcggttataggacatgatttttaaccgtcggcaattagttc

SEQ ID NO: 44676 - DNA, 1883 bp, Cannabis sativa
gtaaggaacaacattctgaacctacaacctgtctcagaagttcaattcagttcagttcgtttttctttcatgttcaaaaacgccaagggcctcttagagagtttttcctacatcaatatttgattaaacggggttcaataattctttgtttctttttcttggccaggactaaatttgtaggtacacccgatgatgattttctagttgggatgaacaatgtcatcgtcttcatctattatatagttttcaaaaccgaccaattcttttatgaacggtgagagtattgcaaagaaaatggatttgacattattggaggatttgttcactgcttaatgcaattggaatagattggatggaagagtgaagaaagaggtaggccttgccaagttgtaagttatggtctcaggagaagattatgtttggtaaatttgttgtataaagttatttcctacatgcattatacatatatataattatatatatacgcacacataaatggggatatgatatttttcatatacaatctatcagctttgccaaattgtctatggaacttgctgcgtactgcatagcagaaatagcatattgagaaacatataacagaaagtaaatatatacctctatcagattcagatgatttctatgttctttcattggtggtaattgtctatatcaataatattgtcctttctggcttgaaatacggcaacttaaattccaaaaattccaaacggcatgtcgttttggctcctcacatttaagctttcaatactgcatagaatgacggtgataactaaactatgaagaaatgaatacatatacgtggaactgctttaaaattcatatatggaaccagtagcaattttttatacatatttatagggaactcgttagtgatacttttgctctcaaaagcatttttataacctttcatttttaatctaatggtagtaatttttttgttatatctttaattaccacaaaatatcacacataaaattattttttttactcatctatattcaatccactacctagatgatactcttgctaattttaaagaaaatgtagttattatatttttttttatttctactattttctttaaaaaaaaaaaactcagatacttttattttataaaaaaaaaattctacacacttaacccatcgtagtagctgccaacctcactaaaaaaataatcctacacttgtatagatcatagaacacaaaactcttgtacaatttcgtttttatataattatcgacattgaagattatataaattctataaatttgtaagattaataatgttattattacagtaattattaacataaatatatcttatattatttataagaatataatgctctttttactgaatttaagtatcaaactttttctgaaatttgatttgcaatgttaattgacagttcaagcgaaggtatttgaaaaaaatttgaaacaattccaaaatctaaaattctattctaatttcaaaatcctattcctattgtgattaaatgatttaaagtataaattgtaagtcatggtgtcttgtcttttgacatgcgaagttcgtattggttttgggtgttctgtttttttctttttttggttctttggcagtggtaccatggcaccagacatggctgaagctttagccattaaagaggcgttaagttggatcaagaatcatgaatgacataatgttgaactcgagtccgattgtctctcaattgtccaagctattcgaagtaacatcactatggtttcgcctcttgggggagtgatgatagactgtcaaaagcttctatctattttaaacactgtttctttgttttttcatcaaacaatctgctaatatgactgcgcacagcttt

SEQ ID NO: 44677 - DNA, 2828 bp, Cannabis sativa
  modified_base (2470)..(2477): a, c, t, g, unknown or other
  modified_base (2573)..(2573): a, c, t, g, unknown or other
  modified_base (2767)..(2769): a, c, t, g, unknown or other
tggtgaaggttgaaaccaggttgtgaatctcaacttgaggagattgaagctgagatgggctgtaaggttgagaaagtgttttggttgcctggtttctattctcttcctccaaatgttcaaatcgctaactcaaaggcataccgtgaaggaaaggtacagaacccagaactttatttaggtaaacttttgattttgtattgtataaaatgtcaatatcattatctgtgtgattgttcatctttcagatatatgggattgatgcagcttctggggctgctgtttcggctttaaatatttcagctggagatcatgttcttgatctatgtgctgctcctggtactatttccctttcaatattatgtactcttttttaattgtgttacatcttgtttgtgccttgttgaagaaattttcttgggtgtgtttattatttaaatggttgttacatattggatcatgcttgcttttcaagttatgattctgatgtcttacagaactatattagcatacctttgtggcttgcgtatgtatttacctcagataatataattttcatttgtgattctgaagaattgcctgcttacttttgtttttttaataaatgttttttctttttcaatcttaaggtgctaagctttgcatgatattagaccttcttggtgacttgggttctgtaactggtgttgatgtcacaaggcaccgtctagcggcttgtaggacaatggttcagaaatatgaattgggtgaccattgccgacttcttgttgctgatggaacaactttttctctatttcctaccaggaattattcagattctaaatcatgtaatttctcacgatgttactaatttactatgtatgttaagcttcagttctgcggtgtagttgaagtgttcatttttaatgtgctatcattcattctagaattatgcaggtgaatctgtgttaataggaggtgtcgaaaggtttaaagagtggaggtctaggagaacatggaaggagaggaaaaaagcagctagagacagagagaatgctcatatgaatcctggaattcaggagcccgagttactcttttatggaaaacatgctggtgtggttggtttaagtaaagatgaattgtttaaaactgtttctgacagtgagttgttgagctgcggctatgacaaggtaaattgaagtaaactattctttacccacttaatcctcattttcttagagagttttatgctcatggaatttgagtttacagtttagtcttttgtatggaaggtatttattggttggatttgatacaggtgctagtagatgcagagtgtactcatgacggatcaattaaacatattcaaaaatttgaacattggggttggaaaactcttcaacgtcgagtgttggatgcagaaagaaccgatagcctgactgtgcttcaggtaactaatttattctactattctattgcatgtatttcttagctttgttgactatgcactttgttaatttagctgcagcttgctgtttgctgtttgttcaagtttttcacttgtttcccaaaccaaacattaaatgaataatcaatgctagaaatttctcacgtgaactttgcagcaagtgatcttttgttcctccctagcttgaaaatgagttttagacttattactgcacacatttttctgttgtttgcagttaaaactcttgagcaatggttttaggttgctaaaagctggcgggctgcttgtctacagtacttgcaggtgctctttttttcttttttcttttaccacccttgtgtatgctcttcacatcgtccatttcttactcttttgtgttttttcactcaattagcttgacaattgctcagaacgaagaagtggttgcacaatttctgaaggaaaatggttctgccggtaagttccttttacgagttgaagctatagatagaatgatgcttatagtcatagtatcatcacaggttacgtatatgacagcctaaaaatgttgtggcttagtttcatccacattgtcgtgtgactgttaaaactactctgttgtaaatgattttctctgtggtacataattggtttaatgttagagaacactatcgacttgttatcaccattttttttggggggaaattaactttatttttcgttgacattttggcatggtcttgtagagttgcaggagatcagtggagccgaaagttggccttgtagaagtggagggatactgaaaactttgcgctttgatcccttgacatcacaaacaagtggactttttgtagctatgatcagaaaaatagtcacctgatataatccaatgtttatttaggggctgtaattttaggcctaacagattacctccaaataattagattgggctctttgtaattttttttagggattatttcacaaaaccataaaaacaacaaaaaaattacaaaaatactgtatcacggaattttaaatatttttacnnnnnnnntaattttatttacagaaaatacggtcttttaatgttgtaatcttgttaatttgttgttgattttttgttatctgtatattattttttgttgttatnttgatgttattttcatattactttgatgtagttttcttgttattttttggaaaaccgtaaaaatgtaataaaatattttttaaacgtaaaaatataataaatttacaaaaaatggtgtatataattatttcttttttttaggagaattactctatatactattttttttaatttacggtttgggtttttaaagnnnttgcagcgctagttgcaataaaggttgggaaatttgagtttctatgcattttttatacc

SEQ ID NO: 44678 - DNA, 3682 bp, Cannabis sativa
ctcatctaacggctgtctatcacgcgacaaaatcgtgtccctgtaatagtatatacattttaataaatagaatagatatgaatatataatgtcacataaataaaaaattaaagtgttgttgtttggtattgttgatcaatagtcaatacccaattagagataacttatgtattcccttcaaaatactctatgtttattatataataattctattcatttaattaataatttctgatggatcgatcgatatacatatctagaataaataaaaatggcacgtccacagatgaaaatcaattgttagaataagcttggcaataatgcactccatattggtcctcatgagtactgtcttcatatacatatcaatcatcggaataacaggaggagccatatatgcaccgaatgcaaagcctggttgtccaacccactgcggaaacgtaaccattccattcccttttggaatcggacaaaactgttatattaacaaatggttcgaactggaatgcctcaacgccaccgctgccgccaccagccttatcttgaaacgcacgaaactagaggtgctcaacatatcggtcaacgatggcacccttcaggccataaccccagtaaccctcttcaattgcccaaacaagaaagaaggtggtactagtcttcgtcaactcactgatctaaaaggaaccccttttagttttggttttggcaacatattcgccgcagtgagttgcggcgccgaggctattatagactcaagtttcaataatacaatcgttcaggtcgggtgcaagtcgacctgttcaagtattactaatagtactactgctaccaaaactattaacagttgcgatggtgtagactgttgcaaatcaaccatcccctcacctcttacgcccttccaaatcgtattccggaattcttcctccacaaaggtgagagaaaatgaatgcaaatacgcgttctttgtggacgaaacctggtttgggaaacaagtttttccaattaattttgacatggattcggtcccggtcaatctggactggtacttggatcaatcaagtgatgattgggaacatttttcctccatgggtgagttggttggcttagttatttacactcgagtaaatcaatcatcaaagtttagatgtgtgtgcaaaaatggatttcgaggaaatccttatctttccggaggatgtaaaggtatctatatatagaacatgttcaaattttataaattctaaattaactttatgttgatttcctcaaaataaaattaaatttgacgcaagtttttttatagtgatatttttgttttcttttatcagatattgacgaatgcactgaagatcccatgatctgtcctgaaccgggtgccacttgcattaatatagacggctcctatacatgcgagaagccagagagggataccaaattgcttattggtactctccttattataaatatatattccaaaataaaaattttgttttttctttaaaaaaatttagtttgtcagaaagcatccagtttctaatgcattaattatttgattttctttaaatagtatgaagtcttttttacttttttcaaacccaatatgttttctgatataacatgagctaaataggtattggcagtggtattggatcgttgttggtagctgctatggcatggggtttatacaagattgttgagaaaataaaagatgcaaagcgcaagaaatcattctttaaacgaaatgggggtttgttgttacaacaggaaacatctgctggaaaacctaattttgagaagactaaggtgtttaactcgaaggaagttgataaagccacagaaaatttcaatgtgaatagagttctcggccgaggaggccaaggaactgtttacaaaggaatgttggcagatgggaaaattgttgcggtaaagaagtctactgtagttgatgaagctaaagtgtcagaattcattaatgaggttgtaattctttctcaaataaatcatcgaaatgtggtcaaattattaggatgttgtttagagacagaagttcctcttcttgtgtatgaatttatacccaatggcactctctcacaattcatccatgaccacaatggagaccttttactaaattggcaaatgcgtttaaaaatagccatcgaagttgctgaagctctttcgtacttacactcagcagtttcttttccaatctaccatcgtgacattaagtctgcaaacatacttttagatgaaaagtttacagcaaaaattgctgactttggcacttcaagatccgttactttagaccaaactcatttgacaacagaagtttatggtacatttggttacatagatccagaatactttcaatcaaatcaatatacagaaaaaagtgatgtgtatagcttaggtgtggtacttgtggagctcttaacaggagaaaaagcaatttctctatcaagatcggaagaaagtttggctacatattttcttatatcaatgcagaagaatcgtctacgtgacattcttcatgctcaagtattggagggaccacaagaagagattttgattgttgcaaaccttgcaaagcgttgtttggatttgaatggaaagaaccgcccaaccatgaaagagatatgtatggagctagaagtcactaaaatgaaggaaacagctacttctaataatgaccaaggtgaggctcaaccaaatccagactttggatgttatagaatcttcatttctctattcttcttcttcttcttcgctacaagaaataccactattgtctttcaaatcttgcattgtaggatggtagacatatcctctaacaaaacaaatgctacaataataatactaaaatgtacaagtggatagcatgtatataaagctttccatgaaaacacataatattatatatacatatctgttactctattactagatacaaaagaatgagtttctacaattttttattactatatttagttagttaaattttcatactcatttggagggagataagcaatttctaggaattttttttataatattaaaattttattgtttagctttcggagggtatctctttttttatgtaagtcccaacgttaatgtggcggcctatagattagtttagcatgtacttagaatagacaatattatttcttgcataaaagaaatctcttcacttttgcctttccatattttttctcttacctaaaacgattacctttgaaaacatatatatatattaataatttttttataaatattatattttgggtaaataataattatgtccttggtctatgggttttgtattatttgaacaagtaaaaattatgtcttggtgccagtggagatataaaaactcgatttataaataagcatcccaaactttcctttctcctacattttgtttctcttgttaggcccttttctctaatgggtttttgtgtaacaactaacaagtgtatcccatagtgtgaagggtggtgtgtacaaggccctggaacaaattcactgttgtatgggtgactcacgattattagtgattaacaaagaactatcaagggtttggatccatctctctccactactagaaaattgggttttagtgacatacattgagtaactctaaaactatatagtgacacttcaacgcgcgtcactaatgagagtgact

SEQ ID NO: 44679 - DNA, 4407 bp, Cannabis sativa
ggtactaaataaacattactaaaaatacaaggtaccaaacttgtatttagataaaacacaaggtactaaatgtgtagatacccttgtaacaactatattaatggcaatacatttagatgtgttcctcaaacataagcaagttaaaaaatatattcttctcaaactaaaatatttgtcaagagtggagatgtgattcatagtttcatttagttgtagattttttatgtggcagttattactttcattaatagtatgcattgtgatgttctagatgctcctaataaagagattatgagaaataattcagaccaagattgatacaaaatgtgcattaagaaatattaatttcccatcctgcctaacaaagacattgagataataataaaccaatttcttatttacttcaaaagttattctgagttaattaaatgaagtagttttttttatgataagtatgtttgatggtagattaaatcaaatataaatttatagttgtctatatcaatagaatttaaaactaataactttgttgtctttctatacttttgttttgtttttttttttccctcacactgtcatctagttattttagctaatcttgcttttatttaagctcttatgttgtaatgcattttactttagataacatactattgtgactcttaaaataatatgtccaatatagtaaaggtcccatacaaaattaatgatggcatgattatttatttttttctttctagtttgcttacaagtttaaagtaatcatgtaagtcactgattgtaaattaaatttaattttttttcattctcgttatttaccttttgagtaatcactagttttgtaaaccaattttatatacttttcaatattatatggttgccatgaatttataggttaaccattgccaccataaaaacattgtaatgtgaaactcagttatttcatccattagcattaggttcagccttttagtatagtaattattagaccatgcaaagtttatataaaattaattttggtatcatagattcataaacagttattacaatatgattctaaaaacaaaaattaacacataactaatttcttataagttcattacatcaattagttcatagctctctatgaactattaaaaaaaaaaaatcaccacataatagatgaaaaggaagaacagcatctcctacctctactaacaaccggttccattagaacaatttgaagggaatgtggctattactttagtcatatttccatgaaaatgttatctcaaaagtagacatcaacataagatataagctaaaataaactgttgggagttgtaactaatgtcttagtacatcatataggcttatagtacccataggatgaacaagtgatccacttgcatggacatccaagtatggactgccattttcatgtcagtcactctagcgcttatggaagccacatcttgttcaagggcatagacccttttagacagctcaaaaatattatggttatatactttagtctgctcctctagctgctcttccaaatacgaaattttttaatgcaaggagttgttattgatgtacagttgttctagaaatgaaactttgtgatgcaaggagtttttattgatgagcatctgatgatattcattagcaaacaatgcattttgtgcatgaatggcttgcattgccatttgcaatacataaatgacatcacatggatgtggttgtccccatgtgctagaaccaaaagttggctcattattaccagttgatacttcccattggtttgagaaatgaggtgagtaattcattctcacagtttctgtttgaggtttgtttgaatactaagatactacctctttgtttgtacattgcaggcaagtaaaataaagtgacatataaaatgcataggcaactttatatagaagtagaaaagagtgtggctttatcaaaagaatgtggtatgactttttagtatactattcttactttaatttaacattacaacggctcttgacatgacaattcttaatccagttactaaaacattttactttaatttaacattataatgatcactaccatgtcaagtaaaaacagtggtcattgtaatgtaatcaaagtaaagtgttttagtaattagattaagaattatcatgtcaagagccataccacctaccattgccacctgtataataagaatagtacaatgaagagtcataccacctttatttgataaagccgcactcttttatactcctatataaagctgcctatacattttgtattcactttattatacttgtctgcaaatcacaaacaaagaggtagtatcttaatactcaaagaaacctcaaacaaaaactgtgagaatgaattactcacctcatttctcaaaccaatagaaggtattagctagtagtaatgagccaacttttggctagctctagcacatggagacaaccacatccatgtgatgacatttatgtattgcaaatggcaataaacacaatgcaagccactcatgcacaaaatgcattatttgctaatgaatatcataagatgctcattaataacaactccttgcatcaaagagtttcatttctaaaacagcagcacatcaataacaactccttgcatcaaagaatttcatctctagaacagtggctagaagagcagacaaaagtatataaccataacatttttaagcaatctaaaagagtctatgcccttgaacaagttgtggcttccatgagcgctggagtgactgacatgcaaatggcagtccatacttggatgtccatgcaagctgtggcaagtggatcacttgatcatcctatgggtactatagccaatacgatgtactaagacattagtcacaactctcaacagtttattttagcttatacttatgttgatgtctacttttgagataacattttcgtagaaatatggctaaagtagcaaccatattctcttgaaattgttgtagtggagccggttgttagtagaggtaggggatggtattctttcttttcatctattatgtggtgttttattggtaatagttcatagaaagctatgaactaattgatgtaatgaacttgtgagaaattaattatgtattaacttttgtaattagaatcatgtagtaatgactgattatgaatctatgataccaaaattaattttacataaactttgcatggtcttaagtaataattactatattaaaaggctaaacctaatgcttatggatgaaataattgagtttcatatcacggtgtttttatggtggcaatagttaacttataagttcatggcaaccattatattggaaagtacataatattggtgtacaaaactagtaattactcagaaaataaataacaaggagaagggaaaaaaatgaaattaaattcagaatcaattacttacatgattattttaaacttataaacaaactagaaagaaaaataataatcataccatcatttatcttgttcgggatctttattatattgaacttattattttaggagtcacaataataagttatttaaaataaaatgtattacaacataagaacttaaaaaagacaagattagctaaaataactatatgacatgatatgtgaggaaaaaataatgaaataaaagtacggaaagacaacaacattattattttttaattctattgatataaacaatcatagatttatatttgatttaatctactatcaaacttacttatcatacaaaaaactactttattaaattaactatgaataacttttaaagcaattaaaaagttgatttattattacctcaatgtctttgataggcgatgggaaattaatattgcttaatgcacattttgtatcaatcttagtctgaactatttcccataatctcttcattaacagcatctggaacatcacaatgtatactattaatgaaagtaataactgtcacatataaaacctgtaactaaataaaactatgaatcacatctttactcttgacaaatattttggtttgagtagaatatattttttaacttgcttatgtttgaggaacaaactctttcattcggttatataaacacatcaaaatgtattgtcattattacaaccttcactaattagcatttaatttttataggttggttagtgaacctgcattgactaatgtagttatattggacaatcctattaaatgagttatattattttgagtctttaattgatttcaagaataatatggtggtttaattttaaatttgatacatatttatatactttcaatcgataatattatgtacttaccaataggtactaaacttggatgaacagatgagaaaaaaaaattaaaataagaatatacacacataaaataaaaaaaaaaaaaa

SEQ ID NO: 44680 - DNA, 3804 bp, Cannabis sativa
  modified_base (3767)..(3768): a, c, t, g, unknown or other
agaggagtttgtggctgctcagctgtagttttcgacttacgttgagcatttcgcccgtcggttcttggatctagtcggggtttggagttcaagcttctatcctaataagggtttgaatggggcccatgatgggtgtacgtttagatgagcttggaggcattgtgggctgcgcttcgtatgtttctatgggggatggactaggtagcttaagatggggcctagagtggtacaatcttgtcaatgtgccacttcttcagtgttgggtggtgaccttcagcgttgttttcttttcatcactttgttttattttgttatgagattcctgatgtgaacgattatagaccattttaataacgatgtttgtacttacagatggtattgtggaggtctatttgctatccaaacaaaaaatcaattggctaatttcttgacaaaatgttgactcaaaatgtgtgcatctattatttaataataaaaaaaaatgtgctcatgtcaacgtaaattaatattggtaatgcccattggataattcttggattttgcctcttaatatatgaactctttcatattcttataataaataataaataatgaagaaaaagtaatattgaattaaaataaaaattgtcaaataaatgcagaaaaccattatcaattggctcaatttagatataacagatttgggtaagaataagattgacttggaagttaggttgaataggtcacccaccccctttactcttttctcaaatgcttaagatttgtatggaaaaacagaaaacgtaaccgagacttttatctttctcaattgtaagaagatgagggcaaccaaaatctactaattcacttaacagttcccacaaaattaagataatagcatctctctctctctcgctctgataatggttaacactagaccaagttacactctccttcatactaggtctagttagctgcatggtaaaatgtacaaaattcttggctcaccaaaaaggtcaatgcatggcctaaaaaaggggcctcctattttgaatcatgttatgcaaaactgaataaattaatataacaaatgaagacagcttttcaattacttgacctcttcatttccttgatgctttgcttgttccttgtcggcatgcatttcttttgatgaaatggggtctttttctgtaataaatataacaggtttatcaagttgtcttctacataatctggaaaaaaatgtgaaaacccctaaatatcatcagaatgatcctcattatgttgtcaaggattcaaataagattcccagccaactttttcaagcttttctgtttttaccaagacttcgtttcgcatgtcgtcttggtactgactcattctgcatgcaagtaatttattcacacattaaacataagcaaatccatagatattaaataaagaaatgaaaggtcaagttttatgtgcacgggacaagtggaggtggagaatcataccttgatactaggtcagcatccccaacacccaacattcttactgcaagtaaacctgcatttgtagcattatttattgcaaccgttgcaactgggacacctcttggcatctacaggccagtcatgcaaaagaaacatttaggctactttgcaagaagcatcatactcggacaataaaattaaatatcaggttggaactaaataataaaactcttggctctcaggtctgtctacacataaagaccaaggttgacaagacaaaaattacaggtacctgtacaatagataagagtgaatcaattccatctaatgtagaagcacgcacagggacaccaattactggcaagggagtaagtgaagctaccatacctaaaatttaaagacggaatagaaccaatgttaaaattacaagaaacatatcaccatatgtataaacaaattgtttattttgactagcctggtaaatgagctgcaccaccagcaccagcaatgatgacctgaatgcctcgatctcgagcagcagaagcataagaaaacatattttcaggagtacggtgtgctgaaactattcgcacctgcaatttaatttatatacatgatacaataacttgagtcaagtttatactaaaaaaattataacaagaacatacgaagcctaatgtcaaactgtaattaacaaagaaaataacctcgtaaggcacatcaaacatggctaaaatctttgcagcatccttcataacaggaagatctgaatcagagcccattatgatcccaacatgtggtgtgactacacttagcgaacaagaaaaaaattaaggcaatctacagttagcaaatattataaaaatttattttgcgaatctattattttggggggtttctcagtttttctttcatgaaagattaaagaattagaatgctacaagttttgctaagttacacttctctatagatttgcattgaagatgatgatggaaaattattaaactttccaaccagctacatttctaaagcaactgataaataataaaaacagccaattacaaccaacctgcagactggctatcaaaactttctctattcagtaatgagtctaaacgtttctccacatcagccttggatggaccaacaatggtgatgtgacccatcttcctttgcttccgcatttctagaaaattatgatggtacaaaaagacacattggaaataaataataaaggaatgtatgtggcaagacattggtcaagaaaatttaaggagattcctacctggcttatcgtaccaatgaacagtagcccccgttatacccaaagcccttccaataagttgatgtgctaaagagaaaccacgatccccctcatcttcaccaagtatattatacataattgcagctggcgttttcatcgatggattaccaaggggaagaccaacaacagcccgtaagtgttgttcatactgtgaggtgtagcaagactctattgtgtgatgaccactattatgaggtctaggagccacttcatttagtaggatctgatgaaatagcaatgggcattataagtaaatgaaacatattgcttaactaaaacataagttacattactacctgaccatcctctgtcaagaacaactcaacagcaaacacaccagcaccttctaatgaactaacagctttataggcaacttcagtggccagcttttgaatcttccatgacacattagccggcgacttgacaatatgacaaatattttccctaaaagaagagaaaaaagaaactctcaattatatgtgacttgagtagtgcaagtcagagatcaagtatcatgtaaatgtatttcacaaacatttgaatattaaagtccaaaactcaacagcaagtaccattagtttctgaaagatacgataatttcaaatctacaacttacttgtgaatagtttcaacaacaggataacataagatggagttatctctccctcttgcaacaatgacagccagctcctagtgtaacattgcaacacagtaaaagaagtccattagtaattgttaaattcctttgaaacttttatcttgaatattttgaagagatatctccaaaatagtctaaaatttgcaataggcttatcaaatgattctgaacttataaaaacctaaaatagaaacagctaacacaccaatatcacataataataagtatcccaagcagaaatacactagttgaatgtaacaacaattgacaaagaacatacccaacaaccaataccaatagacaaatttactattagggctcgtttggaacnncgtattaggtcgtattgtattgtagtgtattatatt

SEQ ID NO: 44681 - DNA, 1136 bp, Cannabis sativa
taaagaaatgggatagtgcgtactgagagaggtagtgtggagatggaaggaaagggtggattggcagcaaatgccatggtttctattcggaacgggataattagccctcgcgccattactcttcactccactccctcagcagtcggcttcaggtctcacccgcccaccaccctcatcctatatttgctaaataaactaacaaggttttcatctcctaagttcttagtttacacttaagtggccttcgttgaggtaatgaaaactttgcgaatgtattttaaaggtggatatggacggcaaaaacacttgaattttatatatttttttaatatttaattataaaaattgaaattttgacattagaacttattgaattcaagttttgttttgctcattaaactttcgtccaacaatttaaattatgtgacacaattgactcaccacgtgtacacgtggtaaatttttagtggtctacgtaatattaattattaaaaaattataaatcatttaaaaataaataaaattaatatacaaattaacactttatttataaacatatttctgtgtgagcaacaatttcatctttaatgagtttctatttaccgaaataccacttacacatattcattcatgtcagcccaaatcactttctagtcataacccttttgaaacccacgttgaaaacccacgaaaaccacacatcctcctcaagatggactgtatatctcatatacaaacatcttgccaacgtgagaagcaagagtagtaaaaagtaaaggtttagttaatgcatcagctagttgtaagattttgttgattggtattagtcgaatagtggagtttttgatcttgtctctgatgaagtgacaatcaagctcaatgtgttttattttttagttggaagtggagttatttgcaatgtaaatggtgaattggttgtcacaataaataaaggtgagtttatcttgaggtatgtgaaaatcattaagaaggtattgaagcgaagtaatttcacttgaggtggtagccgaagcccgatactctgcttcagctgagcttttggaggtagaagattgtttatttgtgcacaaatgagaggatcaccgaggaatatgcaaaaaccttcggttgatcgt

SEQ ID NO: 44682 - DNA, 836 bp, Cannabis sativa
  modified_base (627)..(629): a, c, t, g, unknown or other
tgaccaaaataaacttttggtttgaaaatccttactttggcatgtataaccatgggatgagagggttgttttggttcagttggagctagacttggctgaggagaaatatcaacaggagatacaataggaacttcaagacaaaaatcattagtggtgtagggaattggagaaccaacatgagaagatgtggtacttaccaattgttgatgtggtgaagcaggggaagatggtactgcaatagcacgagatgaagagttaagagtacctgctgaagagggaatattcaaaggtaatgtaaaccaggaatgaggagtgttagtggtcacatattgctcagcttgataattattcagaaagccatgatggaggggaattcttgttcattgaaaacaacaagcctagatatatatatattcttccgagttatttgcggcataacctccttaagtggccaggtttttgcaactaactcccaattctaaaattttggtagtaaaacctcctaaacccaagttctgttagcagttagccctttccatccatttttggctgttaactaccatgacggaatgtccacgtgtacacgtggcacaatttgatttgtccacgtaaataaatatttaaaannntaaaaaaattaattattttaaacataaaaaataaaaaaataaaaaattttctttttctgtaaaaattaaaaattaaaaaaataattttaataaaataaaaattaaaaaaaaaccctaatccctctttctcttcttctcttcttaccgccccttactcctcctcctcctcctccttcttcttcctcttcttcttcatgcttagaagtt

SEQ ID NO: 44683 - DNA, 3128 bp, Cannabis sativa
attacttttaatattttttttagaatttttttcacattattttcttttaatattaatagttaattttattttaattttcttaaatcatgtataaatttttttacataaaattttataatttttttttatcttaatatttaaaatatattttatatttattttacaggtatactcttttatgacaaggaagaaaaaataaaaaaaaaagtctagtataaattaaaaacatatattttacataaaataaaaattaataaaataagatatgcttataataaaattttatttaatgtaaataaaattaaaaataataataataaataaatattaagtggtattcgtgtataatattgttattaatgtaatttaatattgaattttatgtattttaatttaataaaagttatagaatcattaaaccaattataaatcctcatccatagtagtgccctaaataaaaagagtacttaccgtttaattggtcagagataattaacggagggggtattatcgtaaaagtgcgaatatgaccgttggaaccaagatcacccttttataaagactcggcgttagaaaacccaacccctaaattttgctagtgaaagtttgaaaaatcattttgaaagaacataatacgcacgagagagagatttcaagatcgtttcagagaagaaagaaaactcagtaagttgttcttcttcttcttcatttttcacttcatcttttacattgttgtacttgtagttcagttcagacttcagagtataaagcccgctactaatcgcagatcggcctggtaagtagtttaagtcatctccgatttggagaaagaaatcgtcttcattcttttgaaacggaacaaatagagagagcataacaaacaacaggtattgaaaaaaccctaagcgctttttgattaatttcccagattttgtggttattagaaatcttgaagggcgtgtgggttgttattaaagaaaaattttcgcattctgagtcatatattttgaaaaaacaacatgtattgaaaaaaccctaagcgccttttgataaatttcccagtttttgtggttattagagttcttgaagggggtgtgggttgttgtgattatattgacatatgtttgattgactactataggaaggacattctttatacgaaaccaaaagaaaatggcatcccaattggctcacctttttcaagatcaaaactttaatgcccaatatggtactttctgactttttttttttttttgaaattgatcaattcagacagccaaatagggtatagcctaatactggaattgtttactgctataggagcttctgctgggggaaagatgaatgcaattaaaccagggaagaatggtaaaggagggcttggtggaaggaagccacttggggaaatatcaaactctgctaacattgccccacctcaagcacatgcctctaaaaagcataactccaaaaactttgcttctactaatgaagttgcacatgaaaaaagtactgctaaaacttcagacaaagtggagactcgtagtaggaaagccctctctgatatttcaaactcagtgaaaccacatctccaccaggctccaaagaacaggcaaaacatcaaggcacctattcttgatgattattcctttcccagttgcattgcagaggaacagtttcttcatgaccatcagaaatgcattaaagccaatgctgcttcagaaatgaatgacttctttaatacaattggactaaagaatggtatggaaagctttatcaacttcttgcattatctttaacttttgtttaattagttgtttgtttattgttgatctcctgttttgtttttatttctgtagtttctctgaaacaggttgattctcctaagagcttttccaagtcaatgaaggtgggtgcttctatttccttttttatcttctgaaagttactctattttttgttctttttaactaactaacaaattttttttaactcagaatcagttggaatttgtggagatacccgagtttcttgaagatgagtatctttggaaacagaactctccaccaaagactcctaaatcaccaaattacaacgcttcaaattctctagatgtttggaccaaggactttgattacgtcaatttcaagttgctctgaacttctaaacatgtttatggtttgatgcaaaagctcatgaacatccttgccttcaggctttgtcattcttagtcatgtcatatttttttctttctgtattttcctgtcttggtgtaaagatgtgtggttcgtcctcattcttggaggtgaatcataagtagatcagaaagttgaaagactttgttttgttgcgtcaatttcaagatgtttggaccagcgactttctttgattacatcaatttcaagttgctctgaacttctaaacatgcttaggttttgatgcaaaagctcataagtttcttgaagatgattttgtttgctgaaataatttcgtactttactattatatttcatcagtcaactattacaacggctattataactaatttttgttaaaacttataaatgtcactgtcctcatttgtggtgtcactttccaatgttacctgagataaaaaagaaaaggtatatgggcatcagccttgaaatattctcaatatcatagacaaaaatgagattttggactatatttaagcaagtaaacacacttgaaaccagagaaaatcctaatgatcactaatcatggaagttcctaattttttattgggttctattatttcttctactatactaatcaatagtgaatacatatttttttcagaacaaagcttcaattaattgtctttattattatttgttaatttaataattcatgatagttatagcttcttacaaacactatgggtgaccctgaatttgtgtaaaacagctataacaaatcatgatcacttgaagactcttccctattttatggtggtgactcttgtttaggggtggcaaaacgggttttgacacggcacatgaacacgacacgaattttatggattacagtcgggaaaattagatgcgggtcgaaaatgggtcgacacgacttgacacgaaataaaaacgggtcaaacacgacacgacccg

SEQ ID NO: 44684 - DNA, 3975 bp, Cannabis sativa
tggcaaggccacaaacaaatggacaagcagaagccgtcaataaaatcctaaaggtcaccctaaagaagaagctgctcacctgcaagaacaactggcccgaagagttgccaaaagtgttatgggcctaccggaccaccccaagaaccacaactggccactcgccattctcaatggcatacgtttgtgaggctatggtcccagtggaaactttgttcccatcccacaggagaacgacatatggtctagtaacaaacaaaactctattacaagaagcactggatctaactgacgaactccgggatgagtcccacgtacggatggcagcttatccaaagaaggtggctaaacacttcaactccaaagtcaaagacataaaatttactattgctgatctagtgttaagaagggtcttcctagccactcaggaacccaaagtgggggtacttgggccaaattggtaaggaccatatgaagtcgaggatgagatcggctccgggacctacaagctaaagagaatggacaaaaccatggtgcctagggcctggaatgccgatcacctccgaaaatattaccaatagttaaaaagcaaagtttatgttctgtaaaggaaatttgtaccggacaagtatatgcaacctctaatttaattttgtgagactaagtgacttaaaaattgattttcatgtcacttagggggtactaaggcatattcacatggataaatataaacaaatcaagtttaaggaagttaaaaactatttatattcgagcatagtgtaaattgtttgaacaaagaaaaaataacaaacccttagaaagaaaaaaggcctggggacgggccataaatgtctccccttaagaaaaaaaaagaaataaattgtcttaaaagttgggggaagaactgaatatgtaaataaaaaaaatgataatgatgataacaaaggagataaacaaatgattcaatcagcccgaggaggaagacaagggcccctgcgctcctccagcactgcatccagcctcttcttcttctcccagaagtgagcaagaccttcttcaggcttgggataaaaattgaggttaagattctgaccattgattttctaggccacgaagactccgtcatcaaagcgcttcttacagtgctggcaagtgacaggagccagaagggcatctctcttcgccttagtcacctccttctgagcccgctctttgaattcacgaagccccttcacttcaatagttaggttggctatcatttgcaaatccgcttggtgcagctcttccaaagacctcagcttggcggtcaattcttgccctgcctccttagaatcccgcagctcccgcctcgctgtggccacggccgcatcactggccttcaatgcctcatccttagccctcagcgcctcctggtggctccgctcagtaagagccactttttactgggcttcctcctggataactcttttctgtgcctccaagtcccgaagactcttcatggcctcctccatacccccaaatttggacatggtgtacccctaatcaataaaagtcttcgaaagacgactagtctccgtagaaatctgaaaacaaaagaaaaaatatagatgcataaggaatacatgatgttgggcaccaagaaaaaaagaagcctgaaggtacctctaaacagataggaacttaccgtggtcatggcagcactcacgtcctggatttggtaaacgggattagtagaagcagacaccgcgtatctcttcatggggagctgaaccaagccggcagcaaagtggctcgttgattccaaagcaaagggagccagggtgggtctgatgaagcggttgaaccaatcagtcaagggatccaaattcaaatctcagacgttcccgacatactcactacaagtaaaactgtcatgggcctccctcaagatcttcttcaaggcttccacctcggcgttcccctttgtgtacttcgccgtggcataattgtgtttggcgattcggagttgggttctttcctcatcagcaggaatgggggttaggacgatacccggaggaacagtgtactcgtccacctcgggcgggatccctaaattagagttgggagccgaagtatttgctctcctgggcttcttggcaacctcagtctccaccatttttccattgcgctttcggtctagaggagggagaatttcaccttcttcttcttctacctccccgtcctcgtcgattaaaatgacttggtccaagggaaagttggaagaggacctcccgggagtcaccgtcgggtcttgtgcttgagggaaaactgggtcaggactgtaggttcgggcaagagcgtctaagagctcatccattggcttcgctgcttaaagacaggcgttagaacattaccgagaagtcatgcatgcaagaacaaagccataaaactgatcctaccctgacgatctaatttttccctagtaaaagcatgcattaaaaggctggtgtcgtcgtccctaagaaagttgtccaaggggaggaaccagctagaagataaataggccgaatgatccaaagggataggtacgggaggacgggatcccatccgagatcggcctaaaaagtgacctaagttggaaaaataaaaacccttgacatgatcaccccatcgaaaagggggcatcctaaacctaaggagatgttcatcaaactccactagcctacagccagaataatcttgaacggattggacgtgatgaacaattaatggggacttatcagatccggaggtactagcatcaggagccccagtgttgggaaccgggaacgaaagcttgggccgggaggtcacctgctcttttcaggcctcgatccaatgaaccctcctggcggcggcttgggctttgatgtaagacaattcttgttccctcctgaagaggtactttacatactggtcctccgcggaagcaatgatgtctgcccaaagcgccttctcggagtctgggctgcgaatgttgggacaaagaaccttggataaattgaaatcatccacgtactggctctctgtgatcaacttggccctcctacagtgtgcagtcgtgaccaagtccccaacattcagcccatccttgtcgtacgtggaaaagaccttggcgtgctgaaggaaaagttgtgtaggggtggtgcggtgcatcgaaggtaccctgacccactccgtaagcagcttcggggcttaatggcttggaagccagatgagaagaaaagccagtgacggtattccttaacatttttctgaatattaaaggaaactggaccctcattagcaggatgggcccgaagtgtgaaaaaatcgtcttttaagtttgtctcccttcttggggacggatacaagttcataaaaatacaaaatttcagccgggctaggcgaagcccatcctctggcaacagaaaagataaataagcgtgaaagcatttgatatgcttgggggataagttggtaaggcgcaaggtcaacaaaaacttagaagttgatgaagtaatcctgaagcggaaacattgctccggacatgagatgagtctgactccaagctctgaagccaccatagttacgattaggcgtctcctcatctcttggaagacggtgaaagactctagaagcggaaggcttgatcaaggccacggtgacaatcttctctagttggtgggcgcaggttagagttgaatgcaactcatcagcctcccagccagtagattggcaagtatatttctcctggaccacaggtcccttcatcacctcctccaaggtggccagggtgttagatcctttgctcgaggatttcgctccggtagtggggacaaacatgtcttgagagtagtaagattctaaaaaagagaagtccagcagttagcccccaaaccaaaccctagcataaaaagagggaatgggggtcccctaaccgctggaaagaggccacctctggatgtctgccagaaatga

SEQ ID NO: 44685 - DNA, 3919 bp, Cannabis sativa
tttattgatattgaataatctagattacattgaaatggggttttatttagggcataaaacccaacagcttcatcctcaagttggaactaatgtatcgccatttctggctgatttgcttgatcaaagtgctactaaaaattgtaggcttcaagttgataggtttgccatgatggcaagcagggatccaatctacgaggcagatgctatgaggaccgaagccaatgctgtaagtttgactttcctttgatttgaattgacactttgcacctctccactatttaattcattttcacttcctttttcacaggtgagcctaatggcggagagcaatttctccatggtcactcggctggcctacgagcttgatgtgctgagggcagaacatatcaatgcttaacaaaagagggaggaagatgtcgatgctctagctgaagccaatgccagaatgaaagccatcgtaagggaaagggtgactgaatctttggacaacgccccaactcacaaaaagaaggcgaccaagatagagagggagcataaataaagctataaggacttgctttccaccactattactaacataaaagacatggaagttgactagaagtaggcaaagctagatgtccaagagaaagaccaaaagcttaccaccttatcttgagagtatgacaaacaggttgaaatcatcaatgaaaagattgttaaagaaacaactctagagagaaaggagaagcttcatcaggatttgcagcaaaaggcggaggaagctgagacaaaggctatttagatggctaaggaagctgagactaacttggagtcatcggggaaagcctatgaagagtccttgaaaaagttcaccaaactagagggtgaaaattcagacttaaagggaaagcttcagtaggtaatcatggaaaaagaagagaaaaaagcctagaccaccaaagctttggaacaggcctttgtctactcattgtacactatatgtcagcacaaaaaatttgtaatagatctcttggatgctgaagataaggagaatctgatgcctaagatcttggcactagaggaggataaagctaaggaagcagctcaaaagatagaagcagtcaattcagggactaccattcctgtaggtgagaacacggacgactcttctctacaggcctatggtgttcctgtctcgaccaactgtgctatcccagaggtcttgcctgatgttccacacaaagatacacaattgctaaaggatccagcccagtcttaaccattcttgccttttttcaacaactttgtatttactattttttatcttttggggaacaatggtccccctttattgtgtgtgcagagacaatattttataaccttgtcgcagggttttcaagtacgttgaactgtttaatcaactatttagatattttcactttaatctatagaatatgctaagttttaacgcttccagtctcgtgaggttctggttccaaaggcctgaacctttagattttttattaaatgcttagatttacatatttttcttatttttagagaaaaatatttgaaagtgtttttactaaaaggtttctctgaaacttaaataactaattaacctgagctaattaattactttataattggacctttcttggtaaaaaccacttatgtttagggctttttgaacttaaccatttaattaacttgaattaattaatttatttaagtagcttaaatattttagttgtgttaacatgagttaaccatgaagcctgaacttctattataagttaacttggtgttaacggtgagaactcgtcaactaacttgtggccggaaaaccaacttatgctttaatttcaaaaatgagatgaaaagtaagatgaaatataaactcaaattgctatcttgaaatggagagaataatggagaatttttttttgcttttaatatggttttacaaatatgattttccaaccccctctcacatctaagaaaggggtatttataagctctaatggcctggtgtacaaagtggtcccaaagggacaagacgtcacttttgtgctacaagtcgaaagttctagagatggcttttcaccttgtacccttgtttggtgtcaagtggtccccaattgtaggagggtgatggccaattgcaggcatgtggtccctggttgtaggagggtgatccccggttgttggcatgtggtccccgattgtagggtccaagagagtggttgcaacatgtggtccctaattacaagttgcaggagagtggttgcaacgtacccttggttgggtacttaaactttgcagcttcgttgtcgctgctacttgtacctccttactcttagagttctcagaaggcatggttgaacgctttctccttgcacacctagtcagtgtgcattcatctctcaccctgtatttataatcctcagaacatacttacacaacacacacaatggctcacatgtggaaccccccatgggctcgaatacaaacccccaacactcagtacacacacaacactctccccattacagaaacacagcttgcatgcgagccccgtacactcgcacacacacacatctcaccacttcccatatgctcgcacacacgtctcaccactcccctatatactggcacacacgtctcaccactcccccatatactcgtacacacgtctcaccactcacccatatacgatgcacacgtctcaccattccctcatatactcgcacacacgtctcaccactcccccatatactcgcgcacatgtctcaccactagcccatatactcgcacacacgtctcaccactctcccatatactcgcacacactcacctactcacatgcgggcctctcatgggcttgcatgggagcccttatcttgctactgtgttgcaccacacttgcatgcaagccccttgcaaaaaagttacaatagctcgcgcggatgctccaactgcgagtcaaacagatgcttcagaacttgtgtaaaggctccacgactcaaacaaatgctccacggctcacctgaatgccgcccggctcacccaatttctcatgggctcgcacaatatcccatgctctcgcacaatacctcatgggctcgtacaatggctctcgggctcgcacacccagttgtcacaatttagcagtcttactattttagccatatatctctcgatatatatcagaattagaaaattcaagatgcgttagaaagatgagaaagagatatatagatcttatgtttatgaaaagatctatttttaaatgtatcattatgacaatcctccaacaattgtaacttcgtaagttgatcttatcaactctactcgcgagttgttacgggattgacctctgagttgcatagatatatctccagacttgcaaccatggattattaagattaatgagccctgggccatacgtgttgattatgtcattcctcgactgacacttacagttgatgtctctcgactgccgggactaattgttgactaatctcgaaaatgaagtctatcaatttttggggttaacacttggattaactattattatgttagaattgattccaggtataataaggtattggcttgcttctggctccctggggttccagttttgggtgacactccctactcttatacttggttaaatgctagattaacttcaaatataataagatagtggcttacttccattttttgaggttctagttttaggcaatactccctactcttttacttataatttaatttagctattttgtgtgataggggtaaaaatattgataacaatataatatatgctacgcgccaagtgataaataattgagattttttatcacttattacatgacagtgttgggttttgtgccctaaataaaaccgatatcaatataatcagatttactta

SEQ ID NO: 44686 - DNA, 4366 bp, Cannabis sativa
atacatacaatataaataaacaatgaaggaaaaaaaataaaagacacaatttttttctcaagaaattttttcgaaatttgttctttttagactatactatcaatatgtagcaatattcaacctcaaagatcttctcaatgccaaattttgagttgtagctcctagctatttgaatattaaaaattttgaaaaccttcttcgttgccctttctctctctactaactgagttgtgtattggagaagttctttgatgatacaatattttggtaagaaagatgttcaccaattgtgtgttgtttgtattactttttgttttttgattatttgaattcgaatataaaagtttagtattaaagcacaaaaattagatttgagaagaaaaaattatttatttatttttttgcaatattatacatttttatatgtgtgaaaaattgatatcacttctgaaaaaaaggatttcccaaagttggatatagtattatcgtctgtctctataactgacgcttacttgatcgtcgcaaaattgggtggaatatgcatcgatagaaaatagtcaagtacgcctattctcgattgttttaaactatcaacaataactagtactatgggccacaatttagaacaataatcgtcaaaggaatttctgaaatgttttgagagaataagtcttgggtattcaaattgtttttaaaatttttgagagagagagactagtagtcaacgatttataacaatcagcaatactatagccgcttattataaactgccttagccgacaattataaactatttgagattccaatctcatagcagtcttaaattgataggtatacttgacgactctttaaaaattataggtattcccaactataagggttggtttaaaatactcatttatttttaatacttgcggtccttcaaaaaaaattattgaggaacaacgggaataattctttttatagtagtgtattcattctttcgttctttctttcttttttttcttggtgtggtaattaaagaagaaacggaaggaaataaaataggaatagttaatttagtttttccatatttccgattaagatgtgtgaggacaaaagcagattttattgaagatttacttttcaaagagaattgctattggacatcagtgatcgcgacactacaagagcatgtcgtagctcttgaagctctaatttggacagtgagcatcaacaagtcccatgcctcattgaatcccaatgttgaggcccgcatatcaacctactaaacacgaccttactgccaaattttgtccttttagctccttgacagtgaatttctatgtcgtggcgctactccaaaattttcaattcttcaatattgaaagctccaatcacatcgaattttttagatttttttccttgaatttatctccttgtaatctagcgacaagactttacttaattcatcctttttgtccattctttttctcgactttgttgtattcttcttctctactaaacctgcaaaatattaacagccaaacgcgtaaaattacacaaaatacaactaaaactcactaaaaacactttgacaacctacttaaaaataacactaataaagtcctagcaaactctgcctaacttgacctttactcaccctcgagtaaaaattgacactaaactaaaaagaaacgaacaaaaagtaagccttcatttaacaccataccaatgctacgcacaagattcaactattgtaaaccaaattttcaatgtaattgctcccgatactcaacattagaattcaaactcgaaaacgaaaatataactcacaaatgtgaaaaacaattggaacttaatatgcatgctcaaggtcaatccaacatatcaacaacttgattatcaataactttcagtatttagccttatccactaatgtcaacagcatgtgctttgaaataaaaaaaggacttaaataggtttaaaaattaggcttagctaagggtagatgaaaaatatcctttacgctcacctataccataagtttcttcgataaaatcaccctaaaattttgcacaaataatcctgatatccgtttttttctctaaatatatgggaggaccttttctttgataaccttacaacaacttttttttccgtatcaatatgacattatattgtgtattttttctttcttttctttaatcttttcaagttgttgcaaataactttttgtcttgaaatttttttaatattactcttatttttcacaacacaaaacataaactttctcccactgcaatccccccaaactaacgatccacttagtgtatagttagggtcaaagatagataataatggattcaatttttttacgtcaaggcatgtgtagaaacaaataatagaacaacaacataatgctcaaagaagggtaaactaagattaaaactggaagggtagcttgaaaggcacaaatgttccaaaaaaaattgcctaaatcttttttcaaagtacacttcattaaggatttcgcctcaaaggccaagtaatgcaagttctaacaattccaactttttaatcctctaaccaagtgatcatgtataacacagtccaaatagtcacatttacaaattatattaaacttttcttacaataatccaaagttaggcacaaaaaataatcaaatcaagtacatagtatgaacaagtttaatcacataagtatataacaacggatggtatttcttcaatcaataaggcttaccatgacattaacaaaaaatttaaagacaaacaattaaaacaacacaaaagtaaaaaatttaagttcacccccaaacttgaacccccaaacttgattgttgcattgtcccaagtgtgacacccaagactagaaaagagaaattaccttgggcgcctcccaagagcgttgccattaacgtcatataggtggatgttgatttcctttggagaacttcaacatggatcaagtgcacctcttgcattaaatagggccctcgtattaaatgaagaaaattgtctttcaatgctattaatgttcaaactatcaacaaccctcaattcaccttcacaatttcaatacatcaatcttattatacgacgttaaatagttcaaaatagctctttgggattcttctttatcttcttgacaatcctttgccacatcatcatacacatattttgcattgcctaatcaggcaagctcatgtcatgatctaacatttgtatagcgctttgccttatcaggcaagctaagcttatgccataactcggcaccatatcacctaatcaggtgtacttatatatcatattacctaatcaggcaaacccattttacagtctgatatccatatatcatatcacctagtcaagtgaagtcgtatgtcatatttgccttattactgtctaatcaaacagtcaataattataaaacatgtcatgccatgtggtacattatagttttcttacctcatgtgttgtttcaggtatgttgacagacctgcttggagaacaattgatgatcccgggccgtatgtcattataatgataaatcaataagtgtttagcccaaaacactacttaacggttgcaagggacaacctaggattttctaccaaatctcatagtttaaatacactaaaataaaacttatattttggctctaaaacatatattatatggtagagcttgtcacaagcttttaaaacaatatatagaatgttcaaaatggacacccgagtgaaaagttatggtaaaaatacgatttttgatcttttaagaatttctaaaaacggtgaaacacgaagatcccaaattttgcactcaccgaaacactaccgaaacttatctaaatcacttcaaacttcacagggcacatatataccataaatactaccatccttacgtatcagaaatgaaaatcgaacccttaaatgaaaaacaccattaacctttggactaagctttaaaaacttccaaactcgatttctaacacaaaattacctcaaattcaacaagtaatcgaaactagtcccatagctaccaaagaacaatcctataaggtcggaaccttcgtaactattctaattcacgaaactccctatacaaaaccaatcgtttttagcttaaaacaaaattaaatcataccttaagctttcccttttcaaggatttactatcctgctactaccagagcttagatcgctaggttttaaattgaaaataaaaaaaaaatagatagaggaggaggaggtttcatcgaaagaaaaaaagaaggatttcgttctctttcgttctaatattataaacttataatatatatatatatattaaataagtttaatatatatacaaataatattgtaa

SEQ ID NO: 44687 - DNA, 2822 bp, Cannabis sativa
  modified_base (1920)..(1922): a, c, t, g, unknown or other
tgaaatagttattatatgttattattatgattgtgctataagtatgatgatagggttatgatctctacatatatgtaatagtttcgttcagcacatatgtatatgatataaatttctatatctagagttatttaacttatggttatgagctaaggtatatgatattgctaaaactggaaacgttaatactgtaagaaatagtattgttgtgaattttaaagtgtgtatggtgtattgaatgctattgtatgtaaagtatttccttacttggctgttagctcacctctttacttttcccctacaaatattagatagggaggtacgtatactgagaagagtaagttttggtatgtatactgtgaacgactatggacgggcaaacgatctagaatgtcggtggtgtcttaattttattttaagcagttgataaatctaaacacagtggaaatgtattatttaaaatcatttacttattgtatcttgttttacaaattaaggatccttctcagttgcattttgatttctataatccactgttgtatttcaagtattttttttttttatctttttaaattatgcattaaaatagtatttttgtaaagtaaagtaaaatatcaggacgtcacaacttgtgtgctgactattacaaccttctgaagtgttgtggatggagttggatcacattccatccttctatgctcatttcttccgtcttgactaaagtatttttggaatacttgcactgtagttgcaacattggctgattttggtgcaaaattgttactttcatttgcttttactatcctccttacttcgtccaaaatttattttcctctttatactatcgctattgatttctcatttgtttagagttctgtggtaatgctacaggctgcatttgatcagatgtttgctgagaatctgacccactcgcatgcccatggtcataatgaatttgagttctattcattttagcttgcatattagccatttcagccataaattttttcatagtgcgattaacatcctctcgatactgcctgctttagtcctgatcctatttacgcttttcttcagcatcacattgttcctgttggaatctttcctccgcaagatgtcacatctcttcgttgtgcttgtctcttgcggccattctctgattcatttctctcatctgtaatgcgaatgttgtagttggatctaggactggattcaatgtatctccttcactctgagctgtttctttctctgatacctttctcatcttagttcatatccttaactttaactttttgttcaagaggttcccgcgcggacagcgctagctgttgaaaattagctaaacaaattcttattaagactttgaattctttataccaagttctatctagtcgaattatattctcatttggtttataaaattttcctctcaattctctcgattgggtatgagttgtcagctctctgaattcaagtatgaatttgagggtgtattataagaatttcagctagtttggtgtgatcaagaattcatcgtctcccttttttaaataatagggtcttctatttataggtggaaggaatgctcgattcattcttctttcctattttgatttgctcacgtgcgcttattttcatctactgctcattgcaccttctcttcctttctaagctttgctccacatttcttcttatgtagagctctgctcttccacctcgagtttcctgctctattttcttttaatgaaaggacgtgtttctctttatgaactatgatactataagatcagctttttcttcttaaatttattttctaaaattatttattgaccattaggattatttttattctttatatatatgaaacatttttcaatgtatagtacctattaatccttattaaataaatttaactataannnttaattttaaaaatattaaaccataagattttaatctattgaagaagaagaaaagagaaatttatttttatatgcttaatttgactaattaattaaaaaatatataaaaaatatctttttttatactataacaaaaatatatttatatacaatatatttaagtcaaacttaattattttttttatttttttttcaagaaaaaacatttttattttttttttctgccaataaaacaagttcaaccaatataatataaaaatgaaatatttttctatttaaataaaaaaaaattaaacataaaaacttaaattttctttataccacttgcttgtaataatcatggagagtcttatataatatgctgacagggttaaatagtaagagattgatcgtaagtcgtaattagataatagaccaattatttagtgaaaaattaaaagatgattattagattattacctaatcagatgaaattaaatgaaatataggtatttagaaatgttgtttttgtcggtgggttatgacacaatacacatgccatttagcagagctatctagttgggtttggcctgaagacaatattgaaataaataatgagtacgtttcagaattgaataatgaagtgcacggtgtagaggacggtccaatatggtttactacctccttcaggacacgtacctttgtccttaataagtcctatcctaataaataatatataattcacaataattgtggccctctcttatactcctttactagacacaacaactatatacagcaaaatatatttagctaattctagtgggtctacttcttaattatcaataaaagtgactttattagccaaattcaacagaaataccaacacccaaccaatatggtaaacccaagtataaatat

SEQ ID NO: 44688 - DNA, 2153 bp, Cannabis sativa
actatatacattttgttaaaaaaaatatatagcaacaatatttattgttttttttttttttttgaaattaagcaatatttatactatgttaaaagaaatagctataaaactcacgaggaactatatatacattttgttaaagaatatatacatacattaaaaactttaaagaaactgtaatttaataaaattgtactatgagaaataaactaacatttaaaatcaaggttggctataatggtaacggttttatatatgaagaagagtaaggattagtatgctaaaacataacagaaataacttccttttctttcctttatattcccctgcctcttaaacccctcccactctctctctctctctctagaaagaatcaatcattgatgttgttgcaatggatgtaattgaagcatggtttgttgtctcatcaaatattaacaagacattaacatatcacctacaagaaattgaaagaagcaccccgaatttacaacaagaatactcctctctggttaaggctgcactaagagtttttgagagtaaagatcttaataagtttgagaaacaatcaaaattcatagaattgatcaaacaagctatgtctcttcagaagcgcgttgacgaattcaatgacaaatgctcaaactacaaccttccattatttcttggtgatggtgagcatgaagatgatcaatctttcaagaattacttgagaaatatacaagagtttatgaagaattggaagagagaagccggaaagaaaagagagaatggagaaaaaagcttgattgaaagttttgatgaatctgaaagaaagaatgcatttgagtacataaagatgttgttaaattatgctggtacatgtttgtctctactcatcactgattttattttgatgattgtggttttgggtgataggaaaaaaataatgaagaatcttgaagatttcaagaatatggttaaactactaagtttggataataatgagaataactcaaattccattgtgatcaagaatttggtatctgtgatccaattgacaaaaacaatagtgaaaaagaataagcgtttggttttgccaaaaccgaggaagttattaagcgatgaaggggacatagagttcgagctgcttcgaatgatactcacagaagttttgtgtgttgaagttgttttttgtggtcctaggatgattgaggttttgacggatgatcaattcggattatatggattttatcttcataaataccttagggaaagattgttcgctttgaatttgaggatgaatgagatgagggtgcaaatatgtttgatgccttccgtaaatgaagaaacggcaaagaaagtttcaattcttcgaaaaacaatagatgaagggcacaaaaacatatggaacaaacttgatcttaactcaacatcagcagctgcatcatcatcctaataatttggttttgtattcgagtttcaagtattcttgttcgagatgaagatgaagattatccgaaggtttggttttgttttgtaactttcttttaactgtaagtgattctttgttttagtatttgaaaatatgagacatggatttgatttaatattgagagtttatgttttgtttgttttatcccaagatgatttgcttttgcttgagtttcatttgagtattgttactggctcagtttattggttatgaatgttcaaacttgactaccttcactactcattttatccaaatggtttaagctcagataagatatgattgacattcatatctgaacattttgagtcttcattattttcattgcccatttcaattgtttttcttttacttgcttggaatggagtaatataataagtaactggggtaaatatgttcatgagacttgcaaattgagagaggaatctaagatcactatgcttaattagttctgagttatgatctgaatcaagcttagattaggatagattagtgttgtttgatgatgattattggtttatagggaataatgctaccttggacttggaaagagttgaagaaatatgcagtacagccatttgagttggcatttgctgatgcgtaccaaggcttttaacagtttttctaattaggcttagttgccacttttacttaactgtcctaactctataaatagacttag

SEQ ID NO: 44689 - DNA, 1761 bp, Cannabis sativa
gacgtaataaggtaaaaagtttaaaatattatttatcagtttgcgtctgttggtaatagtctatgctatgctataatagactctaatataatccctaaaacccaaaatcatatcgtactatgatccctaacccttcaacatcttcaaaatttctctggcaaaactaggcggccttcttcgaccttgtcctcttcaaattcgcccagtactcgagcccctttcccttcgatcgtcctcttcgaaactggcctcctcctctattcttcgtcttctacttaatcgggcggtgacccaaccccggtgccctcctcctctcttcttcgtcttctacataatcaggcgatgacccaaccctggctgcctcctctcattttgtgtttcgatatttggggtcgtcaattcggaagacacccaggttggttggctggtttgtttttactgtttatttttatttatttatttatatttactattatttttttaatctgaaatgctggtagctgacgttgtatatatttgggcgatgaacttatattgggttactgatttatagctgggtttttaatcaaaaaggggttttagggatttgattttgattcttttgttttgtttggttcaaaggatattggaaaggattccaattttgcttaatgggatttgcatgaatgcttcgtgtggttcgtccaggatgctcaaatggaagaaggggtggactttgcaatctggtggatatgctcaaataacgattatcttctccccaagtaatttacagttttcttgcatacaccgtaaagtaattatcaaacgattatcttctccccaactgtttattttcatttatttatttatatttacatatatgatgtgggaacaaaaaaaaaatagtaataattataagttaacttaataaaagaagcaagctacacatatctatagtttgatattccaaataattaagtacctttgttttttggatcaataatatcccattttggacctgaagcaattgcttttccatggatgagtgatttatggtgacatttgcatcttttatgatctcatccaatttatatatttatggatttattaggtgatttttctatattaataatagccttgttgccattattaagctttgaacaaaagtatttctttcatataaccaaacatgccttaattaagctgtgcctattgtgtacaacgattatatatgtgtgtcattattatataagctaaacatacatgattggactagtttcaattatgttgataaaaatgcagggagctaatatatatctctaaaggttgcaattttctggtcattataataatacacacaattttttgttgctcgagtagcagcattgtatgtgtaactatttagatagagatgatgagaatgcacacaactagtttgtggcaatgaacaaggtagaaattttaaaatctttctctttaatggaattattaggagtagcatgtatatgagtttatttcccacacaaattttctttctatgacatatatattgaaagatgactaagtgaaggttttttttcaacattttatgttttagcaaatcacacttgctaaacaagttagagtgataaaagaattccaaaagcagtctgcgcaattagacatgacagtaattattaaggcttttttgcttaaagagttgatttattttgtttctttgctgagtttgaatttgattgtgtacatgtgtgtgtttgttgtgtgtatgtatgtatattccat

SEQ ID NO: 44690 - DNA, 1489 bp, Cannabis sativa
ccatatgcactttagttgatatgacaaactacttgagttcccaaaatagtagaagtatctcattaacttaatgttcatgcagtcgcatgccccttaggatactaagatatgcccaaccattttttgagacatgcgattagtttttccttgcatttttatttgaaatcttattgtctgggtgagaaaactttcttttcaaattgcactcataccatgctgaaaagatcttctatcttttagataagcgatctatcagacagctagatgtacgattcaagagagggggcctttgctagcaaatctcataagagtaatagcttcatacccacctcgctatctaaggagaagactccaatggatagggctcaagaaggctcactatttaccggtgagatagatcgcatggtacaagagttagtagaactagtgaccttagaggtgcaggatagccaatccacggtgtctgcccaaggtaattttgcctatccgcgaatcgccccagacatgaaagtcgaagaaatgggtgaggactttgaattacctgatcacgaagttgaagatgatgcagagggtgagggcaacaaaatagattcaacggataatgcccagttagacgagcccttttcttgcgaggaccttgtctcacgggtttaaaagtccgatctaactacatttgagagattgaatttaattcacaatgctacctcaaagcccatgtcattgcagcgacctcatcttttgttcattagccctgagatcatcccaattcaaaatattgtagtttcaattcccattcttcgctatggggtgatgcttcctttttaccctttcgtaaaagccatcttaacgcataacgacatttctcccttccaacttacccctaacaattatcgcataattattggattatatacgatgtatatggaatacacgtgaggagaacccacagtcgaggattttagctacttttatgatataaaaagagtaggtcatgataatggcttctactactttagcaaatgggccaattctaaaataaatggggtaaggcacaatttcaaatatgaaagattagaagtcgaagtgattttatgcgtttaagatgccaggggtcaggattgactttaatcgccaacctcgtgcgtctcataccttcacacttaacttttattcttgttattttacacttgctaacatttatctatgtttgcaggtagaccgactctatctgtactagacaaaattcgtgtgaaaattgctgtagtgttgagtagtcagttcaagatcgcgactggcgtttattgtgtacttctacaaaactgggaaaacacaaattgattctagatgacgctaagctttaatgagaaccaatttataaggagccttccgaaaaccaaaggaaaagatagacaagcgtctttctaaatagacctcaagacaagtatcaggtaatatgatttgacgattattgattatgttgtcttaattt

SEQ ID NO: 44691 - DNA, 1151 bp, Cannabis sativa
ttgaaatgggttttatttatggcagaaaaccttagactttcacgtcttcgtacttgggatcaagcctatatacaagagtctcaaatctgattacacatgataagtgttagaataccactattctattcttgccttctgatgtgcaacgtattctcgatatccccttagttttctccctcaccaagatcagcttgtttggagccacactaccaatggaatttatattgttaagtctggatattaaattgcttctcaacattcaaagattgataacgactcgagctccacatctgaatctcgttagtagactaaattttagtctttgaatactccttcaaagatgaggatttttatgacgtgttatccatgacatgatccctgatgcagccatgcttcataagaaacatattatccattcaagtcgttgctctctttaccactaccattatgaaaaatgcttaccacactttatttgaacgtaaaagagccaaaaagttttggagattgtgatttcaaaattctgcctggtgttgacattaatggttcttgcaaagctgttttgttccatatttcaaatattctttcaaaacaagaattagataaaggtggcttgtatcatatggagtatctagattgaacagaacaacgagtttcatggaaaataatcaaaaccagctgatattttgttaagttttgctctataatacatctcgaaattttagaaagcaataaacaagcagcgagatactgggatcaacggaccaacagtatcctatcctggtatcaatcctccacaatagttacttcctccctcaggcagactgaaacttaacactgacgctgcagtaaatacaatgacgcgtaaagctggttttggagctatccttcacaactctagaggtgatattgttgtttccatgtcaaagccttttaaaggatgtttcaaactagaaattctcaaagctatgtccatctatcgcaaccttcaatgactgttggagctgcaattttcaattcattatattgaaatcgattcccttgtgattgcaaaaggattccagactcctctagatgtagtttcaaacttccattgtattcttacttatattagaaatttattgtccgatttcttaggaatgcagatctctcat

SEQ ID NO: 44692 - DNA, 1539 bp, Cannabis sativa
  modified_base (1350)..(1351): a, c, t, g, unknown or other
gatcctcattgatttcattctctttctctctctcttgtattgtcgtttattgagttccagttatggtttccgaaaaatggggcaagcaaggacacttgcaaatgcaattgttgggtatttctttatgctttttatgcttatacattttttaatgtatttttctctataccatcctatttgtttttttctttctttcttttccttatatacatgttaaatacatttgtaggtgttctgaattgagtttttaatgagagaaacaatagattgcccaaaaaaaacatcacaatatataagtgtgtgatattttatatgctaatttcactttttgtgtaggttgctcaacctagttagttaaagctcaactaaccgcaatgatcgtcccattgagtggataactccgatatgtccacaacaactagacgggaagcaatatggatattatgtcatgaaatttattgagagattcatgaacgaagaagattcaatatgccgagtgagagaaatggtaaaacttatcttctggtagtcattatatattacacaataatatgtaaatatagtaatgatagtctgttgtaagcttctctttcactgatgtagatagtgtacaagattttttactaattaatatataatttctttctattttttttttgcagggcaagagtgatttgtactcaattaacgagatgaatattctgcgtgatcagtggattgaatatgtccgagcacagacagtgcgacaaagactaaatcaatgatcagtttctttttttgtttatactttatcctaactaattagtgacaatatatatatataaattagtaaaaattaattaatgtagggaaaactttactaaatataaatcagtttctgttttattagtgacaatatatatactttatccttattttttttttttgcaatccaatgtctggcaaaaaccggcgctgaaaaatacgaaatttataattaaactgaaaacttttaatataggcgatcattaaaaactgtgcctaaaacattataggccacgatttaaaaccgtggcctatagtataggctacggtttaaaatcgtggcctatactatagccacagtttaaaactgtccctaaaacactataggctactgttttaaactgtggcctatagtataggctacggttttaaactgtagcctgtactataggccacggtttaaaactgtcgcctatagtgaacactataggcgacggtttttaaccgtagcccatacttttttcccgacagttttcgaccatcgtcaattttacccagtattcgcgacgctcgtataggcgacggttttatggactgtcgggaatnnttcggccgacagtgtaaaaccgacgggaatttggggtttttttgtagtgccccaaaattaaactatcatcagcaaagaaaagatgagacacccgaggcccagcccgggaacaccgaaaacccatcaaatcaccagcagcctcagcctgttgaagcatggtagacagcgcctcagcacaaaatagaaat

SEQ ID NO: 44693 - DNA, 1424 bp, Cannabis sativa
gattaaaaataaatacataaataagagtctaatgataaattatgaaagtatgtcaatgtatttttagagtaaattaaattttagatagtttaaagttattaattataagtcattgtactgaaattgtttttgtaacttttaatcacataaacaaattatgtttaaaaattgaacagaatgtaattagatgaggatatttgtaatgataatttgcataatttgagaggaatttttgtaacaaaaaaaaaatccaaaacataacaaatatgaggtaaaaatcttaatgattcttagcaaacatatataaatatatggtgaaaatgatcaagtgtaaatataatttatatttattaattttacattattctctatggaattacagtactttacatacatataatagtttgtaggaatatacacacaacaaacaatgaacacacccacatacaaatattcatacactttaattttcctctctatgtaatattttcaatattgtaattaaattaattaaacttcattgcatgcatatttttctatctaatgattatagagatcgaaagaatttagttggaatctcttgtgttatatttaatatgaggtgatcgacatatatattgaaataagggttgttctaattaataataattatacatagatatgaaatatatatatataaataaatatatattatttaattggaagaaataaaagctgtgattcttgaagatggacactcatataacacgctactacatcatacatataatgtatataattttcaatgaaaatcataataattgagagtagtgaacatgacttgatcatcatcataatcaatgaatttaagaaagtatatataaatatatatacacacctaatgtgaaatgtttttatagaaaaaataatacatatattgttatatttaattccattaatttaattaaattggaccacgtacgtatgcataattatgagaattattaagtgactaaatcatcactttcatctcttaattaattaagagacatctagctcttaaattcaatcttaattaatttgatgatgttcataaaacatatatagaggaaagttttagtgagactcatctaaaccatatctaaacaaaaaagtaggattaattattttaaggttaaatttgtctcaagattcttttgtttctctttggtcctaattttgacaagtataccataaatgtatttttatttagtacaatataatcaaaataaagaaactatataatataaggataattacataaaatattatttttttaaaaaaaataatatttttacattcaaattaagtttttttttatatataaaaataacacgaaaataataaaaaaaatacataaaaataacaaaaaaaaaatattcaaataacataaaaaaaaaaataac

SEQ ID NO: 44694 - DNA, 846 bp, Cannabis sativa
taaaaaatactgcctgacagtatttttgtaaaaaaatggcaaaagttagtataacatctaaatttcccaatattattatttatctcaatggtttgggccgaagcctttcctgttgacattgaagtatggcccaatttgaacataatttccaaaaaaagaaaaaagaaaaagaacagagaaaacgaaaaaaaggaacgaagttcattgattctttctgatagtagtactggaaggggaaggggttttgattagggttttttcacccctaaaatctcacttgtcgatacgaagattagggttttattcaatccacagagtcgtttctcttgtaatttctgattggtttcattcatttcgtctaaagaagaagaagcagctgcaacaatgggtgctcagaagaaaggtgcatccagggtatcagaggatcctgacgaattgacacgtgtccccttgcaggccattcttcttgctgatagttttgctaccactttcagacctatcacccttgaacgccccaaggtccctcacttctttcactctgggtttgatatattttgtactgtatattatactagtactctgattttctttgattggaagtatcgaagtacatgaatggatgcgtgcctgtgcgtttttgtgtttgtgtctatatatatattattcatatttgttgctgctaacagaaatgctttcagatataaataatctatataagctttttgtatgggttgcaatagatttttcagtagatatatggtgagaacctatttttagattctctggggaagtttgcaaactcaattttctttttggtgcaatgttatgaaacttaataatagtttt

SEQ ID NO: 44695 - DNA, 5681 bp, Cannabis sativa
  modified_base (1673)..(1678): a, c, t, g, unknown or other
taccacaagccataggtttagataatctcaaacctatgatactaggattgggaagttttattaagtccatcaaatagacgtattatcagattttcctttcttatccttgtaatagaaaacttttggttgctccatgtgaatgattttaaccatagttctttttggctttgatacttagttcctgatcttgactatccattgtttatttaaactaacaatgaatttttatcacaagtgtcttccaagtaatattagggtgggttccttgaaaacctatcactacgacaaggtaccgtgactttctgtctaggaatattagtggaattaacctcatcagttgtgtcaatacaacagaggcggtgggaccatcttatataggataagatgatagaagactttggaatcaagaaaaatatctcctctactttactactttattttcagatttagtcatgttcttagaaaagtattatttgttgaaacaaatactttcttatcttaatgaccataggatggttcacccctaatcattttagaatagctatcaatcatgcaaaccttagttaacagttttagcttttcttaagttcgtgattaggacaaccctaaatctagtaacggtgtacactaagtatatgaccattcaatcattatgtggttttcttgggatcatacttagatggaacgacatagaatgttgtttgctatctctaaggcatttccctagaaggacttaggcaggtgctagtcactaaccatagaccttaccttttcatcaatatgcgacttcaaagttttaggaaggtaagtttggatacaattcaaagttcaaattaatgatctttgaacttcataactaaatatttctccacccttatcatttcgtaagatctttaatcacttaccttaatagttttcaccattgctagaaattgatgaaatttctcaaacatttcaaatttttttatttaaggtataatctagagtgacagtcttaagaatttaacgataactcatatttgcccctgaatgtacatccgtatgttcgaatacagatgaacttacttcctagtggatattggcatgttttctctttgcagagaatgatcttgtcgaaaccactatgaacaagattcaaatgctatagatttaatattgtggttgtcgtcttttgatgacttgggttttgttacaacaaagagttcttagaatagttcaattggattctggtcataaaatacaaaactcataatccatacatttagcatacagtttagatccactattagaaaatggatattaacaacttgtttaatgtattttggaaattgaaatttaatttctatttgaaatctaaaatttaaagtcaaagacataaatttataccaaatatttcttgagtaattatctttttcttagaccaccactaccaatctaactctaaactatgttgcctatagtaagcatatataagtaaaagattttctaagattgaggatttatatcattacaagatagaatatctaaaatgtagtcatctacgccactcaattttatagaagaaaatacagtgacatcattagcagatgatttgtaaaccttctgtccaatgatatactttctaagcaatttgttaatgaaaaagctaagaggaaaaattaaaggataatttnnnnnnaaataagaatccaacgatgtcccatttaggtgagagttaaagttattcttattttataagcttcttcattgtttcatattgtaagcactagtctaagttttcatctttagggatgagtcaactagaggtcgcatttacaaaatacttatttatgagatctaacattattatgtttgtctaacaaatgacaatcttttgaggattgtcccactaaaaacaacaaaccaagttagaccaacaatgaagttcaaaatttatactacataatcaataacagaaaacaatacatgttcaatataaattcatagacatattcagaaattataaacatttagcaagtgataaagacatgtgagaatacaaaacaaacacatcttaaataatttctaaggtttctaataaatcgatatcagtgtctcgtttaggcgagagtcaaagatatcattcattgaatgtagtagttagctcatctaaaatggataccattttaacaaccttttattcaatcgaaatgagaatccgacgttgtcctatttaggcaagagtcaagatcattctatttcatgagcttctaccattgtttcatactttgtaaaccatactcttaatagtcactattggggtgattattactaaaaataaaaatttacaataataccaatctttcaagattctacggttttaaattgctaatgaatgaacatctattagggatgaatctcattaaaataagaaccttatagaaccaacaatggagatcgaatatccttaaaattaaagctcattattttagaagaaattaagcaagaacatgaaagcctcaaggctgaatatgaataaaaaattggttcaaatgcataaggccaagccctacaagaactgtacaactaaagaagaactggacagagttcttattggaaccacatactgggctaaggcaaaggtagagttccttgcaggttccaagccaaaaagatgatttccttgcaggttttaagccatagacaaaactttgggcaaccgtacccaatggtgcttgccagacaatttcattgtacaaggctcggtactagcaaagtacaagtctcaagtttaacaaattagataaatgttgagtcttaagttgaacattcgactataatagactcacctttaagtttcatatagagtttccaagggaaccacgtatgagactaaggttgtatatgcctgtaaggccatgacaagattttaccaaagtcaaagaagacagaaagctagccacccgtttggaaccaaggcccagaccggccaaggttcccaagccttgaaaatgttagctagggtcccatgaatcagtcaagaaccgactagggtcaccaaacctatgcatgaactgggtagctttatagggtgcaaccctagagctggccaactcccatgattgagtcctaggaccgaccaagtctcaagcaagacctccaaggccagccaaggtttgttttgaatccaaatgtgagttttttttttcaaaactcaaatatgtgctccatgttctttatgactcaaagagtcaagaatcacaacaaaggccaaaatctaatcctttccatcaggaagccacacattatacattctaaaactgtcatgtggatcaaaatacaaataagactataatctaacaagagaatcaaaagtttctaaaagcttaaaaagcttgaaacttatcaatggtaggtacaaaaaagagatatcaaagaagggaagatgagaagtatatatagggagagaagataaaagattaaaaagcatgccatgcaaaaagtcaatgccttgctagataaggctgctcgacagagactactacaaataagacgagagctagaaagtccccatctaaccagatgttcgaacatggacttgggggaaaaatgttattccaaattttatccacctgacgtggcatgtcaacgtaagccaaaatagagtacatgtgaaatacaaccttgccaatagcagaacaaagcctccttaccaggtatgacaaaactgtcaagcaacaagaaaaaggagttaagcgagctatcaagcagctgtactaacatgtctggctagccaaggggagtatataggcaggccaggatgagcttgtatggccagccaaaatctgggcacaagctggccagcgaaaaggtgactttcaaaccaaaggaaggcccattcaagtaagaaagcctgacttctaaaaggaaaatgtgtacaaaagctagcttccatctctgaaggctagcctccatctctaaaggctggcctcctcttggtaaagctgatgggagcatgacctgcaggatcctagcaagcacatgacctgccagatcttggcaggagcatggccgaccagaccttaacctgcaggtgtatggctggccagcttttcccctgcaggacattgatgcgtagccttcatccatagatagaaatccaagatgcgagttaggccttttcagcccacaaagatgctacaaaaatatctagtttcaagggaaaatttagtcatttgtattttaccaatttaatatgtaaatatctattattttatcttctaattattgtttaagctctcttatataaagagccttaactcaatcctaaaaggctaggtctcatttgagccattaagctttaagtctaaaaccctaatcctcttctctctttcctttatacacgcctaaagggctttctctcttcctctctcacacgcctccaaggccctatctctctctcattaaagatctgcctactgattcatactttgtaaccttaaggagagcttatcagatcccacctataatgatctaaatagtattatctctcgatattagtacaaccaaaaggggagtaggtcattacccgctaactaagggggccaaacctctttaagacccttgtattatttattttattattcttattgtgtaacatgtggcaattatcaacattgaatataactccgctgtcagttggccacttttttgaggtcaataataccctattcataaggttaataaaggctgctagagtattggttaacctgaatgacataactaggaactcataatgaccatacctagttcaaaatgtcatttttgggatatcttattcccgaatcctcaactgatggtaactcgagtgcaaatcatttttggagaaaacagttttaccttggagttgatcaaacaagtcatcaatctaaggcaatgggtacttgttcttgaatgttagtttgtttaacacccgataatcaataaacctccaaggggacctacttttctttttcacaaacaaagctaaagctccccagggcgacacaatgggtctggtaaaccctaaatccagcatcccctaaagttgtatttttagcttcttgagttctgatggagccattggataaggtgcttttgagacagggtctgctccaggtactaagtcaatgataaagtctatttctcattatggtggtaatccctgtagctcttcaaaaaatatatctagaaattctttcaccactctgacatcctcaggcccaaatgtttcaggtttattggagttaatcataaccactaaaaatcctacacacccactgtgtagtaaatctctagcctttgagctatagtaatcagaatccaagaaccctgaatggacccgacataaacaaatggttcctcatcttctggctgaaaagttatctttttccgttacagtcaatattggtcaagtatttggataaaaattctgtttcgagtataatgccaaacttggtcagtgatagctccaccaaataaacacttaactccatactcttaattctgattagcgcagacctcacccaccttctggagataaccaactttccactaggtagtagggttccaaaccctacctcaaagatatcactagggctacccagctaattaattactctcgacgctacatatgattctgtagccccgaagtcaaacagaat

SEQ ID NO: 44696 - DNA, 1672 bp, Cannabis sativa
tttttttcatttttatattttttttatttaggttgctctgttagttgtgatttaaattattgcatgcattgcaatataaattgttatttgaattggattacgatttaaattgctacgttggttgctctgtaagttcaccgtatattccataaaaataaatttaaaagtgtataaataaaaaatgtccctaaaaacaaatatatatgtgaaataagataattaattatcttgaataaatttcaataatcataattggatccattttcttgccccataaaactgaatctatcttttttatttcttagttctcacatgatgtgctagataaaattatatggaactttgagaattcgagtcggcattttgttaagagtggttattggcttggcctttgcaatctgactacttcgcgtgcttctccatttggtggcgtatctgattggtggaaaaagatttggtctcttaatcttccttcaaaggctagactctttgcttagcaagcgtcccataattggattccttcaaaaactaatctagctcatcatggtctgttatttgatgggttatgtcctttgtatgggttgaaagatgaaactactcatcatgctctttgagtgtactacgttgttacattgtaggaaactatatatgtgagtttctgttggggatcctcttgttcattattgtgcgaatttttttgactttattcataatttattaataccttttcaaaggaaataattgaattggttatggtaattttgtagagaacttggtttagacataataaaatagtccatgacaacatctgtactaattgtgcattgggtccgttaccttgggacgtttcatagcaaacaagttttgacgacatctccatccccctgtcgaaaggcagtagacgtctctgctggcgggccagtgtcttggacagtccctcttcaggtggtcccaaaatggaaaccacccccgcttagttatcttaaaatcaatatacagatcatgccattatcagttctttggtcaattgtagtagtttgggtatggtgattcataatcaattgggaatagctttagcttcagcaagttggcattttgatgactgtattgttcctgaagtggttgaaagctttggctatccgcaacgcgctcattcaatgcatctcttttggatatggaaacactattattgagtttgattaatgtttgaataccttaaactgaaaaataatgcttttattattacttcattgagtctagttttagatgatattattggtcttagaaataggcttcaagatgttaattgtgcattaattgatcttgtaatggtattgcctatattttgaccaaacttgctttgatagtaaaaaaaaatcgttatttggtggctagagaatcctacttacactacaagaaatgtcacttttaccagcgcatttcgcaaactacgctggcaaaaaggtcaaagttctatcagcgcacatttacagtggctaaaatataacttttaccagcgtatttacgtgccgggaaaaattatttttgccagtgcttttcattttatgctggcaaaagttctaataccaatgttgactggccaacccattttgccaacacatcacaagtaaatttcattttaccagcttaatactaaacttttgtcaacaca

SEQ ID NO: 44697 - DNA, 1342 bp, Cannabis sativa
gctttttgcctcatcctcagccttcctgatctcgcaatatttaataaaataccaaagttggccttggggttagccttcaaggattcataaaatacctccgtagcagttgtttcatggtactcaacatccttaacatgggccttctgctcaataacaagttctttcttaagggcatgcttctcattcagagatgactcttctttttgcctgagatatttggttaactcattgaccttagcttcttaactctgaagaagtgtttgaagtccttccctctcatcagtgagttcctaaattctctttgattcctaccccaagcctgcttttagttaggcagtggacaacatgtttgccagctgctgcttcaactcctagatagtgttgtttgcagcaactagttgtttattcacttcaccaagctcagttcccttctgctcgacagtacttttggctttctccaaagccttcgtcagcttatcgctgcagtactggttttaagagtcgtagacttagctcagaaacaaacatatgtgagcttcaaattagcttagaaaaaatgaaacaataaaacaagttagaaaatttgagtggtaatctgtgtggaagccacaaagaccactggtaatttcctttagaatgccccgaccaaaagttgtacagataatttctcgacaccagccagctgcttattcactcgaccattacatggtcttggtagaaacaaaacatccttttggctttcttagttttaggctgtacgacaactgtggtatcagttggcttaggcaattatgccactgaacatcgacaacgtcagcacaaatcgatcccttagaagatttggggtgtttgggcagggcggctgggggcaagccttggaagacttcttggtcaaaagatgaaggtctaggatatttatggcaacaacttcctctaacccaggagtcagagccgcagaagtcttttcaacattatgttgagaagtttgatagctcggggctatgctgactagaagattatctcccactttgagcttttaaacaggagatttttatttggagttatctctggcattctcactactacaaaaatggccttctgcttcagtttttaagagacatttaaagaatttacatcagtttgtgtaatcgacgctataaccagacgcaaatagtcttattttttttcttcactctgtaacaaatgctaaaacatttttgcttccgttcataaccgaagcaaatagtaaggcactgatgcaaattagttttttgcttcggttatgaatcgttatgaactgaagcaaaagaataaaaaaataaaaaaaaaacataaaccttca

SEQ ID NO: 44698 - DNA, 761 bp, Cannabis sativa
aatttctcataaaccaagaatttcagttatataagcacactttatatagaatagattgataaagttatataatatataaatatatatttaaattattaaattcttggttcataaagatcaatattattactgagtctcattctagtgatagaatgactggtcgaatccaaataagcaatcctaatatttccatggctatgagcaacatcactatcattttccaacaaatagtactaagtatattgcatgaatatattgctcttattaattaatagtgttacttatatgatcataattttattcaacaattttttttaatttccttctccattttcattttttatttaggagttgtctatatttgtttcatttacattaggttaaaattatacaaaatgtaatactgctcaatagtccataatcttacccacaatttgttcaaaaatgaaataaaataatcttacccaaaaaaaataatttacatgtatattttgattgcttgagttaagtgaggatatcatgataataaactaaacatatatgaattgaatacattattacatttattcttgtaaaagttactttagtaagtttatgccacacgacagcttcttgagagaaaccagctctaagtgaaagctcattcatggccctcttcttctcccaatgatctcaaactcatgggaagaaaatagcatcaccccactactgaaagtgcaaataatagaataagttagtcttcattttggaaccaatagaat

SEQ ID NO: 44699 - DNA, 1198 bp, Cannabis sativa
tgtggtcccagtgaggggtctcactacctagcctcgtgtcacaagctcacattttcaaacagcgatatactcgcgcgataccttgatttctctaagccaatgttagccttccagctatccaagtaacaatgagttcatttttagtgggattgtgtgcctcgtgcatacttctgtgaacaactcctgccgagtgatgcttgcaagaatttatgagtgcatccacacatcgaggctctctagccaaaatattcccactttccataggttctcattacggtaaggaaaaattctaacatcggtgctcacctagtcactcgtgactaaagtaggtagcatgtgtggccaaatgccaatacctctagtcatgtcccattcgatactatccgagcagtctccctcatgacctaaggactctcatacatgtcagtaagtcctcaagacaagccactatactaaaagcatatgttatataggcctctgtatttttctagcattgacattcgtcccacgcacatatgtaggctagtccacaaatgactacccgtgttatttcgtgctaaaactggtggccaaggcgcacttcacatcctggaggtttaggccacactccatgcaagaagcatatcagtaagtcaatgaaaatgtaccagctaacctctggcggcatgtccaagcgcattgtcgggtcggtacgataatgtcaatgagtattccaactcattgagacatatgagtctcctcgtagtcctcttatgcccgccctacaagtctcactgactagtaatagctcacttagcaccaaagttttaaagggtgggggagagttgaaaccaagctttcccccataagcagcattaaaaacttttagccttctacgaggaacatatattatttttgctttgtagacatatggtcatcaccatataccaattctcagagtttatcaaactcaattgcaccatataccaattcttagagtttataaaactcgattgcaccattgtattcctagatccaaataaattgtgaataccaagtctcatcccgattcgaaattttttaagatatttataaaaatatcactatcgtacaaactaggcatcatcatgcatgccaccaacatgcacaccaacttgcaccacaacattgccaccacttgaccacctcatagacatcacctaaattgtatcatgcatct

SEQ ID NO: 44700 - DNA, 1149 bp, Cannabis sativa
tttgtaagtaaaaatatagtcataggcgtgtgtgagtaattttgtaataaattgtgtaaaattgatttttcatgtaaaaatttcttaaaaaatagcctccttagcactctcaaaaaacaataatactaactcgaatattttttagtcaaaaactttccaatgacctaacttttggaccccgaacagtattatagatttgtcggtttaacttcacatacaaaatcattattattatagattttacaatggtttactttacaaccacatatattgatatattattattatatattactctacaaccttttggtttaattaattagtaatcataaagaaatggtggttttacttataaattatatacaaagttatgtaaataaactaaaaaattaacgccattgttcaaaatattagaaaaaaataatggtacaacttttaagtgaaagtaataagaaatctgacaagaaaatttatagtataaatatttatataggttaatttgttgcaattaaatgcctatataaataatttagctacaataatattatgcttacatatttagtgaaacagttagtccttggttatatataatgccagattaatttaggcacgctacaataatttttaaattatcattctatcttactaatcaaagagtttagtaaaaaaacatgattaacaaaaaaattttataatcaatataaacaaaatataaaatttacaaattcagaaatcacatatatcttcaatgtttacaagttacaacagttcaagagatgtcgctcagtgactaataaaatcgaactcatgatgttccgaagatctgaaccctccaagtctaaccgttccaatatatacaatctttatgaagctccagactcactgtttattcagtttttgtcttgccaatttacctacacaagaagcacatatatgtgactcgacagactcagtaagaaaagcataaaacataacatataacatgccttcataacttaggtgaccatacacccaattacgaagtaaagtcacgcggccaacgcgtacgagtctcgaacattcttgacaagagtacaacttgttcgtacccccgaagcactaaccttaccatattcactcaatacctataatgtaacaccctaactacct

SEQ ID NO: 44701 - DNA, 1185 bp, Cannabis sativa
aaatttgagcttggagggttaagtacaagtggaacgatagttgaaaaagtttaaccgcaaaaaacttttattgttatttagtattttagttggtccaaaacttgtttctttttttgttcagggacaagtattctaagcagactagtgtagaagaatttgttaaaaaaccctcactctggggaaatctgaaatcatttgcgggcggatttttcaacaactggagaaaatcttagatttgagttttgaagctcaaagaggtactagctcaaatggtcaagcacctggtttacttaccaacaagatctgaggttcatgtccctactatatatttacatatcaattcgcaataattttttggttcccaatatagtagtgttcggacaaggaacctagtttcaaaaagaattttttttttttgagtatagcgtaatggtatttttacaatcaattaatagcttgtagcttaaaggtcttgggttcgaacccataacctctcccttttcccatccctctctcactactaagctagctttaatggcttcaaaaagaaaaagttgttcattatacattttagcttagtaagttaaatgaatgaaatctaaagtttagttccaagagcatacatggtgtaaagagaaagttgattttgatagtgtttgatgcagattgcagtgccaatggtaatgaaatcaacagctcatatcgatattttaacattaatttcttactttatttttcagattgagatcaagatttaggtagcgtgtagttgggggtaataaaatagaatggaaaagaaataatttgcattccatttatttggttggttacattttaaaacattagaatatcgtttcaatgaaatgcctttttcaccattttggtcaaatgactattctatttcgaaatgaaaggaaaaatcattccaatttaacatgagaagaaatttattaattttttttatgcattttaaattttatatcattcttattctcattttcatttctatttctatattttcattcctctcaatcaaacgcctccttaatattttgtaatgtcttattatgattcaagtaaaatgtgtctagtccgtgcagagcaatattatctttaagtagcgagagaattaatattgtcattattatttttaatagggatatttgtggcaaaattcttaacatt

SEQ ID NO: 44702 - DNA, 624 bp, Cannabis sativa
  modified_base (27)..(46): a, c, t, g, unknown or other
gcacttagtgcggattggatgttgttnnnnnnnnnnnnnnnnnnnnggatcggatgaacacccctagttctagttatgaaaagttagtagtctctagaaagtatgttttgtaggctaacttgtccaccctgaagaagtctcatggaataataaagaaaggcatttctgaaagtttatcatgtccaccttgaagtagttttcataaaagctagtcctcctccagaaaggagtttcaaatgactagttgttcctcttagaagggaatttcgaataatcaactccagctagctctttcccatccgagaagtcccttcagcatgcgcttcggtccttagtcccgcaagtgtatgtcccatccgaaagcactttgtcttgtcctgtgctaacatggagatattgttacaaggaggttattaagttttttaagtcattactaacttaacaatggcagccaccgattttaggatctttatcttgaacttatacataccacccactttatcatcttttggaggagaagtggataaacaagtttcgagaggtgatcttgagagagaaagattgagaggtacaaagaaaagagataagttttgtgtgaagaatcttctatagataaaaaaaaat

SEQ ID NO: 44703 - DNA, 857 bp, Cannabis sativa
taattgcagtttatcagagggagggacgcctccacgattccttatcatagatgatggttggcaacagattgaaagtaaacccaaggatgagaatgttgttgtccaggaaggagcacagtaagaatctctcctattctctcatgtacctgttgccaagacacttcaaacagctttacatataagagactgatttattattattcattcatgcaaatttgcttcaagtttcaatgtttcacctttctagtcaggcaccaattgtgattgtattgcctttgcaggtttgcaagcagactgactggtataaaggagaatgaaaagttccaaaagaacggtcagagcaatgaacaggttccaggcctcaaacatgtcgtagatgaagctaagcaacatcacaatgtgaagtaagtgcttgtagtcttagtattctattttcttgtgctaatggtttcttatagttgatgcttgttctttttcaagaatttgaggtaaatgaattgatataaagaaaaaagtttctcaaccaaaaggggaacatagcataatgaatcatccttacatcagatattctaatgttaagctactatctgttacaggttcgtgtatgtttggcatgctctggctggttactggggtggtgtgaagccagcagcatctggtatggagcactacgatactgctttggcatatccagtttcgtcccctggtgttatgggtaaccaaccagacatagtcatggacagcctgtctgtccatggccttggcctggtgcctccaaagaaagttttcaacttttacaatgagctccattcatacttagcatcatgcggagtggatggagttaaagttgatgttca

SEQ ID NO: 44704 - DNA, 4194 bp, Cannabis sativa
tatttatttgatttaaattgctaatattaacttgttgatagatctaataatctaaattaatcatagttcaattgtcaatatatcaaataaataatttgtaaaaggtaattttataattttctttaatctgtgataaacctagtaacatgatagggctcatctaaagtaattatttaattgagtctttctgtttatttttgagcttagatgcatataggaaacctatttattttagatatttaaatgaactaggttcctaaaataaaataatcacttcgatagttttatttaggtccaattagtattgggattatttaattaataacctttatttatttaaatgttaaattcctctcgtagttttcccgcgtgttcttgctcttgcagctgagaagctggctccatggctaaaacaaggtaaaaaatccatgggaaaactagatctgctactaagaattcgaagaagaaaggtgcgaatctggtgtctgatgcaattcaaactagttcgattgatgaaactgatgaaattaaccactggagatgtcagatgaggaagtacccaaaggagatgatcctactcttgctgatgtcttccagtctcctttatctcccaaatcatctttgaagtcgattctgaaataagatgaagtaaggcatgactttgtgcaatttctcctagcaaatgagtaatgtaacagtgaaattaagcaaggtatgtgttcgatccctcttattctgagatctggtttagtggttcgtaatctacaaaattcttttaagaattctgagcaaagaagtaataaggtgaagattatgatggaatgaagtcttgttctggaaaccttcgattatgtgctatgttttaggattgaatcctctactgcacatccttaaaggatttgtcaagagagtttggaaggacaaagtggatcttgtgaagatgctttcctatggcatcttcatcattcgcttttgttcgataaaaaacagggaccaggtcctaaatggtggttacattttctttaataggaggcctgtcataatgaaacccttggatcgaaatgtaaatttcaaaaaaaaaaaaaaagatgtgaaatgtgtgccaatttagatcagattggaggacctagagctaaagtactagggtcaaagatccttgttcaagattgatagaggtgttgatggatcaacaatttccaaatatgttggattttgaggatgaatatggtaggaacacgattgttgagataaaatacgcatggaaacccattgcctatactcattgctttggcctagggcatgttccagcagattatgagaaaatactacagggaagcaggaatggatcataaaaacagaccatagaaagcaagctcaggttttatgaggagggctttaaggtgacaaaatccaggaaagctaatgggaaaggaaaagaaattgtagatattgtagtgagtaattctttccaagctcttgacttgaataatatgactatggaagcaggggaagatgttctagagatcgtaaatgcagggaataagactagagaggggggagagccctctttcaaatggataagctaatgttggaatgtctgaggagctaacaatcaacataaacagaaattaataaagcaattattaatgctcaaaatggttattttgttgggcttctcaagacaagggtcaaggccccaaaacttgggaccttgtactaaaaagtgtttgcaggatggtgcttcacctctaatatagcttggcatgctggggggaaaatagttatttcttggaaccccttgagatttactgttgatattattaagtacacaagtcaaattatgcatttaaaaattacaacagtagatggatttgacagttttctaattgtggtttatgcttccaataatcgaactgagaggagacttctttggaagagcttgtgtgaaattgatattgttgaaaattagtttcttatgggagactttaatgacatattagctaaggatgagagaattgggcaaagggtgaaatttcatccttattctgacttcttgaattgtgtcaattgctgccaatttgaagatgtcaaagctagctaggggaaacttcttcacttggacaaataagcagcaaggggaggatagaatattttacaagattgatagaataatggccaaccaatcctagatcaatacatttgaatttgctgaagcgatttttctcaatgaagggttgtttgatcactcacctggaattcctactctatatcctggtttagtgtgtgggaagaagcctttcaaatactttagaatgtgaaaataatatcctaagtatgacatttgtctaagagaaatttggtcactgagaattaagggatctaagatgtttcaggttatttctaagctaaaacaattcaagaacagccttaaggagataaataaggagggtttttctgacctacacgcagcagtcagcagggttaagttggacaattcgcaaagtagaatccagcgatgctaccttataaatgtaggagtaggagacaagggaactgttaatcaaagtacataaagattatatgtctctttcatgcgacaaaaagctaaagcagcatggatgcaagatggagattgcaatactgctttattccatgctagtatcaagcattggctgagacagaattgaattctctctattgaatagtaggatgggagtagggtgcatgatcctaatttgattactaaggctttttttggatttctacaagggactattaggttctaaaatggagaataaaagattagttgaggctaggattctggctagaggacctgttgtgactcaagaataggctaacatgctgctacagggatttaccaaagaagaagtgaaacaggctgttcttagtattcctggaaacaagtctcttggacctgatggcttttcaagttgcttctaccaagataattaggaaatcataggtgatgatatttgcgatgttgtactatcattcttggaatcaggtaaaattcttacaaaaatcaattcaacaattattactctggttctcgagattaagtgccctaacactgtcaaatattttagaccaattgcttgttgcaatgttatctataaggttgtaaccaagcttttgagttctagaatcagaaacatcttacctgtgataatatctcactctcaaggtggatttatcaaatgtagatttatcaaaggtagatttatagggcacaacataatgatatgtcaagatttggtgagacattgtggtgagaaatctaacaaaccaagttgcataattaaattagatctctaaaaagcctatggtaccattgagtgggaattccttgaagagatgttgataggtttaaagttccctattccctttattcagctcattatgaatagtatcaaaaccccctaagttttctcttatgtgtaatggaaccttacatggtttctttgaatctaagagaggacttaggcaaggggatcctatgtctcctctactgtttgtactaggtatggaatatctatcaagattaatggggaagataggtgagaaggaagatttccattaccatgacagatgctctgatctcaaattaaatcatttagcatttgctgatgatgtgctacttttctgtaaaggggatctcaaaagtataatctacatgttgcaggccttaaagctattttcactaacatctggtttgtatcctaatgcaaacaagactgcaatttattgcaataatatgcagcagtatgtcataaatcaggttctaaatttatctagtttctttagacaagagctgcccttcacttacttgaggattccaatatgcggaaggaaaatttttgggaaagaatgtgaaccgttgactgaaaatatgacagcaaggatcaaaagttggagctctagaaacctatcgtttgagggagaatcacattaattaattaaattttaattgctatccaagcatactggagtcaaatgatgatcatgccaaggaaagttctcaaaggcattgaagcaatctgtagagctttcttgtagaaagaacaaacaatgttccatggtgctggagcagtagcttgggaggctgtttgtcaaccaaaaacagcaggtggattgggtattaaaaagctcgaagagtgaaacaaggctgcaatt

SEQ ID NO: 44705 - DNA, 2629 bp, Cannabis sativa
  modified_base (1865)..(1881): a, c, t, g, unknown or other
  modified_base (2580)..(2602): a, c, t, g, unknown or other
ctttactaattcatattctaaaatctggtcattacaagagggaggcaaacagggccctaaaagggcgcttagaggacaaaaggctacaagtccgcaagagggcaagcgtgaagtcagtggtccataaggccaaaaaattggaggacgttcatgctccacctcctgtggggcctacagtggaggtcgagaccttagagaagaggctgtcatacagggtgggtagagaggcttcacctttcgcggtcgaactcctagaccaggtagctggaactacctctgaactgcctatagagacctgcgcgtcctacaataagacagacgttttcatgctagcctattctgccaagcagcaggcgattcgggtaaggcctcgtggcattgcctccacttttctcattgttttggtttgtttgctttgcgccctattcagacactacaacctttttaaacttggcttgttctgacatgtaaccctgaagatggagagagctgctgcagaggctggtgtgctggtgacagagttggagaaagtcaaggtggccaactgtgacctctgtgccaccgatgagaccttccagacagaacttacggatgctaggttccagattaggggtttgcagcaagcaaactagcaggtggaggaggagaatgcccaccaggcacacttcatacggagcatgaaggttgttcatgatctttacacagagaccgtgagacggatgtccagtgcaggctcttcctcccagtcagacggtgtctaacgttgaaccttcgttaggtttcccagattaatgttgttttctcttttaattttttttatatatatatcccacttttaatcatacttctttagccgcagagaaaattaaattttgccctggctgcaggaggctataatagtaaatagagtccttttttgttgttccttacttggagatttggtgtggtagacttttaggggctggttttgttatcaaagcacccaatggccagtgcttcaaccttttcccattagtcttaattatctcttgatcgatttagaaactactttttaatttgaccctttctctcctagagtcgtgatgcattttggcccaccattcgaaaagttaatcgtccggagttacccggagatggcttctttctgtgaaaatagatctttcacaatttctcacatcctcttcaacaagactgagttctgggagtgatgtctgttatcgccttagagttaagaatttttccgtctttagtccttgctggcctaacattttagccaatcatacaacttgatgggctaaaaactactacaaaaatcacatttcctgtcagtttttaattgacattaaaagttttttcatcggttcccccaaccgacgtgtatactttagacgcaaaaaaatgtttgtatttgctttagttatcaatcgtcatttcaaattatttttgttggatttcaacactcagaaacaattataaaaaatgattcttacacttatcctatttgtttataagagacactaaacagtcacaaaaaaaaactcacatccgaagccatatgaacccagatctgagcacaatcaaaaataaaaataaacacaaatctcacatattatacaaataaaaactagtcattttataatctcaaatcaaatgaaaaatagcacaaatctgatatctatcgtgtaaatacaaatcaaatacaaatattacacaatatatataacatgaaaattatcatatatgtattgtgtaatgcacaaatcaaacatttttagagaagtcgccaccaactatagttgctcgaatcgcgcaccaccaaccacatacggaaatagagaggcgatgagagagagagagagagagannnnnnnnnnnnnnnnnagagagagagagaaggagagagagcaagatattacaaatgagaatgagtcagaaacagtacctaagattgcacgagcgacgaaggtcattgtcttcttaggcgagtggctctggtgaaggtcttagggttgttggggttgattcgaggtggagtcgaggtgggcttcaatcgtcgaggtggagttggcgtgggattttgccttccaagtggattcaaggtggagtcggaggtggtatcgtagagggagagagagaacattgggtggttgtttattagggttagaaagtttaagtttaatatatatggtagggttttcgtggtgtaaatgggcttgcgctaatttagcaatttgggtttagaggaaatagggtcttcaaggctggtttataaaagttgaaagaagtattgtgagtgtttataattgacagtattgtaatactcaacttttataaaccgacgcaaataaacatcactaaattttttaattttttcccgtcagttatgttattagcgtctaatatataacatacaaaaataatatcttttagtgtcagttccaaacacttgcgtaaatacatggcctactattaacgtcggtcaacaaaatgaatagttgtgttgactgacgtgaatagtataatttgtagttgtagcaccctaactagcataggcctattacgtgatttttaaacgtactnnnnnnnnnnnnnnnnnnnnnnnaggtttatggaaatcgtgattaattaa

SEQ ID NO: 44706 - DNA, 1799 bp, Cannabis sativa
  modified_base (105)..(115): a, c, t, g, unknown or other
  modified_base (1177)..(1178): a, c, t, g, unknown or other
tttttatatttttacggttttttataaaaacaacacgaaaacactaagaaaactacatgaaagtaacaccaaaacaaaactaaaaaataacatacaaataacaannnnnnnnnnntaaattaacaagagtacaatataacaagaccgtattttctgtaaataaaatcaaaaaattaaaaaatatttaaaattccataaaactgtatttttatattttttttgttatttttgtgtatttgtgaaataattccaactattaatctatcataaataagcgaaatatacaccctaacaagacaaaatatgctcctatactttattattatatagtaacatagagactagtagtaaaaatgaggtgttaaaatttagggttaccttccatgaaaaagagcaacatgaacaattgtagctgtaagagctgcaaagccaacaccataagtcatagcaaaaaaagttgtaatatagagtggaccttctttctcataagcactcaaatcaaggtgaaattttgagtcaatgatggctgtgatgttgtatttctgaccgtctgatctgaataaactgtctgaaaatattggaaatgttttggctttgtacacattaagccaataacacaatggagtcaatatatacatgaccaaaaaaaaaccagctgctacattagctgtggcaaaccatgggcttgctaatgggcttccaaggtaagatgagattgtggaccagtcaagcccaaaagtaccaataccaagcccatatagacctgagcccagttgttgggccaagattgagtttggaaatatccaacatatccaagagagtgatgtcagcatttcgaagaggtaacctgggaacacatagtaagcaaagctgcatatgaaggcaattataaagaactgtgtacgtgtcactcctccattggttcttttttccttctcgtgtaaggctctgcatcatacaatttattcgaaaataaataaataaatagtaggaaacaaatggagtgtgattaattttagaaaaaataatttgttgaaaataaataaataaataaatagataattttaatttttgatggtaataatactaaatttatattcttaaaatttttataagtacttgactgttaaatattaaattattatctacatattatttttttattagtatatttaanntaatttttaaataaaaataaatatttaataacctaaatcagttaggaactgtcatgcaggtattgacttggcacttaatacagaaattttaaaaatataacttaagtattattaccgtaaaaaataaacttttgtaaccgaaaatttaatttaagtatttgtagctcacacctcacaataaatttgtaaacaattctaaatatatagtttatattattgaaagtaaagttaattatatattagttgcttaattactatatatatatataagaaaaatagtagtgagtgtttaaaatatttaaatattattttttgtactataaattattttatttttttaaaaaaaatatttacaaataatcttatataattgcaacttacgtaactataataaaaatcatactaaaaaactctcctaaataacattttaaaaaggtcaacgataaacttacccaatctcataaaacttgagtttgtaggagtaggagtaatgtgatgatcatcttcactttttgtttttaaaaattttttttactattcactaatcactatattaatgggaaaattgtaattaattaaggaagatgtgtccccacactaatttctttttttttttaaaaa

SEQ ID NO: 44707 - DNA, 1651 bp, Cannabis sativa
agttagatgattattattaattaagagagaggaaaaccaaatagtaaaaatgacattactttgattaatggtaaagttgatgaactaatttatagacatggaaaacttatatgtattatatctattgtaaatgataggactagatgatctcatctgtaactccagattcacaattaacaaaataagataaatgtattgtgttgacggtgagaattcgtcaacgaaatattaaagagcaaatacaatattaaaaattttagttaaaaaaaatcaaagaaaattcataaactcactccaaaaaactactcttttattaattttttttctttcaaaaaagtcttctttacaaatacctgaaaggacctatttatagtgtctcttacaattttgaattccatctagtccattagtttgagagtgtcaggtcgttttcatattaggtagacgcagtacctcagatagtcggatgtctctggcattctttaataggacaaaagctctcatctccacttgtacttcaggtaaggtaagttttgtctccattattcatacttatcatgtagtcgttatcttgcctgcgacattcttgtttaaatgaccctagtctcggtcttctctcctcatcccttgtgttcgcgaggttatgttcacattcaaggtgtccagttgagtttaagtgcatgaaccatttgtatgagggaaagaagtgtacaggggggaagaggctgggcgcgcagggagggctgctcacggggaggttgggtgtgtagggaggcttggtgtggggaggatgggcacgccggcgttggcctagggagcttaggtacacgggcgtgggcgcggggagcttgactagtgccttcgatgctcctcatagcaacacatatcctcttgtgcatttggaatttacacttggttaacttttgggcataacactaatgactccaaaaattacactttccaatttttaggggtcaacacttgcctcctagtctataagaattctttcaattgttggtagactaattttcgtgagctttgtcttcatctcttagtcccgagactggtgctgtgggctatttgtaggtctttaagatttagtctaattgttctcaatccccttatcattgtattaaggtgtcggtgtgcttacgaatttagaagtatgcacaactagctaatgcacgaccaacgaaaggacaaccaaccagctgtcaaatatctagttgaggtacaaccaattgacaggcacgaccatctggtggacggccagttgacaaacaacaagctgaaggaggatcaactaatggacaattggctgagggatgactagctgagggatgaccaattggtggagggctagctgagggacaattagctgagggacgatcagttgacttgccagttgtgggacaatcagcttagggacgaccagctgagggatgaccaactgactgacgactagcttatagagggccagttgagtgacgaccagctgacaaaaggctagcttttagatgactagctgagggatggccagttgagggacaaccagctgacggagaaccagttgagggacaatcatataagggatgactagctaacggacgaccaattaacagagggccgactgagggacttgtcatttatc

SEQ ID NO: 44708 - DNA, 1577 bp, Cannabis sativa
aaaatggataaggaagtggccaaaatccagaaccaggtcacatctcaattgctagccggaggcaaaggcaaagggaaagccaaggccaaatccaagagcccaatcattttagcaggtgcccttgatcttctgaataaaaggaaagagtccgcctctgggtgcactttggtcatcaattgctacagactgtacaccctttcgagtctacttttgccaagcaggtctttatatatctcgatgtcatggtcgctgaagacctcatttcactcgatgatgatgactaaggcttcattttctcggagagagcccatgcaccgctaaaagaatctgaccctctgcctgctgtggaaaaggagacaaagaaggcacaaataaaagaaatatttgagcctacacaagctccgaacaccaagggctagttcaaaggtggggaagggcaggaagaaccttcagctcctagaggtgaggctcaaactttgcaagtaagctcgaagccttcaccttctggacagagacaacaacaacaacaacttgtcttcctccacttccagctgttaacctttcctagcccattttctcctacactctacttccggtcgagattaagaaaaaagtcgaagaagtttctaattggatctggaagcgcattgtgtaggatgaggttgttgcacagaagaaagccaatgtcctgcacactcggaggaaagctaagattttgacaaaggcaaaaactctgacctagttgtggacctcctatctttgtccaagtatcttgcactaagggttggaagtgacactactccttttattgcataaatgattaatttatctgctagcagtatctgcggactgacttcagagaaatgggtcatggcctccagcacagaccttactctatttgcacatgctaccaaacaacaagccaccggggtaagacttgctttagagtactcaatttttgttgccacttttgatttttaccaacatgttaacacttcctctctttttgtattggtgcgctagatgatcgttcttgccgaaagggcttgtgactctgcccatattgcattagtggagtgacataagcttaggaccgagaacaagaacttaaactccaagatcaaagaggcatttgtcttggcgaacaaaaatgttggttttagggttcatatcaaagtcacagcggaagagaataaaatttaatttaataaaaaatgttaaattttatatgaattataaatctcggatcttaacacaattatatacaatataaacctaattattagtttagagatttctacctcttgttacctatcagtgtttcttaactatttatttcgtattaaaataatgaacatccaatctaaaagaacttgttgaagagtttacaccagaaccttctaagttagcctcaacactccaagcatagagtggactattagatttaatttagataaatataattttctgattacaatgtgtaattaaatcatgagataatgtgattgatattaggaaaacacaatcaccctcaagagagagtgacgtgtgagcaaggtagagagagagagagagag

SEQ ID NO: 44709 - DNA, 2332 bp, Cannabis sativa
ggtggtggtcgtgcgtggtcggggactgctgttggtggtggtgggtggtcgtcggtggccgggcgtggtcgggcgctgaagccgtggtcgagcatggtcagcgagagggagagagagaagttttgatttttgtttgggatttatttttcaaatgggaggggtattatggggaaaaatcaaatgtagttatatatgggcaattttaatagatatagatgtagggaaataattttagtgttttatggatagtttttcaaattttccttttaattttaaagctattttttttctataataaaataaaaataaataaaattacattatttttagatcacgttaccaattttattaaaattaaacatcgccatacacaatagatatgaactcaataaaaatatcattctcattaaagaaacgatgtagaaaagaataagagactctaataaaattatgccctatgtactttattaatagtagatgaataaataaaaaacaaagaaacaccatttatcacacatgacatttttttttacaatcctcaacaactaactaaaatgagaaagcattgtaaaactgtttaaaatagccttagacaataacaagatagttagactcaaacaaacaccatctgatcccatgtcgcatcttgatctaactgagatgacaattacttcagccacacctgctagtgcaaaataaaataaatgtttttccttgcaaagtggtttcctttgtattagaatatagtgtctcacataaaacaagtgtgaaaatatcgaatatagataactatacattatttatttgttttaagatagaatctaatgctaattatgagagcagacatcaaaagtaatgtgccaaaaaaaaaaaaagatgaactagatccgcatagtacaaattttattatgaataaaataggattcccttaatgtcgatatatatcaaataccaatactctcaaaaatgtatatgtccgcaatatcaccttcttacgtaaaaatccatctctttcttcatgtagtgatataacatatcttaatttaataactagcttttttctctttggaactaactagtaaggatgcgaacccgctcttttcttggtgtgagtctggtccttgtgataggggttttggttcacccagattgtttatgtggtggttttctctttgatttcatgtctaatcgaagctttcctctaataaatgagagcattaattgctctgagtattatactcctctttccaatctcatttgtcttactccgtgcatttattgcatttcgattcatcttcttcttctaattaattcaacatgtcatttctcttccaattcttcaaatctttgcattaaaaaccatcccttcaccttctcttttgcccttggaagtcgtaagatggaggcggaagaaggatctcttgaagctcatcaaattcttttcatcattggggctactcctaagtttagggttatgattaagggatcttcgagagtcatcctacatagttattggttctacctctataaagaaagattaagggtatatcactattttctcatctctcacttgttcttttcctttgttttctttgctgtgtcttctgtctttcattaatatggaagaatatctgagtagtgtctcaagctcccttttcctttctactgatgaaaatactatatttacctatgatgctaatccctcaaatgattctccagcctttattagtttgcttctcaaacttcacactgtcaaacccttggccttccctcatgaaaaccctctcaggtatctggtcatcgcagtgtaggttttctgtctgtctgtgtctctgaaaatgctgatggtttgttcatggttacatttgggtgtgaaggggataagggtagaagtctagaaggccaaccttggcactttactcaaagcattactatctttgttgctcctgagagctctttccctatcacccctgatattcttcattatgtccttttctggttacaagtgtacgacattccttttatgtgcaaatcccacgagttagctaggtttattgcctctaaaattggggattcattgaagttgacagggatacagttagggagggtacaagactttatttgaggcttaggatcctcttagatgtaaatctacttattagaaggggtatgaatattcactttatcaaaatggggagggagtttatcaagtggctcgattttaaatatgaacggcttcctgatttttgcttgtattgtggttgacttgatgacactaagaggtattttttggaaataattttaccaggatcttagatctacttacaagtat

SEQ ID NO: 44710 - DNA, 2914 bp, Cannabis sativa
tttttttaaaaacaaaaaacagatttttagttatgatgccaaacatgcacctaagctccccgaactaaggtggagattgtccataactaaatccccaaattaaaattcaatatttataattactaatttattacttaattaattagttaattaattaaatataaaataataaagttggatactgaaacaaatattctatagctacagatcaaagattatataactacataccaaaaaaccagtataaaaaataaaaacacacaaggtttttcttacaaggtatcaacagttaatagtccacaagatcacacccaaagataagattctttagtaagatctcaaaaatacaaaatttttgacacatgcatataaataaactccctctaattctatatcttgatattaagtgcctagttaatcgtactactaacttaactaactttactttgttcattttgcagagatggttaactttgcaaaactccttcaaagtccaagtctgcccataaaaaggggaagaaaacgaaataaagacgataggaaagtacctcaaaattaacaacaactccaaaaaagaagaaatcttatccttatgccgaacttacctccattatttaggtcaacccttcgacttccaaagccctctgaaattttggccaaaaatcgaatttcaatgtggaggcctatttgaaagagcccaaaaaaggaagaaagtactcaatcctatcgaggaaattacttttaatatagagaaacctaaaatccatttccgttatgcccatatttcgagcagcaatatagccacgtcacgtgtaaaaaaaggttgaataataatcggctcgtgatttgaggaatatcgaaagccggttaatttgccttagagaatactagttgcatacgtgtttaaatctttccttaattagctaaggaccagtaatgaaatgccaactgtaaaaactggcaagattaaatcttaagcgagaaacgttcacctcgggaagtacaaaatacagagtaattaagagaaggcaatatgtgagttaagcgagacaatgtaaaagttcctaatctaaagatacaatcttaaaaatcttatttgaaagatttatacaaaaatatccaaaactttattctggataaccaatgcgaggaataaaagaatgaatcattcatttcgtgggaaatatttgagaaatacgaatacatatttgacaatgtgatttgcgagcaactataaagtgatgaatagaagaacaacttggtggaataattgtttcagataaggataataaatagttaccagcatgtaattcatttatccagttataaatatcaaatgtggggattgtccacgtttttgagcagttctctagacaaagccaaagggaataaactgtcattcccaaaaaacctataaataaggacagaaacaacaatattggggatgaccaattttctagaaggatcagtctgagagaataagtgtagaaaactcagtatctctcaattttaatattgatcttctgcaaggatttacaactcataaataatatggacacagggactatgtagattgaattacaaaacaacgtaaaaattcatcttatcttacttattgctattaatattgttgaaattttatgccctaaataaaacctaatttcattgtaatcttatttactttcaataaagattagaaatcatacaatgacttagtcataagctttgttaacatgcttgatgtatgattataggtttaatatataagttcatattaaatcccgaacatatagctattcacaatcacagtgaggtcgtcacaatagaaaataattataattatatgcttcaaattatttagtcctacgattataagcgcactgaatttatattgacgtgataatcaacaatggggtttacttatacttaggggctgtttggaatggattaatgtgaggagaggaaaagtaatgtcaatgattaccctgtttgttatgaggttaaaaattttttgtgtcatgtaatgcttttaccctagtattctaactaccctaaaaatgggtaatgttgatccttcaaaaaaggtgggattcaaatattatatcagttatttgaatgtatagttaaaatttttattaaaaaaaagtcacataataattttaaaaaaattaaacactatacgattgctttaagaaaagatgtttataatatatatatatagtactccttaatctgttattaatattatcctcaccatcttcttctatttgctccttcaaacaatacaaaattatcacaacttaatctgccatttttattattctcaccatcttcttctatttacttcttcaaacaatacaaaattatcacagcttttttgttaaaattcaacattgcatcgctcttttgtcgctacaactttagttgctggctcatcagttggacaaatacattgaattaagtttatttattaataaatatatttgtttttacaaataataattttattttatttataattatgttgaaagatatttaataattattattttattttactattccaaaatagtatataagattcttgtgctcaactaaatactataatttaattaacagtaatctaattaatattaccatgaataaccaaacacagtaataagtttacagataatcatattctccttcataatattctccttaagcagattattttgaatcccttataccaaagtccccttagataagtggaatgtctttttttaggacattagaaaagtaaactagcatcagatgtattggctatataccaaacttgatcgatattcacagcgaaaaagatattataaatttatcttaatattttttctaaataaatatctaaaaattgatcttaggcaaattaataattatt

SEQ ID NO: 44711 - DNA, 1202 bp, Cannabis sativa
tatagtatagctaggtagctagctagggttaatttcactttattaaagttctacagaaaaaagaaaaggaaaaacgacttaactaattaataatctagtaataactaaaacactacatggaataagttagttagtctacctcttgaacgagattatttgagtcacaaagtgtacgtgtagaaactagaagatacatgcaatggataagtcatgcgttcactctttctttatcagtttctttttctatttgagcgtgtgatgtgggggagagatagaattcatcataagaagattatgtatgtgatgttaattattatattatattgaatatataatatgtatcaataggaaaattaatgtctttctggtcaaaacagaattgatgaaaaggatgttataaatctgaaaaggatgttacatatatatagatactaatattacacgtatattattttaacataatggcaaaagcatgaattttggatccaaacacaaaattgtcggcgtgattcattatgtcaaaccaaacttaaaaaaataaagtcggttaggagtaatgattttttcttgtgacttatttatcggttcttctagctagtgtataactataatatgattattataattattatttagaaacatgtactgttaataatgatgaaaccacaaatgaaattcatgcacacgagtgtacacatcgaaaaattctatgctttaaatctttttacgcgcgctggctgttagatgaacagtactcacacttgaaaaaagaaaggacctaaagaggattaaaagttataatggataattatgtaataatgtttatgttaacgcttctcaacaataccacgagtatctttagttgaactcatcttttgctaaaataaatttgattggagctctgccaacactactacaatatgggcttttagcttcattttttttaacccattttataaaaagggaagctaaagggtgtgaaaacacccacctgattcgaaattgatatttagaggcggttttttggtaaaaaccgtaggtatatatattaataaaccctatcccgtcggttagaaatttggaatttttgagggttttttggggaaaccctatgccgtcggttcctagcaaagaaccgacggcataggtgcacactttattgacacgtgtgcacctatgccgtcagttctttgctaggaacc

SEQ ID NO: 44712 - DNA, 2708 bp, Cannabis sativa
  modified_base (2390)..(2406): a, c, t, g, unknown or other
  modified_base (2652)..(2663): a, c, t, g, unknown or other
ttttagaaattagcatataattagagtttattttcaaaagtagacttttaattattatttttatgattatagagatatatttaaattctaggtgtattaattatgatattatataaattttatgtttctcatattttatgtctggtaacagtagaatgcgacagttggcctatagagtcacttggaaaggtataggatttttgttttaacaggaaaatatagttagacattgaaaatgtcgggattattcggggttataaggtttgaccataatacccctaagttacaaggttactttatggtgaagaaaaggggcaatttagtaattttactgtattttgtcctttgtgtgttagtgacatttgtagtaaatttgatgtgtagttaagcttagattaaactgaataaaaaatttaatttcataattatctttttctcaaaaataaaaaaaaatcacaaaaaaaaaaaagaaagaaaaaaagtctctctttttctctcccttgctcggccatagaagcccaaggcaaccataaaatttcctcacctttttgcattagtttgaggaggaattcaacctagaatcaaggtctttggtagccaactcaaggtaagttctttttttcttaaaaatgtcaagttttgaattaggtttttcatgcaattttgtgattgggttgttgtatgatttggttgagtttagatttgttttttgaggttagtttatgattgtttgagtgatttttaagttagttttggtgattgttgttgagcttagacaaagtttgagcttaaactttgctcaaactttgctctttaatggtagattttattattgttgttggatgatgtaattttcagttggattatgcttgttatgatcttattaggtgttctggacagtttggagaagtttggaattgttttgagtgagttatgggattttaggctttttctgctgtagaaacggcagattgtttctgggaaaacggtctactgtttttctaggcagaaaacccagaaaaatagtttgttgtttttacagtggggacctgccatttttttgtgtattttttttcttgaaatctcattttttaatgttttctcgatatttaggttttagtcacgctatttatcgataggaaaatttttaattttaagtctaagtccccaaaaagtgatttagcgtatcacttattagttttgcgtatgttgtgacttaggggcctataaactatcgagcaggaattccactcaggttgacaagtacacttgaattcagaatcgaggtaagattagtataatagcatcatatgtgattacatgtttagcgtgcatgtttgtaaatgcatgttagttaacatatcaataatggtggtattagtgtacatagagttacaataaataccgacgaatatatgtttggcataagcactgattgacgctatcacatcggtaggactagggtactaagtataggctatattatggtcaatagtactatcatacgaacgttctaggctcagtctgtgtgggacatgggatacgattgtaattgggtgtatgggcgtaattgggtgtcctcgccttgggctagacttcattaccccttgttgggctcactttctaggcttttggcgggcatcttctcttttttggccttggacaaggccaagttgtaatagtgacaggcagactgctggtctcccctcacacatgccaccccatgccttgttggaaatttaaggcataagtggtagatagatgttaccgccttcaggtcgttgagggccggtcaacctatcatggcgttgaaagtcgagggaacgtcaatcatgacaaactgtgccatcagtgttctggtagttggattttctccaactgtgaggggtaatatgatatacccgacaggtgcaatgccttggccaaagaagccatacatcacttggatggaaggtgccaagtcggtgagttggagccccatcttttcatatgttgatttgaaaagaatgttagaggaggctccatcgtccaccatacatctatcacttggatggaaggtgccaagtcggtgagttggagccctaacttttcatatgttgatttgaaaagaatgtaagaggaggctccatcgtccaccatacatctttctacgatcatgttcccgatttgtacagtaatgactaagggtcattgtgagggaaactgacatgagcagtatctttttcggtgaaggagatcgtgggctctatgggcttttgctgcttaaagctcctgtcttcgatagctaggatattacttttgggctcgtgacggagtgtccgggcatagcgctccctagccttgctagtctcacctgtagtgtggggtctgccaataatgacccctaagtnnnnnnnnnnnnnnnnnggcattggatctccattctgggcaccgtgtacctgagtttggtcgtcttgtacatagtgacgcaggtggggattgttacgccttgtaaggtatccaatctccctcttcagactttgacactcattggtgtcatggccgaagtcgttgtgatatctgtagaactttgacatgtccgtcttgcccatctcttttttgacaaagaagggctttcggtatgggacggtgttggaaataattttaccaggnnnnnnnnnnnntaccaagtatgtttgattaacatcataatatgaattctaaaacaa

SEQ ID NO: 44713 - DNA, 1799 bp, Cannabis sativa
agttacgtacaaatactgttctaatttttaatgttttatagttgcattacagtcgcataaatattttgttaacagttatttctccgtacatattactattaaagtacaagcaattatcgattagtgacaaaaaaaaatactaacaaatagtttcttacatacacacatttatatttaacatttttagttgcaattaagttgcacgttagttgaataatagttttgctactataatatcatagtattataaaaacaaggctcgcaattgtcaaatatgcaacctgaacagataaaacatgattgttgtaatatttatttgtattaaatatgtagtattattagttgttttgaggttttatattagttggctcgcaacagatataattgttacattacagttgccttgaaagttgatttcttctttcccttcttgttgttgaagttgaaatttttttcaggcaaagacaccttcaacttcttcttcactggacgacgaccacctttagccatgggggagcgaaatcagagtcaatattaccaaaaaacttctagtcggccaaaatacaacccaaataaaaaaaattaaacaaaaacatcttacacaccttcaacccacgatcaatgcttcctgagattgaaaattttgtctgatgcaaccttcggttaaccacccaacaactttcgtctgattgtgtgtgtatacgtgatagtgtaagaggtattttggtaattaaaaatacatataagaggcataaatattgtccacaccttatggatgtatttttgtaaataaagtgtcaatttgtatttttcatgtaataattcattttaattagttacgatatatatttataataaaagatatatttatagaaataatattatttttgatgtaacaattaagttagattgtatacaacataaatgttaatagtttaaattctaccaagagtatttttttaaaaaaaaaatctattaccacctgtttcataaaaaaaaaaaatacgtctctcttactttaaatcttagtccactaggagctactataatttatacacttttataataaataatcgtctaaccttctattttttaaaaaaaacaagtctaactttctatcccaattttattattaattgatattctaattttagttatatttttcacaaacatgtggaagcttacacacaaatattacgcctatattatataaaggcaatttacactccatactaaaattaacatttatttacttttatactgttaatcggtacaattaacttttttaatttttttattgtcttaagttgtcacgttagttacattaagtcttttttttttcttctttgctgcacgttaccttacaccaaatttatttatttttttcatcgtatttaaaatatatggtggagcatcctctcaaatgcccttccgatttgggtggctttacttaaacgatttcatataatggacagtaagtgcccaattagtggtgttgatgaagaatctatcgagcaccttttccttcattgtaacttgcctttctatttatggcgatcttctccctagggtattttccccgttacaggaacaggaattcgtaggtaggactgggtgaaatttttgtggaatctaaaaagcaggaatataaatacagatgaggtttttctttatccctctattgtaattgacacgatttggtggatccgaaatgacaaggtacacaataacagaatggataatgtgatacaatgtattgactctatttctcactcttatgcagattacaaagattctct

SEQ ID NO: 44714 - DNA, 3524 bp, Cannabis sativa
  modified_base (3248)..(3250): a, c, t, g, unknown or other
ataataataataatatttatttatataaaaataaaaaataaaaataaaattgttttgttttgttttgtctggcttttgggcagctactgtttcagatctttgaacattattagttaaggaaaagacttgattgtgatatgcactcgtgccattaattaggacacacttattccaatcttttatttacccatatatatttatatataaaaaaatatttataaaaatattaaaaaaaattataattgatgtagtttttatttgttttaatatttgagagaatatgttttagttttaaaattttaaaaaatttaacataccaaaaatagagttcaagcagtttatttcacacgcgtttaaaataaaagagtttcgcgtgcaataaattattttagcgtgttaattttttttgaatctctcaaaattttacgaatatatttaataaatataacataaatgaccataaaaaaaatagactaaaaaaattctctcaaataccgaaataaatagaaagtgtatcgatagatctattttaagagagggtattgtataagcatccaaatatatttatttatttatatataacaatatatatgtggttgtaaatattagattatatcatattttatgataaattgtataccacaaaatattttgcatgaacatatataccaagagaaaaacattaaaaaattagatgtgtgaatattcaattttatgagagataaataaataataaaaaaattgtaagtaatttatttgaattattcttaacaatttcatttactcatatttctcaaataaataattcattttattttttctagaaaaattagaacatatacttttatagtataaatttgaaaattttagaataattataagtgtttttaaaaataaattattctctattattttatctcaaaaccaattcaagatccgaacatttattaattgatttaagataataacttcaaaaaataatttcaatgtggaatatctttgtaacccatacaaaatcttcattacaaattattttttagggttaatattattttaaattttgtgttttgtaaaaattattaattgaaatatttattttgttaaatgaaaaaatagactatgtattttttaaaatagtataaatatgatactgaatttaatttttgactatttttttaatataaccaacaaaatttacaaatagagaaacatgaataatgttttttttttttgagtagagattctttgataaataattaacaaaagaccttgttttgtttttactaaactaattcctttggactaatctaaaggtcaaattgagtcatccaatataattggtaggagtaagtgccaagcttttaatggtacaaaaataaattaaaatatttaattaatctaaaaaacaaaacaataagtgggcaattgtaatggtaataaaagtagcaaaaaaaaatataaaaaaaattaaataaaaatattggcaatttggcattattctattgcaaaaagataggattaaataaactaattagtgattattagggaggatagcacataaagtggtggtgggtgtgaaggcatctttgagattttgatatatatatatatatatatatataaatatgtatatttataatatgaatatttatttatttatatatataataatatagtcattaatatatatatcatatattctttgtgaggggacaagaagtagcttaaggtgtgttaaagatgaaaaagtaggaatgaataaattttctattattttaagctaaagttttgattatattaaatccttaattaactttctttttcatttgtgagaggtaataaagtttttttcatcttacgtatgatgcatctttttgggtattattattattattattattattaattttttattttttacattctactctctttcttcaccaaaaaataaaaataataaataaataaataaaataatataaatatatctctataatttatgttttgattgtgtcatacttttttgtattatttgctttgtataattactatcttgtacttaacatagttatttttttagttatatagatctctatctcatgcctaaccttttttttttaattttaaaaaaaattctaagtattttttgggtatgattagtctcaagactttacaaaactttattaatacttattatttaagccataattattaaaaatcagttataaagagggaatgtatgtatgcaattagcatgtagtattttatttgttatttttttttaaatgttatttattattttattacccatttaatttaacaatatttaaagttgtaagtaataaaagtgtatataattatatacactatagtctatagaaatataataaattttcaagtgttaaaaaaaaacagtgcaataagatagccacatggtggccctcttcaaattttattttcttttgtattttacttattaattacccttaacaataaattgaagaaaaattataattatgaagttttcttacaaaaattaaaaattcaaaaggccctacaaaatagttcctagttttttttaaggtttgtaattaatttaggctcaattagtcatttaaatagttcctagtttttcatttttccgttataaattaatttttttttttttatatttacagaaattcacataattattcacatagcaactaacgaaataatttaaatcgcaatcaaaatctatatagcaactcacgtaaaaactactagagcaatcgaaaccgtaaatttaaaaaaaaataaaaataaaaaatagtatatagaataatttctatttaaataatttttaaattattgtttcacttaaaaaataatatggaatcttttgtaatttatgacattgttaagatactttattattttttttaagagacaatcaatagatagtaaaagacattatattgttttgtaacttgaaaaatttatttattaaaaagaaactggacaatttcataaatactaagttgcagcaaaataaattattgaaataaaaaaactgtaaaattatcattaaataaattaacacaatattttctaaaatcatacacatttttttgtttaaaagattatttaaagaataatatatatagtttaattttttattgcagcaaaataatgaaaaagaatttgaatttgatatttgtctatttttatgaatacaaatagcgaccacttgaggctagctcaagtgnnnataggtgggtgtgtgttggaggtcctgggttcgagtcctatgtaaaacatggttataatatataaacgcttaaaaaaaaaaaatacaaataggactcaaatagtgcatatattggatttctcaagctacatttatatcaaaaattatgcagggataccacaggagaactgtacactaaaactttattattaaaaaagaaaatataagaaaaatatattaaaattgagagttgtaacttccgactcactaatagaatgcctacaaaataaaaaaa

SEQ ID NO: 44715 - DNA, 1716 bp, Cannabis sativa
  modified_base (1688)..(1690): a, c, t, g, unknown or other
gagtgtgctggtgcgagacgtctgtgggggatggccctcgtattagtattctttatgaaccttggctgattgatgacaataacccttacattgagtcctctagcctgatccttcaaggaaaaataggtaactcgctgatgcaagttgataagttggagtgggatagtgaagttatctccgatgttttaaataacagagataaggagttggtgtggcgtattccactttctacatcaagtaggggagatgattagttttggttgaaagatagccacgaaatgtttactattaagagtgcttatgggttgcaacagagggtaagtaatcgtattaaccaaagctctttatcttgtttttggaagaagatgtggaaactaaaactgcctccaaaggtgcataagtttttatggagattgtgtgtcaattgtcttcctactaggtttcaattgacaaataaacatgtgcaagttaatacatcttgcccgatgtgctctgctgctccagaaactatactacatgtcatggttcggtgcaattttgtgcaatcctactggagacaaacaagagtgtcggttgtggctcatgttgccatgacttttcatgagcttgtttgaggaagggatggcccaatggagcgatgttgaatgtgtggaagctgccatgattctttggtctatgtggaagctgaggaacgatgttggagctcaatatctccctcgacagatgaggttattcacgttgcaaaagtgaattatttggactggtgtaatgctcaacagtttgaaattgagcctcatagtgtgcaccaaatggtttggccatagtggaagctggattgggatcattcttaaatcagattgtttaagggtaataggtgatattcaaagtaataaaaatatggcttcttcttatggccatattattttagaatgtaaggcgttgtttggtgaggttggtaatacctctttaagttttgtgaagtgatctgctaatagggttgcgcgttgtttggcgtgatcctctcttgttgaggttgatcgtgtttttaatagtctttatttacctattgtaatttcatccttggttttggatgatttgaattaatgaagttaccattattatttaaaaaagtaataataataatgaatcgtgattcgtgagtgatagtcacctttcaaattgagagcgatcatgaccatgtacgaaaaagaactagtctaggaggaaagcttcaactttggttggtattgctcattattgctttcctattccaccattatatatatttagaatcacagaagtagatagagtaaaaacatagataaaatcaaaatgggagaaagttgcgcacttaccatagctcttctgaaaatcaacaactggagtgtttactgtgtaataataataggttattaaagagtgttcaaattaatcaaaacaacaattataaattaatatattttttaattgttttatattaaagaaatacaaagaatgaaatttgaaaactaagataactgtcatgtcatcaggtaatagataaaaacaaaaaatattaattttaaaaaaattattaataactataaatatcatccatttgatcaaatctaatggtcaataattaaataatcattcatgggtaatactcattaagagcacacccgttatatatatctttatatattaannntgcctatctaacggcaattcttggtt

SEQ ID NO: 44716 - DNA, 2551 bp, Cannabis sativa
taaagaagcatggaaaatgtgtgagttttcatcaccaaatttagcccaactcaccttagctttttgtgacatgaagctagcaagggccttacttacttcagcaaacttaactcttacttcttgcacctggtgcatgatttctacattttgagggtcttgatttagtttagattgcagctcggccaaagctactcttgtgatggtttctgtctgctgtatttcataaaagccagcttgattaatgtgcttcagtaatgccttcaacttcctcagtttctgcacaatacaaaacattttggttcccctacattcctcgttccaagccctttgttactagtgtatcatattcaagtgcgaacttccacatattgaagtacctaaaaggtttcctcccataactcctatcctcatagatggtcaccaagatagggctatggtcaaagcttagttcaggtaaaaacacagcttcagaacaacgaaaggtattaatctagtgtgagttgaccattgctcgatctattttggagaaaatcctctcttcgggcttttgcttgttattccaggtgaaaaaggatcctgaatatttcaaatctaccatattacaattctccatacaatcccgaaatctctgagatggacagcagtgtgctctcttccctattctttcatctccattcattatctcattaaagtctcccattaacatccatggttcatcgattttctttgccaattcttctaactcagcccataaatcttctctttttctctcttcattgaaggcataaatcattgatacatgaaacttccctgcttgatgctgtgattgcacataacagtgcattacttggctagagcaatattggatatctatagaatatacacttggctaccacgctataactattctacctttatctatcaaggattgttagtagaaaaacaccaaccttggaggagacttgaatacaaaattcccatattcttattttgcacctttgtttctaagaggctaacaaacccaacctatttcgaataaatcaattgcttgatttcattgtgcttatgctggctattaacccctcttacattccaacacaggaatctatccatttgaggaagagggatctccctcccctcttgtgttattctcattcccaatctctgttattcccatctcaatcccaacttcttcaacattcccaggttcttcactaagggactcagacatattcctcactgttgttctctctgattccttcattggagtgacttttttgcctttattgactttctgaaaaccctctccatctatctggttcccttcatcctttgttatcttttttggcatccatacctgttttccagcttctttcttttcttcttttttcctgcactctgatgttttatgtccaattccagaacaattatagcatactaagggcagccattcatacttaacatctaattccacttcatgatcaaactcatcaataaaggaaattttctcaggaaattcttgtgctaagcttacctgaataagaattctggggtattgcaatctatcccgattcttagttacattatcaacttgcagaggttctcccaactggcctacaattttgaacaaagaagtctctccccagtacttgatgtccaggccttttaattgtaccaaagtaggaacattagtaacctcttccttagtgaaatcttcaataggattccagggcttcataaccattggtttgcgatcgaaaaacacgtacccttgttgcagcactttgtccctttgctcgagattctagaatctgataacgaatatgcccttggccagtagtccaaccttcaccacttcatccttccagagtctcctcacgaatccttccagaatgcttattgaagggttagctccaataacatagcagaccaaggatggctgccagtagtttacttcatctgcaatatcatcaaaatcaatcttaattgtcttcttaacctctgccttccctgtatccagacctaatttatcaaacgatgactccaaattcctcacaatgctagatctgagaatcgggggagaaatcctcttcccagtgctaacatcctgagtagctcgatttgcaatcgtgagccagtccgaaaaatcctgtcgattctcactctgtctaatgataagtgcctccgattcctccggtgagaaaattttctcaatgtactgttccattggtttttggcactgttcgattgattcgtcagcttcctcaacttctaattcttgtatccccagtacaacatccatagatctagtcttaatgactctatccaaggatgagggaccagttttcttgcccttcgatttccctttcccggccattttcgctctttttgccatagctccggtgaaacaccgaaagagagagaaggagcgggaaaaggttgctaatcaattttaagttaacgtaaattaacttaacttcttatatatattaagttataagtgaaacagaacagaacaaacgaacgaaaccctcgttctccctctttcgat

SEQ ID NO: 44717 - DNA, 1483 bp, Cannabis sativa
cccccaattggattggacacgtttgatgggcaaattcaattgtttttctgccttacttttaaatttaataaagacatcaaatgcttgggatttaagagtcaaaggataaatccatgtgtatctagtatgatcatctataaagtggatggaatattgataaccctctttagaaaagccttgagaaggaccccaaaggtcagtatgaatcaactctagaggttgtgaggcatgactagtagacataggataaggttgtttgtgactcttgcctttttgacaggcaatacaaaagtgcagatcttttaaggtgccagaatggggaagagtttttaaaattctgcttaatattgcaggtgatgggtgccctagtttttggtgccaaatgttaatatcttggtgtgaagtagtagagaaagcagtaggaaaacaatgtgagatatactcaaaatcatttgcttaataatgttgggtatagtacatgactctactggtatagcagtagatttattacaatcttgaggaatactaggaatactaggaatgctatacaattgagacatagtagcaagattgcattgcaatgcaggggcagaagggttggaatcaccaagcacatagaggccatctttaactggtcccttgagaagaacagctcctgtgagtttgtccttgacaaaacaacaatgtttgtgaaactcaagatagacatcattatcatgtgttagcttagagacactaactaaattcgttttcatggtaggaacattaataatagatcttaagtgtaaaggatgtgaactatgtggggataaaagagtggaccctatgtgagtgatgaataattgcttaccatcaccaacagccaaggactcggttccattgtagggagtgagattgtcaaggttttcatatccatttgtcacatgaacattagctcctgtatcaataaaccagagattatcatcaccaaagtcaggtaaaatagtggtgttatatacttgactgtcattgtccatttccacttcagcaaggtatgcccaaggtgatgcagcacttggtttcaggggaacaaagttcttgtcaaatctgtagttgcacacagcagcagtgtgtccacttttgaggcacaattgacacatcaaacggttctgaaatggaccacgatagccaactctgccaacaattcttgaatatgggtcactggcatttcctcgagcaggtggagggatgtatctgcctgtgttagttcgattattaccaagagccagattggcttgaagcctcatggaagtatcagttatggtgctgtgatgctcaagtcggctctcatgagacatgagaagagcctgaacctcatcaagagataaagaatcacttcttgatgtgattatgaaaatgacaggatcaaattcagcacctagaccattcaaaatctgaagaatcacatcttgatcacagttgtggtgagctttcatttggagaa

SEQ ID NO: 44718 - DNA, 1352 bp, Cannabis sativa
attaggggcgggtccccgcagttatccatccctgcaatataaatttctatctctacttgagggggtgtgttagaactgaaaatggttaaaagatttactctgttatttttcactgtttcatttctcttttactgtacactaagttagttagaggttgttaaagagttagttagttgtttttcttttctgttacaatatacctgtaatgtaatctggttcttcacaaataaatagcaagtctaaagccaactgagttcagttgagcattcttttcacatttcatcttcttccatttctctctctctcaacatagtttttctctttgctccagtactgagttttcagtactcctacaacctaacacagcacacattgtaccaaactcctctaaaagtaaaaccttattatactacatcttactaattgttagtcacatattccatatataaagtatatttgattccaataattgttaggcagcacatgactaatagtaaaaacttagtacacatcttactaagtgttaggcagcacatgactaataatatttttttgctatatatatagatttgaagtggtggattgtaatataatgtgattaacttttgagggagaaagagagaaagattatatatagctattaattaatatgggggaagcaaataagggagtggtgaaacatgtgttcatattgaaaatgaaagaaggattatcagatgaccaaattgaacaaatgaacaaggattatgccaatctcgttaatctagttccatccatgaaagccctacaatggtaaatatatatatatttttctttgattaatatttattctattacttatagttattattaattgactcattatgtttttatttatttggtatataggggaaaattagaggtgaataataagcttggaaatggagggtacactcatatatttgagtctacatttgagagtatggaaggtgtagctgagtatgcagatcatcctgctcatcttcacttaagaaatttgtattttcacacccttgacaaatttctagtttttgactacaaaccaaccatagttttacctaattcctcttaatcatcatcattacccaaaacattattctctttcattggacttatgctattaattattaataatatatttcatatataaatatatgtctttattaattataataaatttagaattattaataaagagtagttcaactctttctatatatattaattgttataatttaagtattgaaatataataaagttttgggatcaaatataataagcttctatatgcaaataagttcttgttaatcaattgttaatctctatattttttg

SEQ ID NO: 44719 - DNA, 2092 bp, Cannabis sativa
atttaaaaaaagtgtattgatcatacatcccatgctgattcgatattcagaaaagaaaaagaatttatttatgatgtgtcctgtaaacttttaaaaaaatacagtatagaaagtagttttcaaatagtttatttcacacttgtataaaataaaagagttacgtgtacaacaaactgtttgaactctgtttttggagtgttaatttttttttttttcaatttcttaaaattttgtaaaatgtcttaaataactgtacacgattataaaaaaaaattaaactaaaaaatctcttgagtgccaaaataaataggagtgcattgttgcatcccttttagaatcgtgcaccatagaattttctaaaaatatgtatgtatatttaaaagtatttttttttcttcgagcccctaaattaggcgggcctagctaggtgtagccctaaccgaccttaaccgtactaactcaacaaactacaagaataaataaaaaataattctttctaactattattattgtagagttttatcgctaatattatttttctttctccctaattaagctataaaaattattgcagatatccctatttaataacattatattcatttttttaaaaaataatttacttatgtggcctaatatatagttgcagtatctatttaactaatttaggctacaatatgaaattaagtttattaacatttaatatattaacattagcttatatatacacatatttttaaaataatttatcgttagaatgttatttatgcacgtattttatgtctaaaatcttaatattgcatcaaattagcttaacattaattaatactacatcaataaattatttaaaaaataaacaaaatacataaccgatcaatttgtaatttagttttttttttttttttaaagaggggggacgaggcgaaaggattagtatattataattataaatttttatataactatgtacattattatataattaatagacctagctctcaccaaaatttgtaaaataataatttattaatacatcgaaaaaaaaaatatttagaaagcatgcctatttttctagtacaatataagttgtttttgatatcctattttcgattaaaataaaattattcatatatagtttttaaaaaattattagtaaaatttttactatatacaatatacattaatattatatatatatatatataatttcttttaactagtgttataacttatctaagtaccagaaatatatactaccctacaaaaatatttcccctaataattttataaataacatcaattattttccatgatatatattttctgataaaggaaaaagatatttttgtcgttgcatatagataaattctataagtacttttatagcgctattggtatatatgtattttaatacatgtgcatgtgatcgatcgagttcattatacatatataataatatacatatatatatatatgtagaagtagtgtgtagactagggcatcaatatcttataacttagagtgtagaatatgtatgtatacttacgtcccaaaatatatttatatataaattaatatatgatccaatcataaaagaaagtgatcaatatatatatatatatataaattagagatcgaattcgattcatatgatgggagactctggagttgatgatcacatcattccttagaggaaaaaaagagaatatgttcgatccatacaactaacaataatatttatcgaattatatatatatatatatatatttatatacataatatagttatatatatagatagattgagactgaaatcttcttaccactaattcatgtctgatcagtgtgcgctgtaaggcatggccaccactgatccaaactctaatatgtaataattaaaattaaaattattgaccaatatgtaataattaacatgataattaacgattaattaaccactaataattataaatataaatttttaataaattttgattgatcaaaattgcgatatattgatcattttcagttaagtacttgatcggttaataataattgtttgttgtttatatctctataataataataataat

SEQ ID NO: 44720 - DNA, 1667 bp, Cannabis sativa
  modified_base (593)..(608): a, c, t, g, unknown or other
aattgcggtaattactatggatcaatcaggtacggatatacttaattatcatatattattattgtgttttatattatatataaataaatcttgggttttattgtcaatttatctaacaaaaaaaacatgtacaatctaagtgtgcatctttgcatttttttaaatttatttaattggctatgagttcacattcagttacaaaaacaataacattaatgtcatatactaatcaccaagtttcaaatattctaatataaaataataaatttgtagttcagtttatattatattgaaattaaaagaaaaagaaatgggaaaacaatttaagcaaacatccaattgcaagttttctattctacaataaatttccttaatgagtgaaatatataagaataataataataagtagtagaagaagaaaatttgcattaacaagttcataaacaaataataaggtcattttcatcaacggaatatttaagcaattaaagatttcatctacgtatacaatctagcaatgtattaatatataagaaaatactaaaggagcactagaactattaagcaccataagataataataataataatannnnnnnnnnnnnnnntaataataataataatagtaggtgcatttactaatacttttataattagttattttgttttttaaattaaaaagtaaaaatatttttcaaaattatattctataaaattatttttactttttaatttttcaattggaaataaaaaatttgaaaacaaaataaataacttccaatttttttttaaacagttttgttttcttaatcaatattttggttctaaacctaacctacatcttgaaatccagactcgaatcccgacctcgacctcagacccaaacctgaatcccaaacttggatgttgacccggatcctgacctgtaccccagactcggactcgaattccaaccccagactttaaccctaaatttggaccccgacccgaatcttgaccctagacacggacccagaccttgaacagcttctgtgcctaaccccagcccttgaaccaaaatcccgaacccaaacccagaccttgacctcaatcccaacccggacctcaaccttagacacgaacccagactcgaatctcaacttccgacctgactttatataatatcaaaaataaaaataaaagtaaaatttacaatttacacttttatttttaaaaaaattataaaacgtatttttatttattacaaatttaagtacaaaaaatgtacttatttttataattaacaaatctaaaaacaaaaatattaacaagcgtcaccctacaaaaaaaaaataacttaattcaatccggtggtggaagtgtgggagagtcacaaataattatccattgagatttaatatcttccacataaatatcaattactttttaaaaaataaataagttaaaataataaaaaggacatggaaaaagaaagtgccgcgtgtcaaagaactcgtttgttctcagccacaaattctatacgtcccttctcaactttccaatccattactcttttttaaattaaaaaatttaaaataaataatggaatttcagacgtggcatcccctcccatccttttgttccttccgctcatttcttcaaatttctctgcttcttttttctttctc

SEQ ID NO: 44721 - DNA, 925 bp, Cannabis sativa
ttttttttttttttttgtaaggtcatttcagttatttttcttccttaattaactggaaactaaattaataaacaaacaaacaaacagcttaatgtttctaaaactttgaggaaaaatctatagtacattcttcaaaaagattgttttggtatatttttataggtttctttggttacttgtcataggtatatgaaaaaaaaaattatcccttagcaaaatatttgttaattttcagataatcttaaataattaaagatacatgattattgaaaaaaaaaatgacaaataattattctgaatgtctaaacaaataaataatgtactataagatgactcttttaaaaggtgtattataaaattgcctaaaaatttaattcataatcaaaacaggttatacaaatattgaacaactaatctattaataattatataattaatttactctactcccaccctgaaaaatcacctgttctctcccctaaatataaatctttttggtattagaagttataaaataataatatataatctgattgattggattattaaagggataaatataattgtaggaaaatttatcactttagttgaaagaaaaattacttttaaattatcaatatgttaaatttattatataaagattaaaagaaatatttaataaaaaactacctttttcttaaaaagaattaaaaaataattctttatggggtaatcttatttttaggggttacaattttttcaaatttaacacagaaaattttcatgcaaaatatcagatgtgaaaaattacaaactctcataaaaatattacactctatcaaagagttcctgaaagtaatgttatttgtttcaataatttggagttacccaacactatctgagtggtcagatatacatatagaggctttacaggcctccgattagt

SEQ ID NO: 44722 - DNA, 3271 bp, Cannabis sativa
tttgcatcagctgtgcagttagatgtggcaccagagtctggataccaggcagggtcattgacaatgttagttgtggcaatgttagcagattgcctatctatgttagcagtaccaactcctggaaaatcaaggttgaattgctaataataacgagaagcaatatgaccaacttttgagcaaagttgacaaacagaataattgtttgcagctgatgctgaaggagtattcatggagaattgaggaggtgcacttctgccgaaaccagggggaggagctgctggtgtgttggagaaattttctctaggattgatagcataaggattccaagatccacgaggaggtggagaaggattcgactggcgaccataaccagaacctcgtccacaattgggtctatttgttgcaagattgacagaatcaagctctttggagtgactgtccattcgatgttcttaagaaagaagcaaagattcaatttctgcaatagtgtaaggaacatttctgaaatttacagagatgacaaaagtgtcgtaatcggagggaaaacctttgaagatagcaactatatgctctttcacagtcacaacatggccaactgagcataatcgatcgacaatagtctttatacgcaacagatagtcattcattgacagtgaacttttcttgatattctgcagctaagtaacaaatttatctatcttggcagaagtttgagtaacataatagatttcaagagtattccatacctgagcagatgtttcacagccaacaacacgcgttagaattccttcagacatagatgagagaagttgatcttgaatctcccattgaacaaactgaggattgatgagaccagcttcttcatcacggtcagagagaaatttctgtggaggtgtgaagttgggggatatgaagttgagtagttgatgacctttgtctgcagaaacaatttgaggacgccatagtagaaagttttcattatcaagcttgatggagagtttgtttgagaaaacaacagaattatttgcagctaaagccatggatgcggaagtgaagcttgactcacaaacgaatgatcagagaaaaaaaaacaggcactaatatcatgtgaggaataacagaacagagagaaaaggatagagagaatttgagctaaatgattttctgtatattattaaatgagtaataactcaatatatatacaagcctagaagacagtttacaaagctaacaaacaacaataaaatacagctgtacagtaactaacttaggcaaaagaaataacagaaatagcaaactaagtaatagttctaacaattaaagcattattctctagctttcccagagcatctctttttacttaattcgcaatgttaatgttatggcccatagattggtttagcatgcgcttagaatagacaataaatttttttagacggaaggaatttcttcatgactaagatcctgtgatttatttgcggtttaatttgttgtaatttttaattgatgcccaacaagtagtgaatgtttcaaagaattaattattaatttatttatagttttagtagtatttgatcattaagaacaaaacagtaatttattcttctgtttgaaagtcaataaataaataaatatatatatatatatatagtatacatatatataattaagaacatcaagtgaaaccttgattaaacgaaaatggctcagcaccatctatataacttgaacttttgatgatgagtagaaacaaattaagtactatcaagaagatcgattacataaacgagtagaacaaaaagaacagcaaataaaatcaaacaaaagaaaattatattaaacaacatttaccagattctcttagcacaggaagacgctgagagaatcaagcaagaacgtacgtatgtatgtacacatacatacatacaatttaattaagcattgttcaaagtaaataaatatccatcccaaatccatccaacattataaacatcgatatgatcgcgatacataacgtatttgagttgggcatcgaaagacaatctagtagttacagatggatgaatagtaaaattcttctgagtttctagataaattctatgaacaccttgaacaactccagttgtatacacatcccatgtatttgcttcgtaatcacttgtcttaatggtcacaccttctcccttacttggaccaagtaacttacctataaatttcttctcattagctaaaacatttattgtcacaactccatcaggattagtgtagctaactgtacaagattcgcctgttttattttccacatagtaacaaactcggaaaatatcagtatctgctgaagacattatatctatcaatctatatatatataaatatgtaaactcgattcattataatggagctttgattacaacatatatatatatagaaaacatggaaagcaataactaattaagccaagagcaacttgttgtatattataggcttaatagtatttatatatataatatcagtctattattggtttatcaataattaatgtaacatataagactttttctttaatatttaaatacaaggtatcagtaatatttcagttttaataatcacaatatgtggctcaaactatgtacaataactctttttagaacgaatcactttaactacagaggattaatgatattacgtactactaataactcttgtgaatttcaactaatctcctcccacaaatatacatatattatgatctcaacaatgttcacggggtaaaagtactatttttaacagtaaaaacgacgtttatattaattgttagaatttggaataaggtaaatgaggttccatcttaaaaccaattggtggctattttatatgctcaccatctaggacagctcgatcataagcgactcttttttggttcactatccctaatcacaagtggctcttttgctctactttttggatcagttttttagatttttggtggctctttcttttttagctcactaatcccgaatcacaagtgacattttttgacttttggctattcgatcaattttttttttttttgcattttttgtggctcctttttttttgaacttcgatcagttttttttttgggccggatagtcactagagattttttttttctttgtttttctctgatatcatgttagaatttgagataaggtgaatggggttccatctcaaaatcaattggctatgagaggaatagtccattcctcttatatattttattatctttcca

SEQ ID NO: 44723 - DNA, 2168 bp, Cannabis sativa
cttaagttatcgatttgcacaagggattaaccattattcttctaatcgcagaatctcaatatcgatgatcaatcccaattcacaaaaggaaacccaaaccccaatctcgatgatgaagaacgagctgcacaatggaataaccatgaatgaattgaaacctccttttcagttttagaatatgtaaaatccatcgcccacacacctagatctcatccatccttcttaaaatgcctccttttgagggtttagcatctcctccgtacatttcagagtctaacatagtcaccatttatgtgggtggccatctcttttagacaacaaagcaaacccttgctctcgccggacctaactccctcttcggtagaatctccgattcatcttcccattaaggtgttttgttcgttgatcgagaccccgactttcggaaccgacggcaaggtcaaactgaaggaatctgtgctaatgtggacctcgatttggacggaattcaaattcagcttcgtgcttgattggcaggcatggatcttactacttaacgagttaggttgtgtacattagtatttctattacttgactctgttactaattttattactcataggtaatgggttgcctatcagtactaatatcctccatatctttgtattaagtattatagtatttgcaggtgtacttgcattaatggtaccgaatataacaagaatgacttttctttgactttattttttgtttaggcacctccatcaagtcattgctatgctgattatttatttattattgtttttttcatttatgaaaaactattttatgtatggatgaatgtatgagaatagtattgatgtgagcaattgaaggttcaatggcattgataattgcaatagagcaatcatgcttcttggccaacaaccttagacattcttaacagtaagtttatgatttttttttgtcttattttctttttcctttttgaatttaattttctttctaattgagttttcaatatctatttaagacaggtaaaatttattaatgcaaaaaataatttgttcggagattgcttagttgacatgaaagattggggtccttatttttgctctgctcttaatgttcttggcatgattattgttgtcatgctgaactccgtcatattaattttatagagataattgtacttgggaaggtatgcagtcttcaaacttgatgctattaatgctaagagtctgtataattaataaaatgatttcattttgttattgatgctaaatgaatatggaaaatgggttcagttaaaggtttaaagaaagttaggaagatagtgaaagattgcatccaaaataaaatgcatcctgtgtaccatattaaggtacatattttggtaattttacttatatattgtcgacttttcatactcaacatcttgcttctcattttgtagatattgatgatgaggaaagagcttgaaaaagagcatgctcttgcaaataacatttcaatattaaatttatttacaattttataattatattaaaattgattttaatacattaaaataacatttagaatctaaatattttttttttcaaattaaacgcaagtattccctaaacaaaaattatagacgaatctaaaagtatgccgaaacttcaaataaaatttacattacgtgacatggcacgtaaaattcacctagtatatatatatgtgaatatgtaatatatggttggtgtctatacacatcctcgatccacaacttatgtgcatatcatgtataaatcataccaatcccatggcttgataataatgacgagaccttttgtgcatatgatcattttttatatgaataataacatttatggatatatatatatatatgtatagtcactgatcacctatttttttacagagagaattttcaccattaattatcacaccaacaaattgaatttgattaggatatactcgactgaacctacatctttttttttagtgtgcagtaagtaatcaatcaacttccttatattactctcatttctttggtatgagaatctacaccttatgataattttgatggtataataatttctttaaatcttatattcttctctttggttatgtatcacatgtcgacttattttcagaagtctagtgaactaaaagaaaatcatagg

SEQ ID NO: 44724 - DNA, 3691 bp, Cannabis sativa
tgttcttttattaattagtaaatctgattattgaattgagttttatttaggacacaaaatctaacacatatatctactaccatacaaggtataaaaaagtaataactaaaccaaagaaaccactaaaattcaggttcaacataatcttcaaaacggatcgtaataaaaataaaattaaataataaaaaaacttctctaatacatcataaactaaaaagttcaaacggttataaagtagctttaaaaaggcatttgtgccaggaagagacattcaagacaataatgtaattgctcaaaaaattattcataccttcaaccgaaaaaaaggaagagaggggttctttttcatcaaaattgaccttactaaagcttatgataagcttagttggtagtttgtggatcacgtgttgagttattttggggtcccgacttaattctgcaattggatctctcaatgcattacaactaccactcttaacatctgtctaaatgggggccaagtgggcagaatcatccttcctgtggcattcatcagggagatcctttgttgccttacctgtgtcatttgggctataaaaatcctttttagacttattcaggatgctctaaaacatggtactattaaggggatcaaattttcccaagggggaccaaccatgtctcatatctttttcgcggatgatcttatcctggctggaaaagctacagtaggggaagctagaggtatgtggaattgtttatagaagtgttgtgattggtcggggcagtgtatcaacaaacttaaaacctctatcttctttagcaagaatacctctgagaacttgaaagtggaaattaaaaattccatggcaatcggtggtcctgaaggcataaccaagtatcttggcctccccctgttccagtctagacaaaaggatgtgaaatttaatttatcttggaaaacctgactactacgcttcaaggctggaaagcgaagacgttatccaaggtaggtcgtgctaccctcataaaattagtgggattggctatgcctatttatgccatgcaaaccacaaagctttctaagcgtctaatttctaggattgatggtttggtgcatgatttttggtggggttttaaaaaatgtaatcatgggatccacttgaaggcttgggacaaattgtgcctccctaaatctcggagtgaccttggattcagaaaaactaaagaaatgaatcaagccttcttggctaagtggggttagaagcttctaacaggatgtcagtcgctttgttgcaacattctaatcctcaagtgcaaagccaaagcaacagattcatggttttggaaaagtgttataaaagctaatgagattcttaggaagggggcctgtaaagtaatcatcaatggcaaagacactgaaatttgggaggacccttgggtcactcatggccaagtgttctacccaaagttgactgataacccaccttctaagttcattatggtttatgaggttttgactgcttctggtgactaggacacccatactatgcaacatctctttgatcatgagaccgtttcagccatcttgaatgggggcaaaccttcaggccatggaaatgatcattggatttggactaaggagggaagtggtcagttcgcgagtaagtcaacttacttaatccaagtgctgcaacgatctccccattgtgaggttgccccttcactttggaacaaattatggaatagtaggatccctaaatggcacaaagctatgtggtggagtgttctttcaaatgctcttccaacaagggcagtctacttcaaaagatttaatattactaacaacacctgccctatttgtggagaagaggaggaatccattgagcacctcttcctccactgtaacctggctttccatctttggcgatcctccccgtggggtatcttcccaatcattggtactagtattcgtatgtgggattgggtcaaatttttatagagcctaaaaagcaaaggcataaatgaagacgaggtctttctttatgcatccattgttatcgatacgatttggagggtgcagaatgacaaggttcataatgataggatggataatgagtcagtgtattaactatgtttctcattcttatgtagattataaagattccattatcccttccccttccctgaccccctgccccactatttagtgccctccctcttaagactggatcaagttaaattgcgatgttagagttggaggggagcacatgtgcattgcagttgtggctagagacaccaagagcaaggtgttttggattcattcaacaaaactggaattttctgatgctcttcgaggtgaagatgtcgctgtttgtttggtgcttgaagtggcgaaggattacagccacaagtttatctcggtggaaagcgattctaaggtagcaatcaactccttcaacgatattgatcctagatgggagtttgagaactattcattattttgtaaaagagtcatctcttcctttattggttgtttattttgtattactgctagaaattgtaattttatggctcataatgtggccaagtgggtgtttgcccataacctatttgggcgacttgatatctcgtctattcctatgaacttcttttgtaatgactgcgatgtctaagctttaattaattaaatgtctttttttaaaaaaaaaaaagcttaaaaaaagaaatactttagaaaagaaataacaaattattataatagttgaaatcaaaaaatataattataattaaaataaataataaaattcaaccctaaaaacaaaaggtcaaaacggctaaaaacaagaattaaaaatcccaatatgactaaaaattactaataacagaatattaagttactgaaatacttaaatgaaatacaaattaagccaatgttgatctcataaaaaatagctcaacgaataaattaaaataagtgcactaaaaaacaaaaacttacataacaataatcttaatacgtattaagattaaattattagaataatattataataagaaatactacaatgatccactttctttgagtctaaattgcccttccaattttatgagctcatctcacaatttagatccactttgatcactttattcttgctatgacaagaaataacacaaaatagtgtaactctcataattcacttttcttatctcataaaatgatatgattgtcactaaaataaaatttcatttccaagtaattatctttaatcacaatatagtttcatatagtaataataatagaatgaacacatttttcttatcatcatctcaattatcataccacatagtgcatatattaagataatttatacacatatattaatacataaaattaatatataactcccataaaattattactctcaaataattttatgttaatcaatattgtatgtatgttactatacaatcatatacaagatacacaaaatatcaatactaattcacaattatatatacatattacatttcataaattaatatacacaatatatataatatacgtataatatatattaacgcggattttcgttaactgtatttaaacttatttcgtgattgatttatacaaaaataataatattaaaagaagaagaaataatacaaagcttttttacgtggttttgcagttaaaattctgcgtagtcca

SEQ ID NO: 44725 - DNA, 1631 bp, Cannabis sativa
  modified_base (311)..(312): a, c, t, g, unknown or other
taattattgtaaattacataaatgcccttaataaatattattattaaaaaataattacagagataaaatagtaattttgtaaattaataattatctatcattcaatcgctccatataaaggggaattacctcatatgctgttttttaatttttttttcaaatttatggtttgttttctgaagtggttgtagcgctagttgcaataagagtttctatacgattttttgttgcaatttaggttacaacgctagttgcaatagaagtttctatgtaaaatttcgtaaaaatacaaaaaaaaaattattttgaanngtaaaaataaaaaagaccctaatataaaaggatcattactctcctctcccttgcttatatatatccatctaactctccttccttcctaccaaacatagactagtgatgaaaatttgacccacagtatgagttccaaatgggatggggattactcttttttatatacttgaatcgagttctgggtaggattgtagtgatacatcacactctaaattctagtcacatatataattttcaaattttctatatagttttcttttaattattacgtattaaagttattaattatacttacaaagtttgactattaatcttataataaatgtcttttaataagttgaatgtttctttattttaaaattaatatcttattttttttattttaatttaaattactttacattattttcttattattattatttttattataatagctacctaatgggtcctcatacctaatggggatttccctatcccgaacccatcggggcaaaaatagagacataaatgagaaacacaaacgagattgagagatacattacttgtttattacccatttaattttcttcatatatatgtttaagaaaaggaaacaaaggtctataattatttgtgtgctaggttaatgttcttaattaatattattttgaattttatattaggtaaaagtaatagattagactttataaatatttttttaaaatagtacaaaattaattctaaacttatttttcattatttttatttaatacaactaatatttaatactaacatatataaaaaaatataattattcttgtcataatacttaattaaatttaagattcattttgtactatttaaaaaaatataaaatctaaattattatttaataaaataaaaaattcaattaataatatttacaaaatacaatacctaaaataatatttttggtattattttgagtgcaaggttgttttataagctatttacaaccccctttgctgccttgattttgggtttgttatcttcaatcttaaacatcattctccttatattaaatgcacaacagcacaagtgtgtctcatatttttattgttggtgtaatggttggataattttctaaattggatatttttctttttaattcaacatacaagatgacatatcattttttatatatacaatttagttgagaaaataatgataagaatgacatgtgtagaaagttgagtttccaatttggatttggagtgttactcttggaagcttgcgttggtgtttgttattgctttaaacttacaacttttctcttttcggatgattaacaaatagaa

SEQ ID NO: 44726 - DNA, 1424 bp, Cannabis sativa
ggttgtctttattaagattaggagtgtaaatataacttttctcttatttttacatctatctatataattatatgtgaatttatactataatttatttctcacatatattaatattttgacaataatcttatttcttatctaatacgcctttgtatattaaagattcttaataatatttttatcatttattttaatttaattaatgatggcagtagatacataatgtgcagtatttttttaaatgatatttatttaaataaataaatatgagttttacatattctttttaagtgcaaggtgaaagtgcaataatctatttatcttaatatttatataaatagtaaaaatattgatttcgacgattcttttctttcaattttttttttctaattgttttgataatgttttgatctttatgatatggtgatgatattaattttgaatataatgagattagtgaaatacggtgttgacaaagaatttgaatgtaatgacgatttaagtgagatccgataatgacttttaatgtagtggtaattttttctattatttgttttgataatgtttggtcaatcttcgatatggtgatgacattaattttgaatattatagtgggattacaaacacagtgttaacaaagaatttgaatgtagtggcgaccataagtgagatttagtaatgataattaatgacttttaatgtagtggtaactacagtgagatacaatattgatgataactactttgaatatgagaattgctaaagggcactactggtgactagcaccctccttagtgtcataccgctattggtataattaaatagcaagtcccatataacttaagaaaataaattttaaaaaatatcgttaactaagcataaggtgacacctatggaaagtgctggacaccactgatacccaataacaatcctcttcgaatatagtacaagagagaaatacacgactttaaatactttttttgtcttgcaatttacataactagatataatttttgccataaatatattataacatttttaattatatgacataaattttgtggtgtatacacgtttctaataacccacaaataattttttagtttttgaaaatttaattttttactcgatcaatcaattaaataaatttttttgtttgatgtgtttgttattgtaaattgttatataaaaaacaaatattatttgagttaattagatttaatagatattaattacaaatatttaagatatataatttaatatttatgataaatatcaattgaaactatctaatatacatctaatataaatctaatttaaacactaattcattttttttaataattatagtaatttaaatattttaaaatttaaattcatgttttcatttttaaattttcataatattttattcattaataata

SEQ ID NO: 44727 - DNA, 1640 bp, Cannabis sativa
tctgttaattgaagttgctgtggagctatgcacatggcaaagttcaccctaggttgcgagccagtggtgggatcactcacgccctccaaaaagagagattacaaggtcaccaacaggcttcaagagggcaagcgccccctctacgccgttgtttttaacttcattgatgctcgctacttcaacgtctttgctaccgtcggaggcaatcgggtaacaactataatatccattgacttgtatggagagttgttaataattgatgtttatattggaactctaatgttgaactgtagtgagccttaaattcttgtccttagaacgatgaatgttttttttaaaaaaagggatttttaacttgtatgcatttgaaggttttgttttgtttacttttctgtattctaaatagcctaatactaattcttaattctctcaggtgacagtttaccaatgtctagaaggaggtgttatagctgtattgcagtcttacattgatgatgatgtgagttgttaaagccatagtttattcatcttacaagaaattactgcgtatttgacttcaatatactttgtagatcagaaggatgagtctttttacactgtgagctgggcatgcaataaagatgggatgccccttgttgtggccgggggtatcaatggtataatccgtatcattgatgctggcactgagaagatacataaggtaccacctgagcttcggcttttatgtttttattcataaaatacatgctcgggctgttcataatttttactcttactggtatgcagagttttgttggccatggcgactcaataaatgaaataagaacccagccgctaagaccatcacttatagtgtcagcaagtaaagtgagtgcgaattttctgttatttaaggttttgtttgtatgacttatctatcaatgtttcaaatggagcaggatgagtcagttcggttatggaatgtagaaactggaatatgtgttctgatattcgcgggagctgggggtcaccgcaatgaggttttgagtgtggtatgtgactatagaacagaatgtcttcctgctctcttttctttctccatttacacatatatttaattcgagattttctggttatatgatataatgagcttttaagatctcaactgcactgacagtgacactattatctaatactataggactttcatccttcagacatgtatcgaattgcgagttgtggcatggacaatacagtcaagatttggtcaatgaaaggtaggatatgaaaaagttactaagaaggtagtgttttttggaaaataaaataatgaatcgtgaaacaaaaaggtttagctttaaaagttttcttttatttttgagggtgaaagattacgaacactgacaaaagcaacaacattaaaaatcgtaggactataaaattatcccgcagagtcacaagtttccttctccttgttgataccgtgccacatgttctttagatatccattgatttctttttgaccattgagcgagcgagccatcagacgagagttaaacttcaaaagttaatgacattattattatcattacatgttttgacaagtactatttgtgttttgctgctcatatttcttccagagttctggacatacgtagaga

SEQ ID NO: 44728 - DNA, 1039 bp, Cannabis sativa
acagagtttgtctaacttacctttcccccacaagattaaacatcctagtaataagggcttcttcatcttctgaaaaatcaagcttaaattctaatttgctactttcctctgccaaacaaaaagagaaagaaagataaagagcacacatgaacatgaacaccaacaaaacccttttttttttttttaaaggagaaagatatccattagaaaatgaaaacattgggattcaaatgtagagagtattggagattacaataaccagaaaagaaagcatttttgaatggaaaagctgtaaatttaaattgggttacctgttgaattaacggaagaataagaagaggagactgatgaggagtgagtcatctcagccatatgggagaattgaaaaacaaaaacagagaggatagagagtaacaaaaccaattaacatctaagtataaataggagatgtgataagaaagagacagtggcccttctggtctgggataagaacgaaggaattatagttatgagagagagagagagaaatttagtagaggaatggtagttgaggggtgggttttttctacaccaacgttgataggttgttgaaccttcaaaatcaaattgtttggtggtactttagtttttcacaaggacaaatatcgagtaacatgttgagtttagggtcctaaattatctaaataaattgaatgtttttttttatcatttggtaattttaggttgttattttgttaatcacttttttgtatgaagttcacctcggtaatatagattgactgaaacatcaagtagtttctttagtcttaccaaccaaaaaataaatgtgtgcacataaatttgggtgtccacttatcattacttacaaatcaattagttaatgaaaagagccaaacattccgttgacaaacaatcaattaattattagagaactaggaaactaagccgcgcttcgcgcggatttgaccctagttttgtattttttttttttgactaatttaattgtattataaaaaaaatgtaatattttaatgtgtgt

SEQ ID NO: 44729 - DNA, 1138 bp, Cannabis sativa
ataggtgtaataatacgaacttggttgacagagggagggatagtagcaaaagagagaatgttttgaagcttcttgcaagtgaaattgctaacaccaatggacttagtgagaccaagtttctgacattcttccatggctgtccacacagacttgaagtccattggcataagatccttttcattaatgggaaatacaggcccccctggctttgcacttacgggccagtgaatcagatacaaatcaaggtactctagctgaagtttcctaattataattatcaacaacaagaagaaaataaattaaaagaaacaacaataggtgatatatatatataatagttttaaagtgaaaactgagttacccaagtgatgttttaagagaaggaagaacgagatgagggtggctatcagtaatccaaagcttggaagtgatgaagagttcatctcgagaagcaacaaggccaagttttagagcttctgctatggcttccccgagaccctgttctgatccatatgcagaggcggtgtcgaagtgtgtgtagccaagcttaatagcttccaagactgcatttttaaggagaattgggtctttgtcgtttgaagctgttccaagaccaagtacagggatggtcttgaggccggcggaagaacccagaagcagctttggaatagtggtcgatgccattattttttgctttctttacttttctgtgggttccctcaaatttctttagctgagccaattgagttggtctttataaagttctctctctctcttttttttttaaagattattattttttttaagggaagtggtcttaccaagtcaaataaaaattgagaaatgctaaaggtaccagacgtgttattattgtaacgaggaggactaatgacactctctatcacatcctcttttgcactctctagttaatttaatgacaaatgtcatcttttcaacaagacttaattttacttaataactagtcataatattatacttttatttcaactatgtcattcccattaatttactcaaataatctttaatttattgaaaattaaatattttaaagaaagtaatgataaaaataaataaatagataagcacaatacacatatataagttttttattgttaca

SEQ ID NO: 44730 - DNA, 1169 bp, Cannabis sativa
ttttctttattgaaacaatgtccgaacaaataaattccttgttagaaaaataataaattatattaaatattgagaaaatgattctataatatttacaaagaataactaagtggttcaaaaaatgaaaagaatataatgaagaaaagtgagtgttgaaaaaatgttacaaatattaatgaagaaaataataaatgaaaagaataaagttgaagaaggcagttcaaggttttgttgtgtgcatgaaaaattgaagcttattatatgttatggctttgatgtagctgaaaactggtctctcaggaacaggtatgcacttcacaatccaaccaattggccaagacatggcggcgagtccaacacacgcgccccattgtccccagttcaacctctctgtgtcagcaaacttcttcaaaaactcaaccatcaacacttgaagaacaatggtaatggcgatgatggccaagaacagtttgttcctgtgaattcctttgaacacgttcttcttctctagcttcctagcattgaactcattgaaaacttggcagagaacaaaagtgttgaagatcagagtgtctttcactttctcgttgacgttgaatatcaatttgcctctgaattgtagtgtaagaagaatagatatttgataaaatgcttgactcaagagatttctccacatgatgttggtaatgagcggcgctgttcgacccacaggtggattttccatgagttcatctgtgggcttctctgtggccaaagccaaagctcctaaggtgtccatgatcaagttcacccataatagttgaacagctgttaatggaacctctcctgctgagattgcagccacaaagttgatcacaagtgcagccacattcactgtcagctggaattggatgaacttttggatgttgttgtaaacgcatctaccccatttcagaacagttgccactgaagcgaaattgtcatccaaaataacgatatcggagctttctttggccacttcggtcccttggattcccattgagagtccgatatcggcttctttcaatgctggagcatcatttgtgccatctcctgtgactgctacaacatgacctttttgtttcaagcattgtaccattaagagtttatcgaaaggggacgatctcgccatgacgcagattttgtcaact

SEQ ID NO: 44731 - DNA, 1151 bp, Cannabis sativa
aatgaattgagctgaatgaattctgttattaacaaatgagcagtatatatacaagtttaaagatagttacaagctaacaaaacacaaagatagatagctaactaataactaactaaggaagtataaatgattgaaatagcagactcataatgagtctctaacaacagagctaaacccatttacatatggtacgtacctaaagttttttgttaaacaaatctaaaacagaatcatagaacaatcaccctttatgaaaagatgaaaatcacgacccaacccattttgagttaattgggtctaaaaaagatcaaaactttgatgatcaacgtccctattatgaccatataaaaaaaccctacccaaaataaaaaacctagccctaatagaataacccaatttttcaaaatcgaaaataaattaaaaccttgcaaaataccttgaataaatcaaaattttgtctagtataatatgttagggctcctcgtcgacgatgatcactctcttcgcctttggtatagatgaagtgatgagaatctttttggtttgactcgttttgccctttcttgtaaatgaaggctctttcctgtagatgaagtagagagaaatgataaaaatggaaggagaatacatgtggaatagatgaagctcaattacttcaactgcacgaaaaataataaaagatgacaaaaattaaattcaagtacaaattaaaatcggaaacctaatgtactctttttatccttcattttataaattaatattataaagtaatttattgagacatgcaatgagcccttaaattttataatatgtcaatttaatggctacaattatcacaagactggtctatgcccaagtagggatgcacacagggtgagaaattagcggggaatgctctcccattcacatccccattaagaatttttatctccatccccgcttattctccatcaagaatgggatggaaattccctaatggggacaaggattgggcggggaatcccttaattaaaaaaataaaaatttataaatttaaatatacaaaagtattaaaatacataaaaaattaaaatattacacattaattattattcaataaattaattattatctaaaacacaacttaaaattcatataaaggatactaatat

SEQ ID NO: 44732 - DNA, 1028 bp, Cannabis sativa
aacaacaacaacaaatgggggaactaaatccatattgttgtaacagtaaaaacaaaactaatttcaattctctgctaatgaaaatatacatgtttccaaatctaaatctctccatattaggaagagattagctacatatgatatatcattccaaaaataatactacatatatccccttacactattttcaagaagaaccataggaaagttgttaatggagtggtatgaggtaaaaaataatattgctgtacatatatccacaatacaaaatctaagtgtgcttagtttttaatgataccatacatttaaaaataaattagattataaacaaaagtaaaaactccgcataatttaaaaaaaattaaataattaatccaatagaaaattaattttcattccactaacattcgcttattacaattgagactcaacatatcaaactcaaaacactatcaaactaaattctaacttttcttccataattaatgttaaatcttttttaacaatgaaaattcacgaaaacaattatttctatgaaaatattaaatcatttttaatattaaatcgtttttaacgctggtcaaatttcatgaaggttagaaaattaatgaaaattgcattgtgattatataggtttttcactatgtgaaaaataaaacaaacacataatgtgggactaacataatatactcttccttcatttttccaacctatataacttatactattggagaatgaaaatataatttggaaacataatgagaatgagatttatggttatagggtgtctttcattgctagagatttctcccgtgtgtgagatgttgggaaaccgactgtgagactttctttctcttcttgtgagatttctttcgtttgttactgagagcttgccattgtattatggatatggaggataacgagatagtacagaatgaggatagcaacctggaagaattgcgtctacagttcattgaggaggctactttggagcttgaggcagattttgagattaacaatgaagttgc

SEQ ID NO: 44733 - DNA, 1397 bp, Cannabis sativa
tttgaaattttcatattttggagtggatttaatcactagtagactttgcaattttaataatgatgaaaaaaaatggtggaaggatatatggtgatttcaaagttgggacaaataacttgaaattattaataaaccaagattttcatttgaattatagtagctagctagataggtcatagttgagtataacttgaccaatggacaaaagaaccatatgtactataaagaccaatgtttttgtttttgtttttgtttttgttttttggtagggaaagaagtgcactcaaaaattccaattgtacaatttagggcatgagttattagggttttttttcttttattttctttttctttgtactcttgatatgcaaaatattcgatgtagaggtatccaatataatttaacaactatttaattatcatgggtaaaatatgatttttaagattgaatagcaagcgggttgattggatttcaagtttgcgggtttcgggcctaaaaattagaacccaaattcatccgttcaaagaattcgggctcacaagtttgtgggtccacgagtttgggttgatcgttgacccgacaaattcggtcaactctcggtcaacatttttgtttttttatcaaccaaaattctttagagaaaaaaaaacatttgtaatccaaaatagaaatataaattcaataatccaaaaccaaataaatcattcatcaaacttatactctttgttcataaaaatcatgaatgatgaacataataataaaaactaaaagtatcaaaataaattgagactaaaaatttatagtccatacattctgtactagctattgtctaccataaaattgtttaaattaaaaaaagtatttataaatttaatttccatatgatttaaagcataagtctttttaaaataatgattatagtatatatagtatacacatacatatgctattaacacgaacttttgtcaacttattctaagaagataattaattagagaataaactcaaaaaatgaagatgaaaattaaaatatatgaacatcatatatttttatttatggttttgtagttaaatctacatagtccacaagttaatattaatttagtcgtgtttacaatttaggagagtttctgtaaatcaaaattgcctatcttcttccctttgtgtgaacctttatttataagaatatgatggtacttactcaatcatatcttagtgagaagttacaagtagtggatttaatgtttatattttacgcacaattcaaaatttaaataagtacaaataattatttatatttaaaatacgaagtggtttttgacttggtaagactatatttttgcaatcagatgcatgggggaccgggagtgagtatatgtactatgactagaggcat

SEQ ID NO: 44734 - DNA, 843 bp, Cannabis sativa
tttttgaagctccaaaaacatttttgtaactatataagttaccagtgaatttcagtttctaagtttaaaaagttcttttaacataagtctatttttctcaagaaaagttttataagaagctaaaattttcttattaattaattatatttttttaataaataattagaggtgaacttggtattaattgtttaattatggcttttcaggggataagctcttttggtttagggatgaagagtttgctaggcaaaccctagctgggctcaacccttgcagcatccgattgatcacagtacgtaattattttatttatgtatcgaaaatattaaatagtgattaaaataagtaatcactagtaaacaatttaggttctagttacgcattaaaaaaaaacaatttatttatgtaataaaaatactgagtaaaattgtgtatgattattatgcaggaatggccaattaagagcaaacttgaccctgtgatttatggtccacaagaatcatcaatcactgaagagatgataaatcaagaaattggaggcatcatgaaagttgatgaggtaaataaattattataagaatattatcatcatggttataataatatctatgtattaatacttggtgtctagcacatccatcttttaaagtgttatatcgatcgttattagtataattaagtattattagatatctattttttcttatggaatatttatagctatttataagacgctacctataaatagtactagacatagtgatgcaaacacatatatttatattatggttcaaaaattataatgcagtatttatttggttataaatacaggccataaaacag

SEQ ID NO: 44735 - DNA, 1429 bp, Cannabis sativa
tatatataataatataatttaattattattggctttttcttagtttttttgtaccaaacccaactttattcactacctaattcttatcatcaacaaaacacataactctctctctctccctcacccaatatatatatatatatatatgcatatattttttctcaatatcctaatatatataaggactatatatatatgtactagtactacatatatagctttgtttaattataagatcttttaatatgtgtaattataagtcatcttcattgaatttgtttgtatttgtgtttggttttataattataataagtagctatatacaatgttatgaagctagaaatatattaatgattattccatctgaaaatcatgatgagaagatgatcatcaaagatcataatactcataatcatcatcatcatcatcatcttgttttggaggatcaaacaaatgaagaaaaactctcatcatcaacttctcctaagagctaccaagtagtgttgaggtctgtcccgagtcccggtgttggcaattagcgactgcgctaggtctggcttagggcacacaaatagtattcgacgatcgggtgcagtttaaattaggatatatacacgaacacggttctttatatcacacttatgaaataaactgtttgaattattattcatatttttatttactaggtatgactattcataaacacatatatttaggaatgtaaaatatttaattgtatcctaattacaatagctctcttatgatttgattatgtgaaatatgttatatataaacatgttgtaataagcttatatggtgaaaaatataaaatatatatatatatatatataataatgtgtttttttttaatgaagataataatgtgtcttaatgttgttaactacttttaatttgcaattgtattcgtattttgttttttttttttaaatagttttattaaactttaaaaataatatatatagcacttgatttaattagaaaattatacatcttttctaatatattattaaattcccaacgtattagaaaatgttataaaaaaaaggaagaacaataagtatttgaaaatcaatttactaaaaatatctacgaccaataaaactgtttttagatattatttacaattttcaaaattaaattccaaacattatcgatcaattatttaattgagatagtttctgaaaaaaaagtgataattaagataattttaaaattcaaatatatttcaaattcacatttccattattttataaattgcaaatgtgtttattggaatattcgagagaaaattcagtgatgataattaaactattttagatattatttacattttctaaaaattaaattctaaacattattgagataatttctgaaaaaaaaatgataattaaattaatttttaaattca

SEQ ID NO: 44736 - DNA, 968 bp, Cannabis sativa
tgttttctggtatggctaatagattcaataggtgttagacaagatattaagtctgtaattagttaagttttatgtttatgtacaactttatttaatgtacataacttagttggattattaggcttgtatataaaagcatttgctctgttgttaattagttaagaaatattatgctctctcatgatttcacttacatacaaatattctataatattaagtaatgttttctttaacaactatttattattagttgttagactatcaataatatcaatacgaggttaattaattaagtggatggtaagcaacatagttgggggattatttttttttaataaaaaaaattgggactaataatttcgttggatgacaagacaaagaaacaagaatgataaatcagacggtggacaatccaatgtgaatgagatcaagtgttccaacgttgggagctgacatagatttatacctcactcccaccactttcctcctttcgttgttgttaggctttcttatctcaaatcttagaggttcatgcataaacccaaaccaaaccccactccttttcttaacccaaattgccataataactaaattatatgatctgtaccatgtcatgaaatgtcgtgtgaggaatctccaaaaaaaaaaaaaagaatatatatatatggtaaatggtacgtaatagaacatttttataggtatcaaaagaggggaagcaagataaattattatacctaaaggaatcaaaggaaaagaggaagaagtaacaataactgtacatgatgcatacaatgtatgtttcgtaagagctataacttaattcaatgtatatatatatattgttaaaagtgttcattcaattcaatttattttattttgcttatagtgcattcaattcgtgccacttttatattttggcactactacaaaaaccccctttagaggcggtttttaagccctttcagcgt

SEQ ID NO: 44737 - DNA, 3217 bp, Cannabis sativa
agacagcacattcaaaggcatgccaccaatagctcatgtcaaggccagaatgtgcaagtaaggtcaaaccagtttctgtcacatgcctatgtttcctctccacgcgtccattttgctcatgagtgtgaggacaagatagttgaaattttattccttgatttgccaagaatctctcaaatgatctatattcacctccttcatcagcttgtactcccttaataggaagattaaattgtttctcaaccaaactcttaaatctgataaaaacttcaaaagcttttgatttcaatgttaagggacaaatccaagagaaccgactgaaatcatcaagaaatagaatataatacttgtaattgtctttcgacacaacatgagaaggcccccataaatcagtgtgaatgagttcaagaggttgagaagctcttttagaggagagggagaagggcaatttatgacttttgccaagttgacaagaattacaaaactttaagtgtttaaggctgtgtggtatgttggctgttgacaaaattttgctcaaggtggcaggtgctggatgacctagtttagagtgccatagattgatatctgtgtgcatagatgtatttaagacagtaggagatgaacatgaaaaatcatttttattaatagagtcatgagtacaatcggaaactgcaggagcagtagaattacaacatgcattacatggtggttgagaattacagattgtgttacaacatgtattgaagacagaagtagcaagattgcattgaagggaatggctggacaagtttgagtgatcatctcctaacaggtacaagtcattcttgagtattcctttgaggaggacagcacccgtttgtttgtccttgacaaaacaacaagatttgtgaaactcaagaaagacattgttatctttagttagtttagaaacactaactaaatttttagtaatagatggaacatgaaacacagattgaagatgtaaaggtttggaatttaaagaagagagagtagttttaccaacatgagagataaccaatttcttaccatctccaacagcaatagattcatggccagtatagggagttgctgaatcaagattatccatgttgaaagcaacatgatttgttgccccagtgtccacataccaaccggaatcatcaccaaaatcagggagagtttgggtaacatgagcttgaggatcaaagctgacattgtgttctgtcaaattgatctgtggttgagaggagggctgctttggagttacccagtttttatcaaatctgtaatgacagattgatgcagtatggccatacttcatgcacaattggcaaagtggtctgttggtaggaggagttcgaccaaagttgcgaaggggtaatcttgaggagttatcagtggtgttcattctgccagaagcacaaggatgtcgatagggaccatttcttgaaccaaaggtaaggttggcagccatttttgtagatatatccatcatagaactgtgtctttccagccgagtttcatgggacataaggagggcttgaacatcttcgagagtaagattatcacttcgagatgtgattccagacacaacgggatcaaactctggtcccaagccattgagcaaatgcagaataagatcaagatcagtaattgaatggccagcaattgctaaagaatcacaaattgatttgatcttatctacatagtcagagatactaaggttacctttttgaagattagaaagttgtcctttgagctgtagtaaccttgctttggactgactggaaaatttttgctcaagggccatccaaacaccatgggaggagttgtaattggacacagttccaagaattgcttcggtcattgaagatcgaagccaagaaagcaataactgatctttcttgcgccattgatggtacataggattgtgatcaccattgaggagaagctgtggaggactgttatcggtgaagaggatatcatcgaggtcatgaccaatgaccgtgggaacgacttgggatttccaagcaagaaaattagctcgatcgagcttgatggtgagagaagaagtaagggaattcgaaaaaggattctaggaaattgtagcaggggcagcagtagggggaggcgcctgaggtcgaggatcagttacacctactggagacgagttgtcgccgaaggaggccatggacgtgagtcagagaagctccgataccatgaaacacttgatcttgaaacagagtaaaaaagaacagaggaaatgaatgaaaagcctcagactaataatgctagcttagtagttcttagtaaggaacgatttattatatagagtttgagaattaacaaaatacagcagaattctgttgtattaactagcattagttccaatctgacacacaaagaaaatattaactaacaaagctaactaatctttattagttatcaatccatatatcatatatctcgatgtttatatataattaaattctcatgtttgttatttatatataaatgatcaaataagtagttttaattaataaatgatcaaataagtagtactatatatcttaatcccataaaaaaaaaaagtagtactatctaaatcactgaaaattacatacatatgcagctagcattaatcccacactaatattgtcaatcaatgtatagaatatatatcaagattaatctaaacaatcaaagtctaacttttattgactaattcacacctctctgtgccctgttgaagaatttacttctttttctgacttgctaggaaaatatctcttttattcatgcttacatgaaagtaaagaataatagaatttaattttttatattttatgaacttaacatttaagaaatcaagaattaaggattggagttgtagttgtagttgtaattagagtagttggagctccaaaaatgtagtaatagtctgtgatgatgagtaccttagtctctacggcaaaaagggcaaaattttaaatttaatttaattaaaatatgctatactatactccaaatatctacttctcctcctaatcattgaaccccctaacctcaaataattatactcctcccatatctatcacagggaccttctagtaatttccagtctccacaattccgcttccacttccacacaatctacacaactatcacaaacaaaactatattaaaaaaaattcattaattgatttattataaactt

SEQ ID NO: 44738 - DNA, 1485 bp, Cannabis sativa
caaaatcaggggcaacaaccataatctataataataataataacattaaaaaaaataataataaactaaataatatgctacaatatgtttacccatataatattattaatatacttataatactattcacaaataattaaatattaaattatctccaatatagtttaattatttatctaacattatacgtacacagcctcaaaataaaagaaattttattgtcactaaaaagaaatctcatactacactaaactcataaatattcaagatgataaattatctccattagcaaacaaaataaactaagtatataaaaaaaaaattaattaccctacaagaaaataggatattacaatgaggccttgattggtgatagggctgagaacattctgttgcagccgttggttagcaccaagcccccgtgtataatttatcaaagatgctttatcgatatctttagagtaagtgctttgtcttgtcttcttctagcttaactttcttttgttgtatcatcacctgaaattgtttcttttgtctttaggcttgtgttggttatgcctacaccatggataacaaacacaagaaggtggtgaagcttgttgagaagcatggggttgcagaagactaagatatcgctgctgaagaccgtgtgactattctgaaggagaaagttgcttctcttgagaatgagatgaccaagcttcgagaagtggctaatggtgccaaaactcgagaaagcactttgaagaaaaacttagtggctgctcagaagaaagcttctcatcttgaagactcttctcgtgatgctttgaagaagcaggctattatgactgattatctaagagaccaggtcaaggtcttggagaaaaaagtgactactcttgaagatcagacccttctcgatgtaatctactacaatggcttgtgctttaatgccatttataaggcttgggctgcaaatggtggagccaagtcgtttaactaggaaggtttcccagacgatggtgtgccaaacttcatcaggcaatgtgagcagcgatttgatgcaaaaaatctcgaagaaatagacttcaatatgaatggtagtgaactagttgtcagagaagcttcaggagttgaaggctacaaccctccttctgctggtgaggtgcctcctggggagagtgaagtcagggaggaaactcttgttaacataaaaggcttctaggaccttctgtgagtccattcttcttattttgtttttagcatttaggtttagtgtattagttggttgttcttaggcgaccttttgatgtggataaccctcagtaaaatgtgattagaattttgttttagttaaatcagaaattatttccaacttaataaaattttaaatccaatatattttttaatttactttttttgttaccgcttgatcatttaacacttaaacagtacaccatggcttaagaaactcagttactgggagtaacgtcactaatttct

SEQ ID NO: 44739 - DNA, 1094 bp, Cannabis sativa
tatagtaagaagtttagatcatgaagtggggtttaaagtacttttttatcttttaagactgtaaagagtaattgcttgtagattcaggaaagagcttgtggaatcattctcttgcttttattaagatcagaatatgatttagagggaataggaaagggcctctgtatataattatgtggatgagccaaaagggcctggtcccattactcttcgtaagggtcaagactcaagagtactcagcttaacctggtcccttcattcgtatcaaaatatggattgttttctttgttgatctctttacaacaaagcaatctttctaaactacgtatatacatgaaataagaatgaacaaatataagaagtaattaaattaatatttgaaccacatattatcactaaaaaccattttttttaaatcactaaaaactatttcaaagacaagtgtatttacttttctaaaaccaacaatataaattcatttatgcatatattagagatggaaatttttgacttgggggaatgcgtacctgtggttaaccataactacccgactggggtaggaaataccagctttggtgggttatggagcgggggtgggaataattttatttacatgaagcgagttcggggtatgatcgagggtgatactatccactccatatttaaccttaatatatagtttttatataattttttaaatatttattcctataaccatattaaatttattggttacgaaattgattattgatcttgtagtatagttcctcaaaataaaaaggtctctaaaaattatttgtttatggaatgtaaaatatcatttggaagggcgttctcagaagtctaactagtccatccagaaggagtctctagggtttgctagtattcctccgaaaaagagttttaaatggctagtgttattccctcttatagagggagagtcccggatagtcgactccagctgttgacgttccttttcgggaagtcccttccgtgtgcataataattaattaagttatataatttttttagtattgaataatattatattgtaacaaaaatgaataaatatattagattattaaatatatata

SEQ ID NO: 44740 - DNA, 3001 bp, Cannabis sativa
  modified_base (26)..(29): a, c, t, g, unknown or other
caacatacatgatagtaaatagatcnnnntaaaataatttccaacaatgatttggtacatgtcaaagttcagggggcaaaaatcttaattagcctaaaaaaataagtaaaatacttcatatattaaatatttttatatacattagtattcatatatatataaaaattattttaaaatgcaaaagtttgtgtttgtcaatagcattggaaagtgaaaaccacatttttattgggttttccttgccagccaactaaaacccaccactttcacttagccaacattaaaatattaaaaacctaaccaaacataagaaactttcagattctcattcccacttctcccattaccgcataccaaacaaccccttagtgatgaacttgaatattataattaaataatgcatgtgcatggctccttgcacatatatatgtgcattttatatatgatatgatattattgtcctttgtttcaacttgtgtatactgcatagtatactgcacactataagcttgtatgaacaacagtaatagtgtagagcaccaaaaacacaaacagagagaaaaaaaatgaaagtaataatgcagttgcaccctctcactttagttaagatcttcatttataaacacaaaaccatttacaagcaacagtgaaataaattgaaaaggcaatgcacagttaaaaccaactaacttgtaactaactcctaactaattgtagtgttaacatctcccctcaaacaaaaagaggttgtggccatttaaagttcgaacttgagatgaagaaatctgtcagtggacaaggattttgtaagaacattttctacttgatcaaaggctggaacatatcggactttgagctatttttctaggatttgatctacaaaatgaagatcaagctcaatttgttttgatttggtatgaaagactagatttgcagcaagggctgtagcactttgattgtcaacccaaatgattggatgatgaaattgtggcaaatggagctcatttaagagagaaccaatccattttacctaagctgcaacatttgctaatgctctaaactcactttctgtgcttgaccttaccactacttgctgtttcttagtaaatcaggaaattaaattgccacttaataaaaacactacataacctcttgtgcttctttggtcatcaatgcagcttgcttagtctgcatcagagtagcattcaatagaaacaccttgtactggtttaagcaacagtccctttcaaatatatgagtagtatcttgcatgcttcttaatgaagggtggaggagctttgagaaactgactgagcttattcactatgaatgcaacatcaagtactctagttaagcttagatattgtagagctcctatatggtgcttctatacagtgttggatcttcaacaggatcaccctctattagactgagtttggtggtggaactactgggactaggacaaggtttaactccctccatattgagtttgactaataaatcggttatgtactttgaatgagaagatacataccagactaatttcttacaatctcaacacctagaaagtagttaacttccccgagatcttttaatgaaaaagactgattcaaatttgttaccggcttggaaatgagactttgatttggaccagggagtaatttgtcatcaacataaataagtagcacaattcggttagctcttgagccatgaacaaaagtagacgtatcagctctagatgcttggaaatcccactgaatgagtctctgttttaacttctcatttcaggctcaaggagcctgttttattccatatatggctttgtgtaataagcacacatgatctgggtactcagcatcttgaaaaccttgtggttgttgcatgtataccacctcatttaaagttccatttagaaatgcattgttcagatcaagttgtgtcactctccaattgttagacacagctaaagagagaactgttatgactataatagttttgactactggagaaaaagtttcttcacagttaattcctagaacttgcaagtatcctttggcaactaatcttgatgtgcacttgactaatgtcccatctacattcaatttcactctaatgatccatttattgctaataatttgcatgtcatctgttcttggaaataatgtctaggtttttgcctttttgagtgtcttattttttgtttccattaaagcatgccacttggggtctttcagagctgctttgactgattttggtttaaaatgtaataaggattcatgcataggatgttttgtagcagtgtaggcttttggtttctttatgccactttgtgatctggttatcatggcatgggttgttatttgtatgtttgtgggtgatggagatgtatgtgggatgggtgatagggtagtttttgtgtttggggaagcatctatgagtatagttggtgtgggggaactgtgagatgctgaggaaatgtttgttgcaatatgtgagtggggctgtagttctgttttggttggaggaggttgggatggtagtacaaatgcaggttgaggttgtagttcaaatgtagatacattttgagatgggaaaacatgtattggtggtatagattgaggttgggaaacctgtatggttggcaattgggttacatgatgaggtggtatgatgggtgtaccatgcttagtgttcacagttgtagtagcatttggaaaagtaaaaacagaaccagaattagtgttacaagtgtaaaaagttgctatggaagaatgagacataagaatattagaatttatatttttttggtttacaatttatttttggttttggacatttcagtagttttatcttatgtcagtaattaaaataaaacctttgtatgttaatggtgcaagacacaacaacgttagccctttgttgcttttgccgttaattttaacggaagcaaattaaaaatttgcattggtgttttttagtaatttcaaaagggagacttccc

SEQ ID NO: 44741 - DNA, 1966 bp, Cannabis sativa
ggattgtattccctgttttggcataacgggaccaaatcctgtcccttaaattatattgaagagtatattgtaatggtgtgattcttgtgagcaaagaactatcattatagttgaaaaagatttttaaaacttttgaaaaaaaaaaagtatatataatgtgtcccatcaatagaaaaaaaaaaagaagagagagattattgttgttatatatattaaaaaaaatctagaacgattttgagtcaaataaataaagaaagtaaaacaaaagagataattttatgttagaaaataataaataaataaaaaaagaaatgaaaaaattaatcaatacttatcaaaataatacataaggaataaagagtcatgtacatcgtagaataacgcttaagtatacacatgtccaaaaaaaaaaaagttaataaaccaatggtgtattttataattaaatagactgtgttaaaggtgatattttttcaatattacgacactcgatgcaaacttctctaaaatatatatatgcgcgactattcaatagttatatttttattgtaactattatgattacattattcttcggttgaaccctttgctaccaatcttgccttatatctcaattccactcctggtagagcttccttatgttaaaagatccatttgcagcttataaccctttgtccccttggtcttggtactctaatcttggttttatttttctcaagtgaacccatttcattatcaatggctcttagccatttctttctgtctttgttgggaactgcttctgcataagtagtaggctctccattttcaatttcctcagctgcagcaagtgcaaaaacagtgtagtcaacaaatcccagcgtgtcagggggtttaatatctcttttgactatatctctaaccggttggtaatcctatgctcctgatgatgttgatcctccctcttcttcttcagaactatgatcacttaatgttgcaaaaatatccacttgatcagtagtctctactttatctttgtcagtttgtatctcaacactttgtttctcttgactgtagtctatgttggatgttttcattgccatttcatgttctttgaacacaacatccctactaatgatgcattttttgtatccatcttctaggcaccatactttgtaccccttaaccctatctggatatcctagaaacaagcatttgatggctcttggttctagtttatcttgtctaatgtgagcatatgctgtgcagcgaaaaactttcaaatgatcatacattggcatttctcctgtccaaaattcttgtggtgttttgaattttagagctgttgaggggcatctgttaatgaggtaacttgcagtctgtgtgtgtatatatatatacatatatacagttgtatacccttgtaagttgtaaaggagggaaaccaaataaggaaaaagtgatgatgaattcaaatatacaagtcaactgaaaagaagcgttgtattttttttaccgttgtaagttgtctgtgtgtatatcacaataatttttttacagttgtattttattattatattattattttatttattacagaatagggaaacaaggtataactaggacttaataattaatatgttgtagatgacgtggcttgtaaatgattccatttctcatcaatttatttatatgtatttactattttctctgtatttaccgttgtattttgtacaaccttttatattattattatattattattattatttattataatacattgtagatgacgtgaactgtaattactcaacctaattaaagagtgattgattctattcctcatcaatctatttctatatttataataagaatttccattaaaatataagagtgtttttcaatattatccctaaaattaattttatttgtaaaaatacttttaacaaatttatttgcacaaatactgatgtgtcacgtcagcata

SEQ ID NO: 44742 - DNA, 1189 bp, Cannabis sativa
ctaaccatgtgctgcatccacagctatttgcagtctttcctcccaactcaaagtatatgattgtttatctgcaatttagttatttaaaaatgtaccaatcatctctctgttagttttcttggattttttctttttgttttttttttttgaaagaaaaagaatgaaaagaaaaaaaaggaaatattggtgaaatgcaatctaaatatgaaaattctttttaagaataatgaaaataaacctgagagatgccttcctaagtttccattagccatgtactcatagataagccccatgtgtttatcatcaatgcagtatccaacaagactagtcaagtttttgtggtgaactctcattaagagattgacctgtcagtaatatatactaaatctttaaattgcaataataaacatttattcaaacaaaattatacctatgtacgtatgagaaaataattatgatatagacctcagcttgaaactctttgtagccttgagctgaagactcagaaagtattttgactgccacttgggtgtcatttaagtagccatggaaaacagttccaaagcctcctttaccaatgattttctcaaagttattggtaatgtctatgatatcagcataattacattgatggtttcttggctgaaatgctgatgacccaattttgtttgttgagtggggaataatattgtgtgtttgcttcatccctactgttgttcctgctattatatatatcaattagaaactattataatacttaatgatatatagatgacgattggccagtgtacgcacatacataataagtacctgttctatttcctttaataaatctccatccaataaaaaatgcaactaagagaactaatagactagcaactgatgctataactggaactatatattttttcttctttactttttggcatgatagtgcagtacaaagatcacggtttcctgaaacactatacaacaaatattcataaattagttagaataaaatcatattgtgatcatgtggtgttttgtacctgactagttaattgatatttttaattgtttcagttatggactacctgagtttacatatctcttgataataattttgaataacgtttgttttaagagcaatacatcttatgtagaagttaatctccatgagtttcaacatttgttttgtttgttgatc

SEQ ID NO: 44743 - DNA, 2474 bp, Cannabis sativa
tcctaaaaaccaactatcaatgacgaggggtaaggtctaccccctccttctcaatttggctaccgatattattaaggtcacctataaagaaccaagagattttagaatcaaaggaaagagcttgaataagttgctaggtcttgaaacgaaaactccaattagactccctgtaaaagccagctcgatgccaaactactatttcaggggttctaatttggacatcaatatggttgcgagaataccttgaaactggacctcctcatttaatctccacaaaaagtctaacccacctttacggccttggacctcaacacaaaagcttcctttgaagcccatacgggttcgaagtctctcaacaacattccttttacacaatgtttcgcactagaaaatttcagaataattcatttgtttgcattggaaagaagtttaaaaataactgcattttatagagggactacatgaacattttttaaattattatttcaattaagcaaaaaaatgtcaaacttcattatatattttgtcaactttgtttgtgctaattttgtaattttctcacattaatattattaaattttatatctatatatatttatatataaacattaaaaaaattagtaattaaaaatttataattatgttatatttctcttttatatatagttcattttcttctacatatattgacattatctcatatatatcagtatatttttaatgagtattattcatgaataagtttaataaagaaaatgtattctatctaattaagaaaatatctcatttctacattgtattagttgagattgttctattggcgaaaacattagcaaaaaagtaagatgaaaaaaatatttgaattagatttaaatactattatataataaatattttcagtatagtgtaataaaagatattttaattggtatatatcataaattgatagctaaattaattatgcagactcaaacatctactttattattcaccattagatcaaaattccatactttaatatttttaaaattaatatttattgttaaaattattttagtaactatcaatgaataacacccattgaaaagtgttctctatatatgtacatatataaccagttgaataaagcaccaatacacttaatttgtgtttttaatatcctaaaagacataccttatatatgtatatgagagtttctattatagttatatatgatgtgcatctttcaagtttacaaaaaactgaaataccatataattcaaaaattaaagtttaaatagcttattttacatatgtataaaattaaagaggcatatattcaacggactgtttaaattttattttcggtacgtttcgttattttaaatttctaaaatttttccagcatatcttaaataactataaaatacacggtcatatatatatattaaaattataactatctaaatcataaatatcaaaaattataaaatcgtgcaacattacacttattttgggatttaatttcccaaaattcgttatattattataatgaatatttttagtaaattaataaaattgatcgtaatcatttaattattaatataaattatatatgaccatacttatctcggtctatggtatttttatcattgttgataatgagaattcgtcaaccaagttctggcaagaaattcaaaagtttaaggatagtttagattaatatatttgtgaactcaaaaacatgaaataaatacaaaaaagtaatggataagacgatatagaaagtttgtattactctctaagttatactactacaaacataccctttagtgacactctataatgacgtgcatatttgtgtagatcactaaagtgttaaggctgagttttagcgaaccacaaaaaataactctaaacagtcagtgtcaatgacctaaaattaggtcattaaaaatatgaggggtcactaaagagtaactcccataatatttaattatttttttttttaagaaaaacgttgatctatagtgacgcaataggcccaaatgggtaaatgtgtcaaaaccctcctaacgcgtcactatatcatacacctaaactaaaaaaaatagttttaattaataaactattaataaataaatgataaaaacaaggcgtggttttagggttacatatatacatttttcaaaaacgtaaacacaataaaattttaataagtaaataaaaaaaagtgcaaaattaaagatataagggttacatattagttaagaagccctacatatagccaaaaaataagaagaactaacttgtttttcctctctatcatcaccctcattccttctaatcaaacgtgaatgagcaagatcacgacaacggcaagtgagtgatgatctcttatgcaagagccaccaccaagacgatggggatggatgcttacaaacctttggcacgcgatcttctccactgtggtagctccattctatttcttaact

SEQ ID NO: 44744 - DNA, 2328 bp, Cannabis sativa
tctatcttcaattattctaccaagccacacacacacctatatatatttattgaaaagttaccaaaaaaaaaattacatgtaatattcccaacaacaagctagtgttaattttattttagtacttttagttaaaactaaataaaataacataaaatcaagagttactattaaaaggctttgttgttattattctcataatatcactaagttataatttttttcagaggttttaacttttaataagcactcttattaagtgagttaaaataattaagtggtataaatttagttaaaataaatgtttaaaatgtttactacatcaagtgaaatataatattttaaacttttatacatttttcttagttaaatgtagctcaataaataattgtgaggaaaatatattttttatttgtcttctttctctatatctattattttaattaatttttttagtctttctttacttttttttgtcccttttttgttttaattaataaaatatatgtaaatatataatatttaaatggagagaaaaatgtagagtgtaatataaaataaaaaaaaaactaaaatttaagtaatgtatctttttttttttttttgaaaaatagagtaaataagctaattgataagaatactcttagttgaatttacatgtaaaaagtgccatatatcaatattactcttttgctaatcaagtaacataattcattattattaattgttttcttttttggtgtacaaaagtaatgacatgaacatgattgtcaatataactacatgacatataattaaataattgattaattaattattattaattaataattaaagctatatgtgaatgtggaaaattagttcctttttgtgcaaattatataatagtcaagttcatatatgagtacatgtgtttgattaacctttttttttttatggacttgatttgtcattgaaactctccatatatctcttatccaaaatccaaaatccaaaattcagggtttgcttacctcataatattaataacaatttaatcaaaaattaattattattattaaattattatttattttgtagtgtgcatagaatagatagcttcaaccttttctttggggtaatcatctcacctttgtattattttctttctctccccatatttcaaaaacctaagctatatatacatcacaatatatatatacatatatatctcctactttctctctctagactagtagttattactagtttctatgttctactatacttctctttttctcatttccttttcaatttctttctttacccaagtctaagaaagtgactcacaactacttagaaacccctagccacaaagcttcttctttttttttgagttccttttatttttgggtttaatttttgatttggaaaattacaaaagctaataataattatggagcaatgaaaatgtgataaattaataatgagtaagtatgagtccttaattagcataaaatatgtatatagtcatccaattttatatatggtgatggtaattaatctttagaaaataacgttttaagtctttttttagtaaatttatagataatgaatattgaaaaaggtaaacaaaaaatcattggagaactttgaattattttgttaaaaaataaacaataatttttttatttatctaattattttaccaaataaattctatcatatgatgagtaaggctattatttataattactagtcggagatctcttaataaaggttgagtgtcaaaatattttgactacaaacacacaaagtaaaaagaaaaaaataataataaagtcataattattaattagccaaaaaaattgtctagaatattaattagtgtccaattaatatgtataactataaaattattgaaaatttactcagaatcaatatgaacaagtaccttactatgtttatttattgctcatgtagagtagtaatatagctaaaaattaatatatttatttttatttatgtttgacaacagtagtaatatatatatagctatatataattaatagactctttattattatctggagtcactgttgtgtatgggactagtagtaattaattagtttcatggagtttaataatatattatatgtttgtttttattacttatattctatatgtgtataaataggtattttgagagtgatatatatctttcaatttattccataaattactgccttaattagttacagtctatattttccatataaaatacctatatatatttatactaacttaaagcttttatgtctcaattattcaaaaaaaaagatcggaagagcg

SEQ ID NO: 44745 - DNA, 1904 bp, Cannabis sativa
atatatatatatattcatacatatatcgccctgaatctgtccttaatacaaagataagatacatcatatatcatataaccatcatcatgattataacttaattattctgatacatagatatatattaattaatactatagctagggatttcttttgatcataatatatataatatataattgaaaattaagaggagcaaaaaaatccgtaaagcaacgattgatgatatatatatagtacaaacatatatataatcatgtaccctctctttctctgtatttatatataaatagtaatagctagttgtagtggccgtgatggtggtggtacgtagtggtaagtggttgatgatggttacatagtacgacttcgagggactaatttgcatgaataaatagtttcattattattagtgacagcctttagattcttctgacgtaccttttgaatgaagtcggaagctctgccatcaacattattcatgtcttccttcacaagatcaagattatggtcaagatgacgagtaattggttcatgatcaaccaagtagatttgttgtggctcacactggggttttagggccctcaacaacggcttattcaccttcaaaggaggagaaggagggcttgtgcttattttggttttggttttggttttgatgaagttgttatttctataagaagaagaaggagctactactactactgggtgatgatcatcatcattattattattagtgttattattagtgttgttgccaaggcttctttgagaaattgagaaagctgagagcctaatgatatttgcaaccactttcaatgacatctcacatagtgactcttcacttcttctaacctcaacacctctcatggttacaacaatattaaccaaaccaaaaatcaataactatacactttgttacgtatttatatatatagggatgaagctcatatatacataatttatatatatatatatatatacttgccttgagaagaagaggtatactcgtgtgaacaaagctaaataattgaatgtattaatggattcttgtagatattttatattatgtatgtatacataaaaactctttcatatatataatatatgtataattataatagtgatagagagataggatccctttcaaatagagcaattccttgaagtaagctttgtttatcttttttccacactttatttagaagaaattcactataactaggaaaaaaaaggaaaggggagagaatctaatccctcacctcctccaatccttgtcttcaacgattaagtagatctctttatatctaaagaataatatccaattgtcttactggtcccaattatacatcctttctttctttctatagagctgttttctttgttcagttagaggctacatccatgtgtgacaagctaatataacagtgtttttgggattaataatatgagtaagatggaatatgtggaacatagataatctctctcaaattgtcatgagaaagaactagaaggtttaatttaattgtttatgttttaggtttaaaatatataggcttgatatatgacctcatcaagtaatagcgtaagaaagaatcattacatcataagggaatcattattaatgcttctgaaattgaaagagcttcgtccattatttcaaaatatcgaaaatgtttttgtcctcccacttcaagatgcaaaaaacacaaaagaataataaacaatgactcacatatagcgtctgtcctaaagtatacgtcgactaaagtaaatttaaattttaagactcttctatatagtttaattattatcaaaataatagttatcttgatttagtataatggtaaaactttttaaaaaatttaaagagcatttaatatctttcatagttacatattaca

SEQ ID NO: 44746 - DNA, 2763 bp, Cannabis sativa
tcccattgccaattggttttgggatggaacctcattcatcttattcctcaaattctaacaaatattgtgaaattaatttttttttttcttttagataccatcttctttgatattgagctttttttcaagatgatctcatatttcctggacatatttggtattgggtgtataatttatataggctattttaggagtttgaggatatatctacatttcagggaatgtctactcaagtatgtaggctaattttgactgtagtcaataaaagtttcatattatattgtcacctagtggaatcagtaccatccaaatgatccaacaaggaataaacttttcaatgttagaagtaaaagccacggagtagaaatattaatataaaatacagttcaatagcaaaataattaagtacaaaaattacgtaggaaattgatcaaataaagttacaacgagaaaattacaactaaatagaagaaaaacaactccatacttgaaaatacaaatgaaagatgaacataaatatataaataacaagaataaagagaaaagatgaaaaaccaagccctacacaaacacaatcttaagtggaaatcaccgaaatttaacaaggttgaacccttttgtctaaatatcttatttttccttcctctaagcactaaataaaagtagttttggtaattatcaactcttttggtagttttttagtaagtgattagttgataaaaaaaaagtgtcaaacaagagaactttaagcacctattgatagcatttaagagtcacactttgtaattcacatcacacaccccataattggtacgatgccttcaataaggtagcgttcggtttgaatgaatgaaagcatatgaataagaatgagaataggaataagaataagaatacaatgaaataaaatttaaaatgcataaaaaaaaattgataacaaaattattaaattttctctcatgttacattagaatgatcttttcttccatttcaaaatggaatagtcattccacaaaaatagcggaagtgtattccattggaatgacatttcaatactttaaaatgtaaccaaacaaagaaatagaataaaaattatttcctttccattctattgtatttcattacctccaacaaaacaccacctagtgttaatatgatatattagggtgaattaaatgttacggaagagctggatctgagcacaacatttaatacaattgaacattttctatcaaattgctatacaatatatcacctgacacttctgatggaaattctcacatttatattttgtaattcttatatggaccttgttaacgcggtttttcgtcaacaaatttgaaaaaattgtaaacgagcaagatgaacacaaataaacgtcgatcaaagtaaaccagtttatggaatgcaatttggtaatgacgaacaagcaatgttatagtggttcaccccgttttagcagtcataggctagcccatttagagtattattgatcttaaggcttgacaagagttttccaaagttatgttctccaagaattcaatcctcaagtaagtttttagaatgagagagtgagaatgaattgtagtccctttgacaagtaactttcccactccccctttatataggtttacgcagtaggtttaaagtcccttaacctaacatatatcgttctccaactatggttggtataagtttataattataaaataatatttcaaaacaaatatttaaaaaatgataattattggagatattctttgatcgcacgtgcttagctcgaaattgtctagctcgaaaggttggtcatgtcaaaatggtatgttggtcatgtcatgttggtcatgtcatacttgtgaggtgagacatcttggtgcaacggagcaccttggagtgggttcgacatgataaagtcaagcgaatctcgaggtgataggacaacgtggttcaaccatgaggactccaccatgagggagatgttttaacgttgtggttcggctatgaggacctcgaccatgggggaggtaatttggcgcacatggtgtcatgtcgagatggagctaaacatgacgaatcacaattgttttaccaagaacatgttatagatgacactaaagatgttctatggcatagaagacaaggacatattagtgaaaggggcttacaactcatgagtgaatagaagttgcttggtaaggataagataactaaagttgatttctatgaattttgtgtactaagaaaccatcataggcttaaattctaaactggcacacacaaataacaaggaatcctggattatgttcactttgatctatggggacctgagaaaaccctaaatttttggggtagtgcctattttttatctattgttgatgattattctacaaaggtgtggatctatttgttaaaacacaaaaatgaaggttttcaaaagtttgttcattggaaattacttgttgaaaatctaactaacaaaaagctaaaagtcctaagaacagacaacagattagaattatgtaatgacgagtttacaggttacttccaaaacaattgaatctaaaggcataggacagtgaggaaaacccctcagcaaaatggtgttgctgagaggatgaacaaaataatactgaaaaaagctaggtgtatgctttttaatgtaagactctcaaatggattttggggtgaagcaatagtgactgcaacatacctaatcaacagtccctccagtgccatagaaggaaaaccttacattgggtgcag

SEQ ID NO: 44747 - DNA, 1861 bp, Cannabis sativa
  modified_base (1643)..(1656): a, c, t, g, unknown or other
aaatacaaagtatcaatatttaaccgtataatcaaaagtgaattacatattattattattattatagtgtgagatttgagtgtccaaataaaaaatatatgtatcattactcattccactattgagtggaattgtaattccattagaatggtacattaattattatacgagcttaaaatacaaagcaaatattgaaatacaatttttcaatattccattctaccaaacataatgcactaagttttctttaaagtctaatattggattgacaaaattttgctaattaagtacaaaaataggtcgtacattctattttgtcaaccttcgatttagcaaagtcaattaaactacttacttttttttaacaatactttcctttttaaaatttttgttacaattaataaaaccaggaaacaaataaccagtactacttcatatctacgaaatatgtgtttccattcttgtgatgttagtctcttatgcaatttaacattcccattaataatgtatccaattaataatgattggtgcactaaaattttaatcatcaacatgacatgtgctatctaagatcgaccggtcttgagaatatatagacttaaggcgaattagatttttagacccttacatttcaaagttatatattaaaaaatattaaaaatgagtgtcatgagattcaaacgtataatatatcatgcactctagccaactaagctatatatgaatatttattgtttataatacatttaattttacgtaaataaaagcctaataaaactttttatttttattttgggcaccgaaaagtatgagctctaggcacgagcctagcatgcctatgcctaaggccagccctagtgctatcgagttttgatatctacagtgtttgcgagtaagcaaacgcttcactaatacaaattaagaataggagagatattgttatgaagttggaatcgcaagaaaatactatttcagagttgtcattgtaattttggatacaacatagtttaattctctagtacttgaagcgcacgagattaagggttggttgtgataaacactcttgttctaattattcatcattagtcatataacatacatattatagtgatatttgcaatgaaattaattcttaagttatgttgagagttattccaaaaaaaaaatagctcaaatggttaagtttgtgaaatttgctcttataaggtttaggtttgaattccacatgcagcctaccaattactagttatagttttttaatccataagcaaggttcggtggagaactttttttaagagtgattattcatgttttttaatagtatgacatagagtaaaattgcgccaaaaatacttttcaatctctcagttgatacaaagtagagctataaatacggtttaatctttcccataataactcatattttcgtgcctaaaaaaagaaaaataaataaaaatcatctgatctgagtatgggtcgggtcggggcaattgagaaaggtgggcctaacatggcgatttgtgttgtgtaggcccaaatttcaaactggtccattttatttattcaagtctcaagttgttactaatttaattttagtcataataagtattgtaactaaaagcatatttagtcacaacaaattnnnnnnnnnnnnnntaatacttttagtcacaacataagaatgacattttataattagtcacaacttttttacatttagtgacaaattttattgttactaaaagtaagattttttgtagtgaaattttaaccttaataattaagaaataaataaataagataattacataaaacaccaatttttgtaaaaaatttatatttttacgttcaaagttttttt

SEQ ID NO: 44748 - DNA, 2393 bp, Cannabis sativa
aaaattgttgacagtataacatctatcttatttaggatttttatttgattttgtatcatacatttacttatttttcaaagtctgataaatcaagaagaaacataacaatttgtgatgaatttggcagtacaaccacatagatatttgtcttttcttcttaattatgtatcatgtataaatttatattctgaaacctaatgaatcaaagaggaacataaaaacatttatgaagaatttggccgttaacaactatttttttattaaggtttctattctcttctttaattgtgcatttcacattgacttaaatttttaaagtcagtcaaagagaaagaggtgatggattggaacaatagagaaaatgattgtttcactatttgttgtttttcactttttttttattatgtttaaaatcaactcttaagggaaagtggtgaagtggaggaaatatttttttgaataattttacaatacattccataatatttttatttattttggtatttaaaatatttttttagttaatttttatttcataatcatatacgttatagttattaagatatcttctaaaattttaagaaattcaaaaaaaaaattaaaaaagtgcagaaataggtaaaaaattcatcaatgcaaaaggtgcactgtaaaagcaacctattttatttataaaataataataataataacctttttggttcaacacacataattcaaaaatgaaccttttattatatgtttgcttagaaatatcccaatgacccctcatttctaaagtgtccatgacccatcaaatattataaatcaagaaaattcattttttttgtccctgagctagggatcctgatggaatgcaaaattaagacttaaaatcagtttccacaaaacaatgtggggctttcctcaatacagtaacatataatataatatataacattatattaaagcctacctctgttagttgctgaattttaaggtcaacgggagatggtggtgcttccacaggtttcccttctggagtaactggtacaggcttaacttgcttcttcagctcattaatttcattctgaatggtcctaactcgcctccattgccaacccaagtagcctgcccatagtgtgtacacgaacaaaccacccatcacaatggggtgaaccagagcaaatgaccttccctccaataatccgaattgcccacctgcagctgctgcattctgcccaatcacatgcaaatgtcaattggatttaccaataaacaaagcccactaccccaagtgaaaattttggatccgaatgcgaaatatgaaataacccagatcaaaaaatcacaacccaagtgaagatttagaagaggagttacctgagggtcaaagaagaagggtaatgtgagtgctgtaaggggaagagaagcagactgtaggtgggcaaaagcttcattgatgaatatttgtgagttagtagaggagagtttggtatgagattgggattgggggattagaagtttggtgggattattagagatagagatagatgggtttggcttttgaggaagaacggggaggttgagaagggtgagcgtggctgccatggtgttgattggtgatgaaagaactcagaagaaaaggaacgtgtggagtggagaatggcgatgagataatagtgttaataataagaaaaagaagaagtaaaatgaaaggatgagagatcgagatggctccaagtccaactccatggggtaccagtcattactcttgtgagttttctaaacgtcttcctttaaatgcaaaacgacaatttatatatgttatatgtattgagtctacgactaaaaacaaggattaattaaaacaaagttaactccaaaatgttatttaacatattaaaaaaaggattaatgaaaataatttataaaataaaaaaatcacgccaacaaattaaaataacttaaacgattattttaaaaaaaattaaactaaattttgtttgaatgatgaaacaaatacatcatgtaattttataaaattatttataaaaatgacaaattgcgacataaatctccaaaaaaaaaatttgatgtaaataagtccacaatcttaaaaaatgatagtaatagtcctcaagatcacgtttttttgtaactccgtcggtacccaatttaacaaatctattaagtgttgacaaaaatgtcaagtaataaaaatttgttggttcaaataataattttaattaaaaataatttaaattataaaaattattaaaaataaataaaaacatttatattttttatttgtgttctctcttggttgttcacgtctatctctttgtttttcttttgtgtggaacaggctcatttatggccataaagtactcattgatggagaggcccaagaa

SEQ ID NO: 44749 - DNA, 2376 bp, Cannabis sativa
agaataatagggttgaagatcgaaatggtctaataccaaattaacacttgagaaatgagaatgtaatggtgttgattaatatgatgagatgcaccagctgaattttgtatttatagaaatagcaaatataagaaaaaggtatctacatatagagcggaaaacaagaaaagaaaagtaactaatgcaactaattaacaaaaacagttagctaacaaagtttccttattttattggttagcaaatagtattaatgtgaataatagcattgtaatattagtgaatagtacttattttaattgataactgatattattacaaaaatgtgaatgaactcaaacaatattgttcttagttatgctaaataaaatcaagtgaataagtagtactggcatactattatttatctgttcacatatggaagattctaaattgtgaggtcatggttactacgtaataaaatggaaagaaggaagaagtgttggactcattcttggttttacaaaacaaaacattgacaaagctaaagaaaattaaagtagaaagtagtagttgatgacaggccataaataatggtttaaaacgtgtaatattagaaagaatagttcatcaatttggtcttaaatctacactaatttagggtataatattatactttatcacatcaaatattccacaaaataaatatatttcacttacaaactattttatattaattatctatattaataatccaaaatagttaatttataataaaattatatcataactaatataagaattcaaaatcttaaaataatttagtaaaataaaattttattatagaataaataaaatacacacataaaatattaaaatactatatttgatcttaatatacgtgtaaccattttcaaataaacaaacaatgattatacaaaaaaaaaaggtcaccaacaatatcaaccattttaagaatatcatgaaattctcaaaatacttcaaatctatatagctaatattttgatatttttcaagactaagattctcaagtaatcagtttgactattaaattattatttttttaatatttattttcatttatgttgttctttttaattttataattatatagtttttattttattaagttctataattatatttttttagtattttttattttatatttttaaatatgttagtgttttaaaataattatttttataatagattttaatttgagaattaaaatgtaagattattttttaaaatacaataaaataagggataaaatgcaaataaattttttacatttctggtgtagattgaaaatctaatactattaatcgtgtaaaatttggtgtacaacaatttaatgcataatttagtgtgcctgccagtagggtaaaattgtgtagaaattctacactaattctcttagctagttccttaatcgtggatttagatatttatttgattaggcccaaatatgatattgggattggcctattgggctacttgtctagcattgcttactgccaccttacaactaaccgagtaaaaccaatggactacggaaggccacgatgacacttttcgtttattagtttttaattttacaattatcaatcatcattcgtcacgataaataattaaatacattttaattcatcccctaaaaaaatgtgataataataataataataataataagaacactagaaacagtaataatataatttgtgtaaatcaaaatagcataatagtaagagtgtcactaatataatttactgaatgacttaatatctataatagctagcagtttatttttgtcacagtttgtagagtgtgaaacagaatcaaaatatatcttactcattacatgaaatggagtatagaaggctgtaaattgtgatgtaatgggtgatacgtaagagattagtcagtccaaaatagaagaagaagaagaagagttgacaattccttacgtagacaaagaaaagagagagtggttgatgacaacctttgtaaacgtgataatttttgtttaaaagaaaaacaaaagcaaaaaacgaaaaaacttaatagaagtgtgtaatgatgtaataatccatatagaaaaaggtatggaccgtgacacttaacatagttatgggtcgtaatcatatgtcatattttccaggctggaccgcgtacgtttatgtctctacttttgggctctttcttagttagcccaagtctgtaagttacttagtataatgggctactcgtttacatcgcttctgcaaccgagtaaaacaattggattcaaatcactccaatccactacacacagacaactatactgttttaagagacatggctcttgctccagtacacagtacaatatattactgt

SEQ ID NO: 44750 - DNA, 4292 bp, Cannabis sativa
tatatgtttgattaattccgcactttatacttaaacatatatatttcagtttatacatataaatgtctaacactaaccacattctcggttttctcactttcaacaatcgtagctttgttgttcatacactccatttcctcaactaatttcttgaccttttccacttctttctccaatacccttactttatcttccaagttttttacttccacctttggatcctcctccaattttttcaaatcattaaacgattttttcagaacattataagtaggaacaccccctgcaatttatttttttttttataatactaaaaaaatagtaataaaaaacaaaagaaactgcaccaacaacaacaaataaaagaaaatattggaacgttattattttaaaataagaaaatagaaataaacaaaaagaaagagcaaacctgggacgaatttaagaccctccacaaccgagtatttagcaacgctggtggccaacgggacgagtttagacttggttttctcgtcaggtccgtagcgagtgattaccttgccggcgttatcttttatggcgccgccaatgtcggtgacggcgtatttggtgtatccgtaagaggttgaacaccagttcttcaccagcgtcagatctggtgtgttgtttttaagtgaatcggttgtggcggtaatgtaatcccaaagacccattggactctcgctctcttactggaacgtaaaacgccaaggcaaaggtaaagttgaagtcaaatcttcacgtggaagaagagaagaattttgttatttatatattaagacccacttaatgcagtaggaccgcatttatacaacttttgttatttgtattcttatgaaaacagttccttattttttatttttttcataaaaaacttattcaattcttattataattttttacgatttctttttaccttttgaaaaacagttcccttaattttttattttcttaacaatgtttttttttttttttgagagaaagggagcccgctaaaaagaaaggaaatccactagattgcaggggtcatcgcctatccaaatagctacttcatctgaacctgaagcccaatgcgccaacttatcagccagcgagtttgcgctgcgattgatgtggaaaatctgagctgcagggaaaagagacaaagtttccttgatttgccgaatgagatctctaaacaccgagatatcgtccttgtggtgacaaatggcatcagttactgctttacaatccgattctacttcttgaaccaaaaaatgctcgtcaatacaccagcgaagcagagagagaagagccttagcttctaaagtggcgacagaaccgcctccataatagggttgggcaaaagctgcgactaccaaaccttcactattccggattactccaccgaaacccacttttccaccattcttgggaactgctgcatctacattgagcttgagagtgccgggggctgggggaatccaagatgcagggacagtggccgaactgggtcggcctaggagagatgtggctgacgaggatgcgatataatctgccaaaaaactttgagccagactgacaattgcatgaggttgatcagatggttgacctttgagagctttattcctattaaaccaaataaaccaagcgatacacagaaaaagatctacatcttccttgggaaaagatgtataaatttggtgagctaaatcatgaaacaaaatttcaaaagagcaggaaaaaatgtaaggttgaaattgcgtacctttccagactcttcggacactctgacagtagaacagcgcatgagacaccgattcttcagggtttccacaacggctacaacccggggaatggatgattttcctaaaggctaggttttttgcagtggggagggtttggtttgtggctcggaaagcaaagtgtttcaccttggcagggatcgaaagatgccaaaggattttccaccaaggcgagggagaggaggaagagggaatgtcaagtgggctagtagaagaaaaactaaggtgatagcctgatttgactgtgtaaaatcccaagaagtttgaagggttcccagatcagatcatcctgggttggggtgagggggagaggaatagaaaggataatttgggccacatgggggggaaaacaacgctgaatctcagctgtatcccaggataaagagggggtgatgagagaggcaactctgtcagggacaggggataatggggaaatttatcgacaacccggaatccaataatctgtggtggtgcaagtgttctgtccattgccaattttggagatgaggcctttgcgtagcagctcttttccccagcaaatgctacgccaaacgaaagacggagaatgccccgtggagctactaaggaaagaagactgagggtagtatcgggcagataaaattctggacacagtggagtttggttgctttaggatgcgccaggcttgtttggcaagcatagcctggttgaaatggaccaaggaacgaaaaccaagcccgccatctttcttggaacgacagagcttattccagctttgccagtgggttttgggacggttgttttcattagttccccaccaaaaatttgccatggttgattcgagggagcggcaagtggcgaccggaatgcagaagcaagccatgctataagtgggaatggcttgaatgaccgattttaagagaatctcttttcatcctttagaaaatactttgttccgccaattatgaaggtggccccaaactttgtcatgaagctaatgaaacagttgctttttcgttcgacctatgtgctgagggagccccagatatttttcgaaagatggacgaacgggaatcctcatgaaatcagaaatcaaggtttggtccctcagctctacattaggcgagaagtacagagaggatttctggaagttaactttttgcccagtggccctttcgtacacgtccagaacctctttgatgacgttacaagagctaatggaagcttgacagaatagaaaactgtcatccgcaaaaagtaggtgggagatggctggggcccgccttgctactttaataccaggaagggacttatttcgctctttctgacgcaggagagaagagaatccttctgcacagagaaggaaaaggtagggcgagagagggtcaccctggcggattcctctagaaggggaaacacggccagtaactttaccgtttaagttgaattggaaggtagtcgtggagatacaagagagcaccagattagtgaatctgagaggaaattggaatttacgaagaatagcatcgatgaaggaccactccaccctgtcaaaagctttttccatattgagcttgaccgccatccaaccttttttacccctagtttttagcttgatggaatgcgcaacttcctgggcaataatgatgttgtccgaaataagtctacctggaagaaaagcgctttgattgggggaaatcaaagtgttcagaacaagtttaagccgatttgcaagagtcttggagataactttgtagatgatattgcagagactgatcggcctgaaatcagacagggaagaaggtcgtttgaccttggggataagggtgatgagagtggtatttagaggggtgatgtccccattcccattaagaaagttggttgctgctttgagaacatcatgcctgacagatgtccagttggatttgtagaaattagaattgaaaccatcaggaccaggggctttatctgaaggaagttggaaaaaaactttttcaatttcgtccaaggaaaactcctcagcaaggaaagatttgtccatctctgagagagagattgtaatgccttgtagggccttattgatatcctcctccgaggggttcgtggacgagaagagctggttaaagtgggattccatttcacgggtgatgccctcatcgtcagagacaatacctccattggccaggtggagcttattgattttgtttattttctttctgtgagaggcatggcgatgaaagaatttggtgttcttatcaccctgggctaaccactgggtcctcgctcgctgtttccaataagtttcttctttgtacagaagagagtcaagcctggattggagctcctttatattcctgatagtattgtcatcccaaacaggagcagatcgggcaaattccaggtctttctcaagcttggttatatgcttcttaaaattaaaatcctttttgtggttccaattgttaagtttctccgcacaagaggcttgagtcgctactagcttgaggatgg

SEQ ID NO: 44751 - DNA, 1376 bp, Cannabis sativa
tgaccctactgctcctccttccttcatcatggctgagctcaaaagatttattcccaatcaacaattaggtcactttcttatctttcttgctttgatcttaatgcccttttattttctttctcttttgatcaattttatatatatatatcattatgaaatgaagctattatctttacctgcaatcatcatcatcatcatcatcatcatctaatctttctggtttaggttttacttgatcaccatttcaatgccaatgtgacacataattgaaaacgaagcaaaatcaatcaatcaattcatttagttttgatttgaacacattatttacataatgggcaatgctgattatctcaattaacaaccactcttgcattaacataatgattacctcgtttattctatttagatttcttcctccattatataatataataaataataaagttttaatcttttttatgcattggtttaaatggcagaccttgaacagatacttcaagaagcacaacatcgttggctacgacccactgaaatctgtgaaatacttcgcaactatctgaagttccaattaacaccagatccacctgttaggcctccaggttctttactcaaaattatcattatatatttatatataatgttatatgtaagtttagatattacactagctgacaattttgtacagaaatgtggtgattgtactgtgttacctggaaattatgatgttttttgatccactagaagtaggctttgccctttttgattttggaatatttttgaggtttttgctagttcatcttaaatggaattattaatattcttattatattagtgaacataataataactcaatttgttttaattagttcttgatattacctagtgtcttttttattaggcttaacatgcattatagttacttatgtttaggggtttacttggaagttttagggggttacttggaagttttaagtagtcttatgattgcaaaaatttagttttgaagttcctataaatgtgatttaggggaacacttgaagtactgaacacaaggttgggtttatgttgcccccgacctgtccataagggtcgtcaaaataaggcctcaatgtgtagatatcgtactagagagtgctttttcaggcttggtattgaggggttgacgggattagatttcttctcttttaaaagttgcaactttttgggtcgattggttccaaaattgcaaaaaaaagttatattcttcctaggaatcaaaaataagattctagtgcatagtcaaacatagtaatataagtttccaaattatcaaattaccttcttcaacttccaataatgtgaaaactgtaaactcctcataccaaacggtccttaga

SEQ ID NO: 44752 - DNA, 1128 bp, Cannabis sativa
aatctcaatagttcatggggaatttttaacggtcagaaaagtttaaataacatgatttagtacatattaaaatttaaaaggcaaaaattaattagccataactaaaactacacggggtacgtatacacgttgggatagagtagagactagagaggaccccccatgagatcccatctcagcagctgtcacgtgccatgttccataccaagtttcacctttctattctatctacggttgacccttcataccaccaacctcttcattatttgttttttaagccgttttatgttaaccttttccaacattttttttcaacattaattcaagtgttcattaaaaatcatttcataatcaagtaattgaacaaatcttttctatatttatatataatgaagaagggaaagacaaattcaaatattaagatcaatgttttgtttctcattcgtatttgatccttaaatttattttattaatataataaaacatactaaaacaacagatggatggcaatacaaatttggactctgccgtctctctttaattaaatttaatcaagtctcacccaatattgtttgacaaagtgggaatatttttaaaacaagtcataccattatcccaaatgcagcagaggaaaaagacaactaaatagaaagtggaacttgtcatattaattgagcttttcaagctttcagggcacatacacttgcatcgcaatcgtgatcatatgaccaagtttcactctctatatagttgtgtttttcctgaagcatcactcgtctcacattcttaaaaagtagtcatatttattagaggtgagatttgttttagtaatatcatatctttctactatttagtcatattaactgaaattgggctatgatcttgttgtccagacacgcttttaattagtttgaagggataattacatgtgaaaaaaattatattttcacgttttaaggttttcttttttatatatatttttacgattttctatagaaacaacacgaaaattacatcaaagtaacaggaaaataatatttaaataacatcaaaataactacaaaaaataacatgcagataacaaaaaatcaacaacaaattaacaagagtacaacataaaaagatcgt

SEQ ID NO: 44753 - DNA, 2484 bp, Cannabis sativa
attaattaattatagcatactctgaatttgaactaaaaacaaaagattttagggctcgagctagaacattaattattattaaggttcatcaaattaactcacaataataaactgcatgatcctacatatggtttatccaaattataggatcaatgatgattattataatttttatataaaacattaattaattagacaaagcataaaacaaaacaagtacttatataattatattcaaactatattaagtggaaaaactttagtcctatacaattgtttaatttaattaagtaataataaaccaaattaattatacatttatatatcaagcccatctacgttacaatgttctcttcaatcgtggtttatgatttatctgtctacttaattataatatataattaaaccacagtactaaacataagtcatacaatttgtgttctctcttccatttacaggtaatataaaagggaagaaaaataataaaatcaagaatcttttgtaacagtaatacttactgactaacaataatagtaaaattattactgaatgagaggctgattattaaataactaattaggtaataatattattattatgggcttttggggtgggtgtggatcccacaacatgaccatatgctgactggtcatcgcgaattcaggcattgagaagtgtaggaattaagttaggaacagatttctttatttttttatttaattatatataatttaatttaaataaagtaaattaagtagagtaaataattgccttacactcataaatatgtgattaggtacggattgaaaatttaagactacgactactctggtatggtagtactactgatatgtacattactttaatttctttgtattcttcgagcaattgattaactaacccaacacaacaattttgttttaactcacagactcagtcatatattattggtcaaagcattggtattgagtattaatggtgcttaacaaacaccttttgtaggtaacactttaagattgattatagcaatatttcttaaaagttatttttttatatgggactcgatacttattacaacaataacgacatgatactgaaaaaaaatgttaaaactaataatagcttttagtaattctctattagtcaaaaccatttgagtcttatcaaactatgatatttgacctgtaagaaatattttatttatttatttattttgataatagaaagtaatttatttttcaacacttaataatttggtaaaagttgaacccacaaaatagtaaataaattaaagttgtttcctccctgtgtcgttgccctagagggccgatcctgagttgatttaggttttaaaaaaaataaatattttagacttttactataagaataaatgatattttctattttttttaaaatatatatatttattaaaagttattttttttatttgggcccctaggatgagtgggctctaggcgtgggtctagcttgccttagcctagggtctgttgccctagctgcaggtcttcccttgtgagtttctcgattgaagctcacttgtttcttcgttgaagctagtgctgctccattcgtggaatatttatcctttctttcatgccagcgtggtattagaatattttttatattaggcataaaattaatttattaattttaacgtgtatgagagataatgaatattttatattcattgcatttgattccaattgattggttgatattctatatatggtcagattacgatttatcaaataattcattttccgatttaattttctgaattaattattaaaatatcttgataactaatgtggcacagatactgaggagtatctcaccaataaatataaagccttggtcctcgagctgctcactcgttctgtgaaaatagctaattccatagatctaaagggagtagagagcttggaaatttgattaccgacacaaactagtttctttttcttttgtagatccaaagatcgtgtgggattgaagcttaaataatcaatgactggagatatttcgatcatttgttcacaatgcatatatgttatacccaaaatttagttatactccagaagctgacacgtgtccaacaaaaggtataggaatcaactctacggatataataatattatatgaataattgcatattaaataactcgttattcaatacatagaggtttgatagataatattcaaaactcgttgactatatggtcaaaagcgagacaaggataataacaattgagttaagattaacgagacatatgcatgcctcagaatatacagacaagaagggggacattcatccattcgagtagaatgaatgtaacaacataactgtctcgcattacacatagcgagaagatcacctcactatgttaatgccaataaaagaatatgacgagatgatctacttcccaacacttagtattttttttattaagatgaacaaggaggata

SEQ ID NO: 44754 - DNA, 2460 bp, Cannabis sativa
taagtaatatggttagtataaagtattatagctaattaaaataaaagtcccttatgaatatcttccaattataaacaagaaaagaatatttatactaatgatgaacaataatactttattccattttcgacatacatttataaggatataattgtatgtattactattaagaatgttatattaccattttatagttctaacgattacacaaaattttttttttaatcataacaaaatttgtatttaaaagtgaaaaaattgtgactaattaaaatcattattatattttgatgtgaccagtgacagacccagaatttttactttgtggggacttatttatcattaaaaaatatttatacttatattataattacttttactagatttatttaattttgtgggggcttttttattattttggtctataattatcaaattaaaaaaaattacatttaattttttaaaaagcaatatttttattagtgggggctattgataagagtaggtccgtccttagatgtgactaaaagtgcaacgccctactaggcacactatcatgatttcaagttactgtgcactattccaaccttcactgactatctttagcctaaaacccatccctaacggattcaatcttttccagatcaaccatgatcccttctttactaacaatgtgccctagaagttcttctgggaatacatctaagaactcttataccactttaatgtcctcaggtcaggtgatatcttacaccactactaaaaaccctaagtttccattctgcaacaagcctgtagtcttcaccaccaagatcaatgggattccagaactctgaacaaatcccacaaacacgaacggttatttatcctcaggttgaaaggttaacattttttgcttacaatcaatactagtagcgtacttggtcaagaaattcacttatagtataatataaaacttctctatacttaattccactaggtcagtaatcaattccctatcttcaatcctaattggcatagacctaatcgaccttttggagataactaattctccaccaagagcaggttctaaatcctatatcataaatgtcacacggtttatccaatttatcaatgactttggccgccacataagaatgtgtggccccaaagtcaaataataaagagtaaaaagagtggttgaatgaaagttgacctatcactactgaaggactagcttcagcatcagcctgggtaagggtaaacaccctagctagagtgggctttgcctctgtcctctactcttctttctttaattgtgacagtctcttttgtaatgtccaactacaacacactggaaacatgctcgacctttacactcacccagatgatgctttttacaattggggcattccaagtaagtgtaacgactctctgaaccatcctaccgattatcacggtcctgacctcttattctgactcgagccaccagacgtaaatgtggcttttcttttttgataagaggttgagtcgccaccactcctaccaaaaccagaggtacgtaggaggagcaatggccccactaacactaggagtctctcagggctcttgagtacactctactgcgccctcagctcatgttgccttccctaccctatcaacataggtagtttcatcatccaatgtaatcatcaaatcttgtttgatcttaggcttcaacctatctagatatttttcattcttactgaaatcagttggcactattcccgaggccaacctagctaatatatcaaattggttcatatattctataactgacatattctccccttggaccaactgagtgaatttttttctctttgtactacaaactgccttattgtagtagttcgcattgaacaattcttacaattctttctaggtaatttttgtgacgtcccgggtgaaggataccatgtcccactagattagggcatcctcctggaattagaaggtagagcataagtcactctatcgttgccactgactcccataaaattcgaaagtaatgttgataactatcataacatccgaaccttccaaaaagactggaagtgcttgcttacggaacctttcatgtaatggttctatacgatttccaatagcaactggctccccttgcaatagcagcctacaatggttttacattacctcaaatgcgtgccctacctcagccataaacattagggaaaactgaactccctgactaccactagatccgaccgagttaccttggcttctcgtgttttgcctagcatacattttattagactagcctgtgaaaccatgagttagcctagttagattgcgatcaagattaaaatctaattaccgcttacttgagaaaataaacatgcacctatattcatctatcatgctactaacatgcttcatattaggcttttcttaatcatactagtaaatcaaactactaaagcataa

SEQ ID NO: 44755 - DNA, 4119 bp, Cannabis sativa
gttgggttggccgggttgagggtattttaatgacccaacccaatgacatcggcctagagatttttaacccattcacattttaaattttttataatccaacccattactcttttcctggtgttcccttgaggtacttaggaattcggtagacaacatccatatgttcctcttaaggggttattgaggaattggctaacaacacaaagcactgaattagttttctcacaaggcattggtacctttctgtatcaacttttactccatttgtctgtgctccacgtttggtattgaggtccataggtgtgtcaacatgtttgcatccaatcatccctatttcctgtaagaggtgaagggcatactttctttgattgactaagattccttggctggatcttgctccttccatccctaagaagtttcttaatttccctagatccttaatcttaaattcactggaaaggagttgcttgagatgagtaatttcctccatcaaatttcttgtaaccacaatatcattgacataaactattaaaactattatcctttcacttgtcgagtgctttataaacaaagtgtgatcagactggcattaagtgtagccatcacccttgagaaccttagtaaacctctcaaatcaggctcgagggaattgcttgaggccgtagagagatttcttgagtgtgcacaccttccttttgtgaatctatcctcaaatcctggaggaatgtctatgtaaacttcttccacaaggtcgccgttaagaaatgggttctttatatcatgctggaacaaaggccattctttgtttacaacagtagacaagagaacccagatagtatttaacttagaaactggagaaaatctctcttgataatcaataccataggattgggtgaatcctttggcaactaagcgggccttgaatctttcaattgttccgtcatcctcatgtttgattgagaagatccatttgcacccaatcgtgcgtttggcaagaggaagatctgtaatgatccatgtttcattcttttcaagtgctctaagctcttccattgaggtagccttccattaaggaatctgaatgacttcttagaacgaactgggaatttgaacttggtccaaggaggtgataaaagctctatatgtaggagataagcttgagtaactcagatggttgcgaatggggcgttgagtgcaagaacagaccccttttctatgagtaatggaaatgctaagattgtctggcacattttcttctataataggctcaggtctaacatcttctcgtgtttgttcaaggatgaatcagattaaattagattattgaccttgttgagtcgcatagtggcttgttcaatgcttgctggttgctttttttttcttgtgtaaacatggacttttttgcttgggatatggaaagggcttgaagggatttttttcttcttggctcatttgactcaattgaatggtgaggttggacctctttgcttggaatatggataggatttggagagattggatgagtagttcttggctcatgttagtcaactgatagtttggagcatcagaaacaggagttggtgacgtttcttgaaaaatggtgctgcgagtagttaaaggataattagaagtatagtcaatgagagaaagaaagtcccaattttgtagttcatgattatggctctccccctgaattacataattggtgtaataagattgttcttcaaagaaagtgacatccatggagtggaacaactttttggaaagaaggcagtagcatttgtagccttttttatcggattagtagccaagtaaaatacatttggtggtgcgtgcatcaagttttcttcgatgtgaggaatggacatgaacaaaagcaacacaaccaaagacgtgaaggggaatttaagatacaagatgtgagtgagggtatgatttaaggaggacttgcagcggtgttttgaattttaagacctgtgaccacattctgattatgagatatgtggcaatgaggactacttcaccctagaatctttttgaaacatgagatgaaaaaagtaaggagcgagctatctcaagaagatgacaatttttgcgttcggccacgccatttttatttttgaaaaagagagagggacctcttgtcttagacaggaccctccccgttatctattgaaaatcctcacttgttgcataggaataccttgattacaaaattgcccaaaaacaaattaggccaaaaacaacaaaactactgctaatacatcaatgattttcattctctacataaatctaaaaatgacaagacctcaaaaaatctggtcttaaatacccaggtagctgcccagaacttgactttctcccacacatccgcttctgaacttgtattaccttcaaaaattctagcgtttctttctaaccacacaacccaaattattgataagatcttcgttctccataactttgttctacgtttactgctaattaatttgccaattggcatttgtggtaccgagcttggcataacccacttcaactcaaattcctttgtcaacttggtccataatcgtctaacaaaattacattccaagaacagataccattcgggggacatacacaggtagggctttacaacagacgcaccatccagggtacatacataggtaaggctttctcttttgcatcttatcatagacgttcactttgtttaaagacacaagccagcataacattttaacttttgaaagtgcacaacttgtccataagattctcgtctagcacaaaccagctgacccaaatttgaagtaaactagttaaaggctgattttcaagagaaaacccctgaaagatctggcttccaaatacgactatcatacgaaatatttaccactctaacatgtttcaccttttgcaataacaaaataagacttggacccttacgctccagtagattccttctgaacttgacgtcccagctctctacccagccacctggcaacccttcatcaataatcagtttctttatagacagtttctttatagacgcattcctacctgtagatttattgctaagtcaaggaaagcctttatcagagaagaatctccaagccatacatcttcccaaaattgaaacctgtctcctctttcaattttgatgtgtaccagtccaagatattcatcatacatatatgaaatatccctccatggacctttaagagacaatcgacatccttttatgccacagcgaatttggttctagaggaaatatccacaatcatttcattagcatacttttgtttctcatttccaacctcccaatgcccaagccactctcatcccgaggtctacggacctcctcccaagccaccaagtgatctccacccgcaaaatccgcaccctcccagaaaaatctctcatcaatttctccatagcattggtgactacctttggagctttgaacatggaaaagtaataaatggaaaaggatgaggactgagtgaatgattgtggagagatttgaaggagccacgtgtgcaatctcatttattgccaagtaataaatggaaaaggatgaggactgatacttctaggtagggacactagaagtatcagtcctcatccttttccatttgattgttactgaaaatcgacttactccacaacttaatattttcttttaccatcttaaatttactcataaacttggtccccgaccatcctgaatccactgcatctttccaccatacctcaaaaaaattggggaaagagttgtgatccaaccattggttacgaaaccggaacagagcagggcccatttagggggttaggaattaaggactattgggttgtgattagagactagtctcaccaacattttttgtctgagagaatatgatattccatttattactgattaagaactgatccagtatgctacagatgggtaccgatctttaattcgaccaagtgaaccttctgttgttgagttttggatccattagcctcaactcccgaactaaatcatcaaacattttcatacttttagtacaagaattaccatttaatttttcttcaactcttcttaccacatttaggtctccccccccccccccccccccc

SEQ ID NO: 44756 - DNA, 1880 bp, Cannabis sativa
taattttaggttatttagagttcatactcacgacttttttattttacacaaaaaaaaaaaaacttaagtctcaactttcctaggttttaggaaaattcaacaccattgagcataagagcactcataaccgtactaaaaacacgctatatgagatgttctaaactctttcattttaaagtttattcaaaatttattatttatgctatgcatttatagaatattatttattgctctaaatatattttattaattattttagattttaataattatttttgtacgaggatatatgtatatattaatattatatatttgaaatgaataaaatataataatttttgtttgtgagattttgaagatgtattttaaagaagttgatgtatagtgtaatgtaagagtgtgattttaaataaagaaaatagaattttagtaatatattttaaagaatggagtaagttttggtaatatatataataaaatttaaaaaaaaatgaagctttgttaatatattttaatgatactcttttggtacttgtaaatttaatatttattataggttattttgatgcaatgcattgatatacatttttttttataagtgaatagttataatttaattttttttaatgtaatgacatatattgtagttattaatatatattgaaattttttgagaatttcagaataatttataataaaaaaataagataaaataatttattccacatgtttataaaataaaaataacatgtgcaacaatttaaactttgttttaagtgtaataaattattttgaattcaagatatcttaaacttattagatgcaaatttgaatccaaattcaatgctcaaatttcatgatatacaatatattatttacaagtgcaaaggcaatatcaaaatcatttttacaaggatgaatcaaatgacctcacctcacacaaaacaaatacttcatcttaaattcactcaagggagaaatggtagggaaggccttgtgtgactcatcagctcaagataatgaaggaaaatttcccaagcctcatctcaaatactcttcccattgaactcttcttctctttcaactctgcatctcggattctctttcgcgtcggtaaacatacattgaaccaagaacaactcttccaattcttctgattcgctgagttcttttactcatacccttcttcttctccttctcaacacttccttgtgagatagtcaaataatgagtccacaacaaaggagccatagctgcaatgaactgtactgatatccccaaaggcagccttgaataatcacttgatgttattccaagcatgagagctaatccaatgcccaaacaaccacttattattgacgataagcaaagagctgatgctaagaatgaagtgagtgaaccttcacaacctggtggacatgaactagcaaataaaactaagaaaggtaacagcttgaattgtgcaatggtttcggttagtccagagaaaataagagcaaagatgtcatttggaattcccatgttgagattcatctgtttcatcaaaataagatcaagaagaacagaaccagcataaagaatttgaactgcactaaccaaattcctcatgggaatttctctccaatatcggttataaagaacagtcattgagagaagcaataactgaccaactactcttgacaagccaatgattgaagggtcaagatttaaacattgtgtttggtagcaaaagattgatcctgacagacttggaaccgaaacaatagaagctattatccaaatgagagggcggtaaacactttcattgctaatcgcgattcttaactcagaaaactgtgttctaatgctatcaagaattgatttttccacaagtttggtat

SEQ ID NO: 44757 - DNA, 2550 bp, Cannabis sativa
atagtgtcagatggataatcatcaatagaggaactggtaatatcaacagatggtaaaacaacagtagtgaaaggatcaatgttaccacgatcttcatttagcttcaagaaaggaaaaatgttctcatgaaagacaacatttcttgataaaaaaatttgtctagtgttgagatcgtacaacttatatccttttactccttgaggatagcctagaaaaacacaagcttttgctctaggagcaaatttagtcctatttgcagtaagagtagaagcaaaagcaagacatccaaaggttctaaaatgagcataatcaggttgtttttcaaatagaatttcatatggagatttattaccaagattgggagagggagtgcgattaatgaggtatgcagatgtcatgacacattcagaccagaatttaagtggtgtgtgtgcttggaagcaaagtgcacgggcaacattcaataaatgttggtgtttcctttcagcaatagcattttgctcaggggtttcaacacatgtaaaatcatgcataattccatattttaagaaaagatttttgaacacaagttcgggagcattgtcagaacgaaatttctttactttacccttgaattgagtctcaacataagctaaaaattgaggtatgatctcatgaacatcagatttttgttttaagagataaatccaagtgaatctagatcgatcatcaacaatggtgagaaaaaatctaaaacccgaatgtgattgcacatgatagggtccccatatatcacaatgaattaaatcaaaagcattatcagcaaaagtgatattatttttaaagggaagttttctttgtttagccataggacatatgtaacaaggagtatctttatgaagattagaagtgttacaatttattttgctatctaaaagtttgagacatttatttgaaggatgcccaagtcttgaatgccaaacttcagctttgacagcaagaataggagaagcatgaggtttggaatccaaaatgtatagaccattcttggattcacctttgccaatcttcttcttgttggcattgtcctgtatcaaaaaatgattagaaaagaattgaacatatatattgctgtcattcacaaggcagctaacagaaatgatattgtacttgaattttggaacataaagaacatcattgaggattaaattatttgatatgacaatggtgccactttgattaactgtgatattttcattgttgggcaaataaagtctggtaggattaacataacatatgcattgaaataatcttttatcatagcatatgtgtcgggtagccccagaatcgattatccaagaatcttttaaatgtgtattggatatacttgaaagaatgatacctgggttacctatattgttaccagtttcattgttggtggtattcgaagtctgaatagccaaaaggttcagcagctgctgatattgcgctgctgtcaactgtggcagtatagcttgcccttcattcccagcagtagtgtcattgttggtctgaacttgattggcagaagcatcctttcctttgtcatttttgtgaaaaccaggagggtaaccatggatcttgtaacatttctcgatagtatgtccaagaatgttgcaatgagtgcaaaatggacgatttcttttgggagggtgagccttattgccttgagaattcggtttattactgcttttgtctccttgaaaggcaaatgccatattcgaatttagatcggctgtagcattgttgttacttttctggttttcttcttgagttaccaaatggaaaactctattaacttctggcaatggatccataataagaacattgcttcggacctgagaaaaagagaatctgaaagtcccccattaaaaaaaggacattatgtactccatgtggtggtgttcttggagctttttaacaccaccgcatgtacacccattgcaaacacagttgggcctatagttagacaattgttcccaaacggttttgagcctagtaaagtacatgctaacactttggttttcttgtttcaggttcatcaaagttttcctcaagttgtatatgtgtggtccattcttttgatggaatctaacctttaaatcagtccagatggctgcagcagactcatcatacaaaagacttgaggaaatttcttttgaaactgagttcaagatccatgaaataacaatattgttatttctataccaagcattgtacataacagaattagaagaatggggtttaggaatagtaccatccaagaatccaattttgttcttaacagatatagctaattgcatagctctactccatgacatatagttgtcttgcccagttaagggctgtgatacaagtatgttacctgggttatctccatgatgaagataatagggatttgagggatcttcaagagggttcctctgctgcatacgattgttctgcatatttggtcccactccttcttcgacagtagcagtaacactatcatcgccagtcccttgagtttcagcttgattgtcggtttccatg

SEQ ID NO: 44758 - DNA, 4558 bp, Cannabis sativa
tgactgggcatatgattgctatgcaggtgggaaactcgattttctagttgagaatgatgatgaagcatcacaagacatgaaaagggtggagaaatatgtgatggttgcattatggtgtatccaagaggatccatcacttagacccacaatgaagaaagttattctcatgcttgaaggaactattgaagtttcaattcctcctgacccaacctcattcatcagttcaatatagttccattcccacatttgtgtacaattcctcctgaactattgaactattgaagtttctttgggaaaaactagcactagagatgcttagaaagtgctctggtctgccattagctatcattgtgctcgctgggcttctttctaagaaacacaccttatatgattgggagctgatgaaagaaaatgtaattcgctgcataggtcaaggtgattaacaacatgatgatgatttgaaataccgtagtgtttcgggggtgttaggcttgagttacagtgagttaacatctcacttgaagccttgttttttgtacttggctcgttacgctgaagatgtcaccataagagtaaaatggttttgtcatatactcattgcagaaggttttatatggttaagaagaggttgtgtggaaactttggaggatgtggcatatgattggttgagtgagttggtggtgaggagcatgattcaggtaaaacaaatgagtttaaaaggaaggataatatccttctccattcatgatctcatgagagaattgtgcgtgtctaaggctcaagaagaaaactttctacattcaattgattgtaggaatcaatgggaagaaccaatagaaacaaatgtacgaagagtttccatctataataatgaaagaagtaattatgacattgttcctatggttcaaaatatagatggctctctgagattctttgctctacatgggttaagaattgtgtttgaaaaatgagtattgagacatgtatgcaatcactttttgatgcttagagttttgattattgatgggatgttgagcaatgaatttatcttgcccaaagaaattgggaatctaatccatctaaggttattaagtattcttagttggcggattgaaaagattccatcttcttttggcaatttaagatgcctccagactttgagagtagcaacacagagtgctaatataccaaattcaatgtgcaagttagaacagttgaggcatctatatttttacactgatgcagttggtggtatattagtgggtattcataccaagaatctgggtgtaagtgattttctccagctgaaaagtctcaataaattagaaatttcagtgaatgaaaattttgacacattcttatacaatccccaagctctcacattcactagtcttttttctttagcagtgggaaattatacggttaataacataaatattgttccattgataagattaccagaatgaagttaaagttgtttagtctcaaacttgaggatgatccaatgccaacattagaaaagctaccaaaattaagagtccttgtcattggatatgaaacctttatcggggatgagatggcgtgctcaagaggaggtttccctcgacttgaatctcttcagcttatttttatgaaaaacttaaaagagtggaaagtggagatgagtgcattgcctagacttgcctatttgtgtattcataaatgctggacactgaggagtgttccagatggagtaagaaacatttctacactcaatgagataaacatatctaatatgcctaaggaattcaaagaaaggatagaggaaggaggagaagatttccataaagtcaagcatgatcatgtcctttccttatacataagtacaagcttctttaatcctggtttttgtcttttggttttctggtttatgtttagttatgatttattttatgttcgttcttcccaaatttgtaaccaagatacataagcgaaggttagtaataaacttaggaggggtcagtctatgacatatactaaatattatcgaaatatatattgaaaaactcactagagtgcaatattatcacaataaacaactcttataccagataataagatggtgagggacatggtggatcactcactataacaacaccttcaagcatttgaacaactcttctcatatttggtctaagagaaggaatttcttgaacacaccacatggacaccataatataaagctctaacctcttcttatcacccaaaacatcagcttcatagtccacaagaacatccaatgacccttctctaaaacaatcataagcccaatctgtcaatatctcttttccatcctcaccaatctccatatccacatttcttctacaacaaacaatctcaagtaacaccactccaaagctgtacacatcgactttcgaagtaatggccatgttgttcctaaaccactctggtgcaacatacccttttgtccctctaatggttgtgtgtgtatggctttgattcatcatcagaagtttggccaaaccgaaatctgatatcttgggattgttgtactcatcaagaagtatgttctgaggctttatatcacaatgaatgatttgactcatacactcttcatgtaaatataagagcccttttgcaattcctaaagcaagttcacatctttgattccaactaggctttatctcaccgaaaagaaagcttgctagagtgccattgctcaagaactcatacaccaacaaatgattcttcccatcatcacaatatccaagtaggcgaacgagattcttgtgatgtgtttggccaatggatttcaattcagccttgaattctctttcgccatctttaagaaccgaacagagtctcttcacagccactgcaatgcttgcattagtttgtatgagaaagcctttgtaaacgatgccaaaagctccacgtcctagctcgtctttgaaaccatttgttgcttcttcaagctccttgtagctaaagcaatgcaaattcgactcgggaacttcttgagggggatgagacctttcattcttcttcttgtgaatgaagaaaaaacatgtacatattgcaccaagtaacataaagtttacacaaacggaagtacttaacatccccaatagaactctaatcaaaccactctggtttttcttgacaacttttgttacatgatcattagataaagtagtagagttaccttttcgaattttgatgaaagcaatagatggacggttgtgatcaactcttccatttgataagggaaacctcttcttccaacaagttcctcctctaagaacagcaacagcacacaaacaatcattcaagcaagaatctttacaagtttcccttgttgaagaagctattcttatgtaatctgaaccgggccaaccagcatttcttagctccacaacatcatatgcatctttacctgaactagttaactcatcttctttacagccttgaataaaatctggtttacaatttccataactgtcattaggattgattagagagtacccttttaagcactcacactttggtctcttctctttattgagtctgcaaatggtattgtatccacaaactccaattccttcccaaacaacagtcgaaaagcaaatgtcattcggtatagaccaaagaggtgtccaactcacattgctactaaatttcttgggatgaaaatattgtgtgaaaaccccatcaaaactaagtgttgctcgaacatagtaatccattgctgacactacttttccccgagttagaatcaatctttcgccttttcctatggaaacatacaagtaacccgattcattgaagactacttgtgttgttgcagtccctttagtgatgttagttgcataataaggctcattggcataattagaaggcaagtttattgtgttgagcacaacattcccatcttcccttaaccgaaattggaaccttcctttggaaaagttagactctgattgatgagatgaaaggacttgtcctatgtccaatacttgacttggtaaaattgtatctgttggattcttaaagctttcccataacttctttgaattgttaccttcaagtacaaagtttccttcattactaataacaccattaacaacactttcatcaattgactcagatttccatagctctttgccttgaggagttgtgagaacaagtcctgtttcgggggttaacaccacgtttgatcttgctgcagctggtttatctctattggcacaccaaattatagttttttcaggtatcttggcataccatatgcatagtaagaagaagatatcatcttggttttgaagctggtgaaaaccgaaagcaaactcgccattctgagagagccaaggggaagaattctctgctgcgaaaagggaagatcctaagttgactttgccattaatggtttgagcaagaacttggtttggtgatgggaaaaagaggaaaagaatgagaacaagatgaggagaaagagccatgtattgttgtgtgtaactagttatgatatttggttacttattactaattgtagaccaaa

SEQ ID NO: 44759 - DNA, 2312 bp, Cannabis sativa
atatatattggttcaagtcctatagattcatatgatttatggttatactctaattctaaaacactatcaaattttatttattgattgagcaagaacattgtacaatacaatcgaaatcgattctctcaaagtatttatctttcatacacttacccaaagatcttcttcatctacagaaaattcttcatacaaaactaaaatccaatctctctcttttctctgtatctctctctacctctcaatctctttcttcaaaatcaccctctcaaaaactcgtcagtgactctctctaaaagataagtattggtggtatttatagataaggaatatggattccaaagtcaatggctgcaaatgctaacttgttaagttagttacgacttaacaaatttaacaaacttttcgtaatagtatctccatgtcagcttaaattgaagtgctttcagatgagatgtacgattcttagaagaaaaatcaaagcgtacgctgacgggtcttcctggataggaatagcgacagctgaagtcgattattcgagactcccttccaggaggaacaaatagccatccaaaactcccttctggaggaagactaactttcttgaaaaaaataacttttagaaacccttacatttagaggaattataccacaaattctacctaatttttttaaattaaaatatgacggtgatgaagaagaatgcagtcatcatggttggtgtttcagatatctcagtatactaacttcagagattgataaggtctaaccaatgcttgaacttgtttgcttttaagaccttggtcctaacatcaacaatattatttcctgatctgaccttctctaattcaaccaaaccttcctctatcttctttctaatccagtagagttttgtgtctatatgtttgctcttttcatcatgattgtaaagattgatggatgactgtctatccgagtacacaccactctaccttttatttgtttcaattcaactagaattccctgaagccataatgcttccttgaatattttcgtagtagccataaattttgcttctatggtggaaatggcaaccacaaactgtaattggacctcccagcataaacagttccagtttgtcatgaaaatataagaagtggttaattttctcgtatctctattcgaagcataatcaacgttcatgaaccctttaaactccagtttccttttgctttctcataggtctaaccataatctcaaatggcctttaaataccttaataaccctttgaggaccttccaatgttcaatgcccgaattagacatgaattggcttaggatgcttagagcatgagctatgtcctgtctggtgctcatcatcacatacattaaacatcgtaaaagcattgcgtagggtacatctttcatttcatctttctctttcgcattatttggacactgctccttcggcaacaaaaatttttcgcctaacggaatgaatgtactctttgcatattccatgttgaacttctgaataactttcttgatgaacccagactgctttaagttgattatcccttccttcatattccttgaaacttcaataccaactatcttttgaactggtccaagctccttcatctcaaattctctctttaacttggctttgatacatttgatcgcggatttgtctttgctcattatgagcatatcgtccacatagagaaataaaaacatagttgtagattgctctagattcttaaaatacaaacagtgatcatatgcgtatcatttgaacccaatttgttgcatataagtgtcaaatcttttattctattgtcttggggactgtttcaaaccatgtaaagacctaatgagcttggatactaattcaactcctttgtcttccacctgaaacccaggtggttacttcatgtagatctcttcatctaagaatccatttagaaaggcaattttaacatcaagttgttcaacttcaaactccatttgagctgccaaagacaacatcaatcttattgtcttgtactttaccacaggtgagaagattttcagtgtagtcaattccttccacctgagtaaaatccttcgccactaacctggctttgaaccgtactagtttattctcattgattccctctttcaccttgacaatccacttgcactccacaatctttttgttcttcgacttcgatacaactacccaagtcttgttcttccaaagtgaatctatctcctcatccattgcctgaagccattttgacttattttcacttgaaattgcttctttctagttttcgagctcttcaatttcaaccc

SEQ ID NO: 44760 - DNA, 2558 bp, Cannabis sativa
ggcaccagacccgatacttaattacatttctaaaagttatttatttaagtatatgagatctaatatttaattacaccaataataatatgaaactgaaaaaagtgctagacaccagtagtatttttttgcatttctctttattttattatatattttattaaaaactaatgagagtataaatatgaaaattccatttaaattagttcttcatttactttgagtgtatgtacaattaaattaatgcatgattacaaacataaattaaggtcagctcaagaaaatttataagtaaattagtaatattttctaacatcgactttaatttattcaatacaaataaagaatctcttagagaatacgcaaatcaactcgaactatcaatcttgaaaaaataaaggaaaaccacacgtgcattagagaccaatccaacaccataatcatatcaatagcaagtttgaataactctgaaccttcttacaaaataaataaaaataaattagcatactaagaatgtttttatttttaatttctctctatttgaagggatttaaatttttatgcaaggaacttaaagtaatggttgtttacattttgttaaaccatctgttagttgaactacacatttttttgctaaaaattcttgatgttatgttgactgtgaatttggtaggggaatgtcactgttgaattgttttctatcgttacgagcaatttgctctaattttaataaagctgaggttactgaaaaaatctctcccctccatctatcattttcttagctctaccaaatatatatagtgttaaatttgttttgcttcttacacacaaaacatgtaggttgtgaaatgataccaagtaaaagttgttccatctctaatatgtgctgtataatttatactaaggctatatttagtaggaaagaaagagagtaggatggatgaagagtgtagaaagaatgagtaggaaggatggagaggatatttattcttctttatgttgtttggtattagaagtatatgtggaaggatagagagtaaaataaatattaaaattataattttatcaattttaatacaattatatattatttttttaaagataaaaaagatattttatataatttttttttgtttttttcttgaattcctctatgttaagagggattaaaaatagtgtgtttggagggagactctctccttccatctctcttctcccttcttctctctcttgccaaataaaaagattcttcaatccctctatccctttccctccacccctctccctccctccttctctcccttctaccaaacatagtgtaaatttgactcaatatgaatcaatactatatttgctataatatttattattgtgaaataacaaagagtatgtgatatagttcctctaaatgaaaagatctccaaaagttgttttggttatggaaagtcaaatggcatctggaaggacattctcggaagtccaacttgtcaatctggaagaagtcttctggattgatacatccataagagtgttcccagatacctatcatgttcacataaaaggagtcttcaggaaagttagtctttctctggaaatgagtttcggttggatagttgttacctcctgaaagggagtttctggatagtggactccaattggtgtttttcctatatctgggaagtttcttttgtgtacgctttagtctttctttcaagaagcgtacgtctcatctggaagcacttcttcttgtgctaacgtagagatattgttacgaagagtttgttaagtttgttgcgtcgtaaccaacttaacaacttaacagatgcagccaccgactttaggattcatatcctagatttataaatactaccaacacttatcaatttaaagatgatgaaaacacaagaggttcagaggagttttgaaaggtgatcttgagagagaaagattgagaggtagagagagataggtacagaaaaaagagagagataggcttaagttttgtatgaagaatcttctgtacagatgaaaaagattcttgagtgagtgtgaaagataaacattttgagagaactcaatagagaatcgatcacgaatgtaatgtaccatgttattgctcagtcaataaaaaagatttcagtggtgttccagaactggagtagagccatagatcacatcgatctattagacttgagcaagtatatcttggtgttgattttattgttttattactttaatcgtttctggttttaatactcttttcatctttgtttttaatctcttattataatctgtgatttaattaattttgtcattactaattatttattatttaagttttaattgatttaattatctacatatagttgtaattttcctacaaagtaaaatatcatgaatgattatttgaacaacagtattttaagaagcaaattaagacaaagaataaaaatattactattaaattaaatatttgaaaaattattaataacaatattatagttaaaatgtatcagtgattaatggcaaaaatgtaattaaaaaattatatttattgtata

SEQ ID NO: 44761 - DNA, 1508 bp, Cannabis sativa
agattaaatttaaacttaaacttatcggtaaattttatgtaattgtaggccctccacaaaacaacctacaaaataataaaaaataatactccattacaacacaatataatgaaaaatataaagtgaaaagtgatggtaaatcaatcaatattaaagaaaaagacttaaaaagatttgaaatacttatctgttaaaagtgaaaagaatcgtcgaagtagaaattatgagcacaaaatagattaattctcttactcattgaccataccataaaataccctaaacaaatagggacaagtcataataaatgacacaaaaaccataaaaggcacaaaaaccgtaaaaagcatcaaaactatcaaaaaattatataaatatgataatgataagtagatgattattattgataatacatattcattatgtaatatttattaatatttaaaagtcaatgatctaaatttataaatatatttaattaaatttattataaatgaatataaaaataaaaatattaaaagaatgacataaaattaattatgaataaataaattacttaataaatggattagtcaataaatttaataatggttaatcactaatcattaaaatataaaagtaaaacaaaataaaataatcgttaatttagatcttaatatccaaaaaaaccgttaatttagatttactagctaataataagggaaaaagaaaatatcaaataaatgctaattaaagaatataaaaatttaatataaaattaccaaagatttaatgcatatataaacatttaataaaattaaaatagttaaaaattgtcataaaatatataaaaattaatgtgatttaaaaaatttaaatgtatgaaataaataccaaaattaaatacagagattttactcaacataaatatggctaaattacttgaccatacaccgatgcaactctcagccgccgtcttcggtgctaccaccatttctcaatcggaaaacaagctcagacaattttaaaagttaccaatccgacacaaatctcatccaaacgattaaagagtggtgggatgctatagtttctcttagtttgatcaccattgatgtgattaatatttggattccatatataaacagaaaaaagagaaaagaagcctcaataatctcaatatatgaataaactataagcagtatatataaagtcaaaaatattagagaatgttacgaagccttatgcaataatattacatatataatacattatatatatgaatgcgttgaaaatatagattgatcacatgaaaatatactaaagatgatcataagcataatcgggttaattaaaggcacagaaaacatacctagctctcactggaaagaaagaaggcggtaattacccaaaagaaggtcggagtagcgatctctgcaaagggaccattgggcagtgacctcggagtcactaatgggccaaggccacaaaccgggagtcatcggagaagaagtttgcggaataggaggaggaag

SEQ ID NO: 44762 - DNA, 3821 bp, Cannabis sativa
gtgcatgatatgatatgtatgcatacctatattatgtttcatttatttttaatgaaatagaatattaatctagtctctattttctcaatgatactatcacaatcactttactaatttcttttagcaaatcggaatgcccaaataccgaagaggaatttctttttctgtcttaatataactagatacttagaaacttaaaccttaaatttgatgtgtttctcgtgtaatttaactttaaagttcagattaaaactaattataaatttattaatttatctatttatattcactaaaaaaactacttttagtgataattttttagtcacagcataactttttgtgactaaatgtgacttttagtcacaataaaagattatttgtgagtaaaacatagtatttagggtgtttattggatcatatccaatgtttttaagcatatccagaatcaatccaattaatattggatgttagattttactaggggtgttcgcggtgcgggttgtgcggtttttaaccattttttcaaactttaaccgatcgatccaacatccattgaatgttggattggatcagttttatccatcagatgtataatcaaatatttattggattgattctggatatgcaagttttgactaatttagatttagtcacaacactaaaaatacatttagtcacaacaaattgtgatttttgtaactactacccttagccacaaacttttagtcataagaatgatgattagtcattagtcattagtcacaaactttttcacttttagtctcaacacttttattgtgatcaaaagtaagatttttttttttttatatagtgattagtcagctctaaaagttaactttgtcaccaataactaagtagacccacaccaattcttcctagtgagacattttttttttgaagaagtgttctttattaatgattcgagcaagacatcaagtccaaaggaacactgttaatggaaaacatacgttcagctaaagagacagagtgccgggcaacatagtacgcagcacaattcgcagaacgcttaacaaaaactaaagaaacattacttaaactatgtaaaagagtcttgtaatcttctaccacaatgccgaaagctgaagcaaaaacctcagcactacggacagcttcagcacaaaccacgctattggttttaacaattgcgtgggaatgggcatgatttttcagccaactcagggcctttctaacgcccataatctcagccagctcgggtgacactcgcccaaactttaaccgagcaaaggcagcaactaactcacccactgtgttcctcacaacatagccgaacccgtgctttgaagaatgctcaaaaatggccgcatcgacattaagcttgatacctgaaaccggtttgacccaaagctccgaaccatctccatctttgagaggagacaacaaagggatattaccctttccttgagctttcaaccattgaacaagacttgatgtagcaaatgaaaccacatccttcacagtacgaacccgatgcttccaaatgagatcgtttctagcagcccaaatagcccaacaaagcataaccacgctacgcgtggcctccatagaaaccagttgaaacatgtcgaataaccatagctgaagtgaggttgtgtctctactggtagcagccaaaccagcataattccaacaagcccaagcaaaattacaagacacaaagagatggctttcagtctcagcaaagataccacaaaatggacaaagattttcgattagcaccttcttgatacacagatttgacttagtagcaagacaatttgaagtcgccctccaaacaagatctttagctttgggaggcactttgagagaccacagaatcttccataggccattcgaaggagaaaaatctggtgtgaacttcattctttgcaacatgttataagcactacgaacagaataaaagccattcttttcagcaacccaataccacgaatcatcattagccgagggattaagcggtataccaagaataagagctgcgtcttcaggtgagaaaaaatctcgcgcaacatcggcatcccagcttcgataattaacttggaaaaggctgctaacggtgaagttttccaacccctgaacaatcaggtttggtgttggtctgtcaagaacagggagccacgggtcagaggtaatttgcaccgttaaacccgagccaatccttttcctcaaaccagatttaacaacatccttcgcggaaaagatactgctccaaataaaactaggattcgatccaagttcagcggaaagatagtctccttgcgggtagtatctcgctttgaaaactttaccaaccatagactcatgtctaaacaacaatctccaaccttgtttgcctagcatagcaaggttaaagtctctcaaactttggaatcccatgcccccatcaagcttgtgccgagtcaatctttcccaattcatccatatgataccactttcatttccgttggagttatttgatttccaccaaaaactcgccatcatacgctcaagttctttacaagtaccaattgggaaaagaaagacattcatagcgtagcaaggtagagcttgaaccacctacttgataagaatctcttttcccgcccaccctttaattctcttcttcattttctctttaagaaagcccaagacagtgttcttgttgcgtccaacaatactaggaggccccaagtacatactatccacccctgcttcttggatacacatcctagaacaaatacgatccctggtagccgtggtggtgttggaactgaaaaaagccgatgatttttggagattaaccttttgacccgatgcagcctcaaaaagctgaagtagagagaggacatggttggcttcatcttctgatgcctgacaatagatgtaactatcatctgcgaagagtaaatgagagatagtaggggcactccttgccactttgcaaccagttaacatcctcgaggattcataatgtcgtatcaaagaagaaaagccttccgcacatacaataaataagtacagagataaaggacaaccttgacgaatacctctagtagggatgatcggccccaacttctgtccactattcaccacatgatacttcaccgaattaacacagccgagagttaacccgatccaacgatcactaaaccccatcactcgaagagtagccttcaggaaaccccactcaacacgatcataggctttactcatgtcaagtttaagagctatataacccttcctaccattggttttccttttcaggtagtgcatcacttcaaaagccaccatgatgttgtccgatattaatagttttccttatcaggatccatacattttgaaataattaatatgagaatctgctaactaattataagatattacattaatatggtattaaatatttaaagtgctaaataataatactcatatactaaaccctaaaccctataataattaatgagaagataagatcttcgaccacacttcaataagtcttgttcagaaaaacatagcaccattaatacatgataatatttatatttacgtgacatattttaaattatctgctatatatatataatataattttttttttttatgttattaattttaatattaatggtgatacaagaagtggttttgaggatagtaggacaatcatggtcagggataatattgattatatttagatttggaggaattctcaaatttgtattaaccttatattttgtaaatataaatatttcttaagatttttattgacaatcgtaattttattc

SEQ ID NO: 44763 - DNA, 3386 bp, Cannabis sativa
tgcggagcacacccgcccagaaaaatgagtttcatgagttggaatgctcgaggtttggggggtcctcgagcattcagccgtctctcccagttggtcaagaatcatcggccaaatgttgttttttcgatggaaactaggttgaaggctctttttgttgataagtttaggtagactttaggttttgtgtctggttttgaagtcccaagacagtattttggtggggggcttcttcttttatggggagatgatgttaatattaatgtcttaaactcttcttctaatcatattgactgtattgtaaatattaatgataatatatggcattttacttgcttttatggctctcatgttagttcttttaagcatgttacttggaaattattgtgtgatctgtattctaatgctcctaatctcccctggctggtcatgggggactttaatagttatttgtacagttctgataagataggaagtgataatcttgatacctcttctatgtctctgtttgctgattttttgactaactttagtatgtttcctgttcagtttctaggaaataggtacacttggtcaaataaaaccatttatgaaagattagattgggtagtggtgtctgattcttggagtgatttttatcctaatcatagtcttcagcatctaggtttttatgggtctgaccatcgtgtacttaagttaagtttagctcacactaatacaaattataccactcctaggactaggcgtttccgttttgagaataattggctggaggatccctctttttataatgtggtcaaaaatgcctggagcaactctttggtcccctgttcaactcaagggaataatagctctcttataggttgttttgagaactttcttaggaagcaagtaaattgtatctcctctctaaaaaattggaatagggacaacaatctcctttttaaaatcagaattcaacatcttactcatgaaattgatatgattcaggacaagatgtttttaaatgatgaggatagggctcgattagctcaattacaatctttgcttgatgctctgctttacaaagaggagatttattggaaacagagggctagagttaggtggctaatgcaggagataaaaatacaaagtttttccataagcatgcaacctctaggcgtaaggctaatcatattaaatatcttaaagctgacactggtgaggttgtcaattctcaggaggggattatgggtttaattactagctttttctctgatctttttacatcccaggggagtgatatagaggctgctgcctctatttttgattgtttaggacctggtctccctgaccatgatgtggagagtctttctcaaacctttgtcgctgaggaagttaagagggctgtttttcagctttttggggacaaggctgtagggttagatggtcttaatgcctttttctatcagaaaaactggtttgttttggtaatgattttactgcagctgttttggactgtctcaacaagggtgttgattttttagaaattaattccactttaattgttttaatcccaaaaaaggctcgtgataatatgcttaaggattttaggcctattagtttgggtactactttttataaagtcatctcaaaagttttggccaatcgtctgaaacgagttttagatagtgtcatttccccttttcagagtgcttttgtttctggtcgtgttatttataataatattattcttgctaaagagttagttcataatataactaataggaaagtaggaaaaaggggttgggctgcacttaagcttgatatggctaaggcttttgacagggttgaatgggaatttctaaggcatgttatgtttcatcttaacttccctgtccattttgtttctctcatatttaagtgcctttcttctgctgctatttcttattctgtcaatggtgttgttagtgattctattaagcctactaggggtttacgtcaaggggatcccttgtcaccctatctgttcattctctgttctgagggcctctctgctattcttagcaattatcaaaatcgaggccttcttagaggacttgccatctctaggaatgccccttctatttctcaccttttatttgcagatgatagcatccttttttgttctgctgatcctacttcttgcactgctcttaatcaagctcttactctttattctaaagcgtctggacaaatgatcaattttggcatatcctctattttattttcgcccaatacccattctgaaattaaagatctcttttttcacacatttcatttggaggataggccgtttatcaccaaatacctgggtttgcctcagtgtctgtctaggtccaaatatccagcttttgcctttcttaaagatcgaatctccaccattgttcattgctggcatcataaatggttttcgagggttggtaaggaaactctcattaaagctgtcctccaagccattcctactttttccatgtcctgttttagattaccaactaaactttgcaaggaaattgagtctctaatttctaaattttggtggggttcctcgggggataattcgaaacttcattggaaaaattgggtagcagtttgtaaatctaagtttgttgggggggttgggattcagatcttttgttcactttaatcaggcaatgcttgccaaataggcctggcgggttcttatgtgtccaaactctttgcttagtcaaaccctgaaagctaggttttttcctcattcttcagtccttgaagctggccctggttttaatccttcttattcctggcgtagtctcctttgggggcgtgatctaatgaagaaagggttagtttggaaaattggtgatggcttgaatattcatacgattcaggatcactggatccctgggcttcgttataaattctatacctctccccctcctcctgactcgtctctttcttactttctttcatcatcgggtggttgggatctagataggcttaatcagcattttgactcctcaacagtaacccatatccttaatgtgccaatttctggtgcatgtggctcggatagtctgatttggggtcaagaatcttcaggaattttgagtgtgaagagtgcttatcaccttgctttgactgaccgtagtatagcttcgggctcttcctttgatagtagtaagcggttttggactaaagtttggtcttcaaatattcctcctaaagttaaacacctgatttggagagttttgtcccactcaattcctgttgcttcctctttattttttcgccacatcattccttcccctgcctgcccgatctgtcatcaaaccacggagacagtgaaacatgccatcttggactgtaagtatgctagaaaagcctggaaa

SEQ ID NO: 44764 - DNA, 6808 bp, Cannabis sativa
  modified_base (6776)..(6782): a, c, t, g, unknown or other
gcccacttttaaattttgaatcaaaatttacaattatgtattggagcacagtaataaaaattgatgtaaaaatattacaaaattactttttgtgttaaatatagttcaatttttacacgtgccattaaaaatattcatataaaaaatatgctagacttgatccatatgatgtcttttatactctcatgtcatcctgtaaagcgtgaaacaagaggaaaagtaattaaattcaaaactgcacaatacaacaataattttgacaatttaaaagtcacattatttctgtaaattagatttattttaaggtttaacatgtaaattttttaaatttatagaagtttggccacaaatttatcgtattttaaactgtttaatgtatttaattttttttttcctgaattgtgattatcaatgagtctacgaaggagtatctatctaatctttaaggtgcatcattgctttttttttttaacttatattagtctttctacgtagaaacatttgatggtggacaagtatatcatatttagaaataatgtgcattaaattgtaccgagtacgatgcccttgaatggaattaattagcaataataggaagagggtttgcttggcccaaaacattttttattttatatttttgaaaataaaggttttcatatcaaagtacagagttcttttcccccgtgtgcatttgaaaattaaaaataaactcaacagttttgtgcaacattccaattattttttttggtacaacattacaataatttaatgagctatatcacttggaagatgaaacatttaatctttgtatgcaaaattattggttatattttttttttcaaaaaaagagaaattattggctgtatttattcaattctttagaaacttttcccccaattattggtagaaaaaaattgaaataaaagttcatatatagcacattatacaagccttatgtgaacactcaaagttgaatgtgtaaatatgtgggatgagacaggtgttcaattcccctgtaaaaaaatcttatgtttaatcatcattaacattttctttggttaaggatcattaacaaattaattactacttaaataaacactttataagggaattaacggcacgttactatgtaaggtagtaaataagaatacagctaataattttcattttcctcctttcatttttgtatacacataattagtaattaatttggactcttcaaattttgtagaaaaaaaatgaatttcttttatcagtcgcataaagtttaaaaggttactcaaacaattatttatttatgtatgaatttttattttattttattttagaaaatgtatgaagtatgagccgttattaattgttttgtttttctatttctgaattaagtaaactaatattgacagattcatgtcatcatcgctcaaatttcataataatttagtattgaattaaatattttatttaggaagttttaatttccaagctgccaattggatttggatttatcaatctcatcattttgaagaattataaatttctttagtatttttatttagtattattattgattcatgaatacatctgtaaaagtctgtaactgcatcacagaataaacaaaattgaattcaaaagctgtttagtaacgtataaagatgacccttattattaccattatgattatggttctatgtattttcttttattccagggattaattaatttaataagaagaccaattacttgttcttcttatgacccttgacagtcttttttttttattatctcactgtataaaagcacgaaactgacaaatttgaagccaaaatttccaaaaaaataaaattaaaaatgaaaacccgtcgtttcggttaactacaaaaaataagaatcttaatgagagagtttaaatcagtgaaaactcttctcactccccaataatcccaatcaagtttaaactgtggaacctttagaaagttaatttcatagttaaacaattaaacctaaattaaattaatttaattgtttttttatattagccgaattttagacaaatggcagagggtttacacagagggacaaatgtctccaaccgctgggccattccctccagttgtttccacactctctctctcattgtcatagcttttttttttttgaactgtcactaaagagacccctgaaaccctaataaaagcagcttgtcttcaacattctctactccctttctcattcactccctttctttttttcttttttctctctcgtttggtttgggtccctcggcctgcaaacccagcaaactcaaccgggtcattattaaatcttctatagtcagcaacgccttcactctcaaacccatttctttttcttcttcttcttcttcttcttcactcgtcgcctctgtctccacccaacgaacaaaccaccttcttttctctcatggcatctcgctctttagacgacgctgagttttggcttccttctcagtttcttactgacgacgacgttttaatgggcaaggaaaatttcgacaagaatggtgttacttttggtacagataatggctgttttggtggacaacggccctgtgtcaatggcttcccaactgagtttccctacgagtttgactcgtttggttctaactctgctctcagttcgcctgtcgaatctgtggtaagttctaccgagaccgagagctctgacgaggaagactttttcgctggattgactcgccggtttgctcagtctaacctccgcgaggctcagaaacctgcggccccctgtttgagccaggaaaaaccagaggtactatttcttcatttttcgcatggtttcttgatttaaagtctattgggcttttcataaatggtggttctaatatgcttctttgttcttgcttttcagtgggtttcgtctgggtcacctcagtctattctgagtggaatcggaagctggtctggtcgtagtacgatttcaagcaatggaagcccaaatggtccttcacaagttgtgtcgcccccgacgacgccttttggagctaagaatgatacatgggatctgatatacgcagcagctgggcaggttgcgaggttgaagatgagtggtgaagacgccaagatgagtcaacaaggtagagggcttttgggtcctcctagaactcctagccctcttccatctctgagaaatcccaactctggactttactctaaccagggtctctcccaaaatattgcccaggtgcgctacaggcccttttcatttgtcttttagaatagctagtgtagtttctgttttctgatttggacttgttttcattgccgcagtttcaagctctgaaaccggacatagcagttaagccacagggtgctaatgcatggggaagacaagtcaaggcttgctggtcagctcaagcacaggctcaggttcaggttcaagctcaggcccaggctcaggcacatgctcatgcgcagcagcagaaccaacattatttccatcaacaggtccaaaacaggggaaggaacaatggctacgaaaatggcaggtgcgggcgtgctctgagtttgtcccaatcagcttggccctctcttcaagttcaaaatcaaaaccaacttccaaacagacccgccatgggagccgctgctccacacactggatctggagccaagagagaatgtgctggaactggagttttcttgcctcgcagatacagcaaccctcccgagtcacgaaaaaaatcaggtaaatttcctacatattttcgcataccacttctcattactttttctttgtgtatataaatttggttgatgaaactattatgctcatactctgtttttccccttttctgcagcttccccaaacgttctactccctgctaaagtagtccaggctcttaacttaagctttgaggactcaaatggttattctcaacctcgttttggttgtaatattgctccagatcatggtaagtgagcttgttttcaatacattatttttctcagttccattttctttgaaaagttggttttgttctaacttttgggtattaattttctttcttcacagaagctttaatggcgagaagaaacgctatcttggaccagcaaagacgaagtttgaggccagaagtggcactaaatcatgaaatacgccttcctcaagagtggacttattaattaaagaggagctgaacatcagatatatttttttatctcaaaaagacaaaaaagagaggacagaattcagataaaaagcaagtgtaaacgttagaagtgttatagtggtatttgggttataagatttattattattattattaaattatgaaattcaaaatttgcgtgtagttttagggagcaataagaaatccaggttttttcttttttgggatgtttaagtttgcaattgtcattagccttagatgaagaaaagaatatagtaatagtagtttaggaggaagaagaagtagaagacgatgaagaagaagggtgttctttattgtaataagtgggaaatttcttccaacgttcaacggaagaaaaaggttgaaaatagcggaactttagggcaagttttggccattttggggtataggtaaaactttttaaagtttgtaatgggagggaatcaacattcctctctctcttgctgtaaaattgcccttggagggttattaaatttgaaataagaaaaaagtctttattagattctgttctatgcagtatactatgtatgcacattcaaattacatatatacagtttttttggtttcactagtggggactcttttcaaggggaccctttttcttctttttgccggtactgtaatttgagtttcttaactttgatattcaaaaaaaggtacatggggttttatttttaatttctacttaaaagaaaaggaaagagaaaattaaagggttttgttctgtttggcaactgtgaaaaaaagaatatctcgtgctgtgttggttacagttgtaattgtaaactcattcggatttggtgctttattttctttcgagactagaaaaaccattggtcaaaggcaccgaacaagccaaaagctgattataagattcaaatctccaaacggagagatttgcggagtgagagagaatgtgttatctttttcgcttttttgggtttttgcttcagcgtgaagtgttggtattgaggatacacatttgggaatgggataggcgtattgatgtgtagattttggatatggacaagtctagtgtgttcaaattaagggtttttattttcagaaaaattatttgctttatctgatttctaatttttctggaccccacaactgctattgcttttcttttactttcttttttttttttccctctcttattttctgaaaactgtaacccatgcaagagtctcagcttatttccttgtctaataaagaaggaaaatagaacaggcaaaagtaaccatttttccatgatgtcttattacattacagccttgttcaaaatttacatggtagtaccaccatagggcttacttacaatgatgtcaaacatttattgctagaaataatgcacttttggatgttatttatgattatacaagcaaaaatcaaaataatgtgaccagtctttgtgcaagaaaaaaaattgtattgaaactttaagacaaatattgtaaatgttatggattcaaatttgaagttgttattttattatttataacagggaaaactgtcctgtgaagttgataattgatcaactacctaatgactagtgaataatatttgatgaatgattatatatatatgttggctccaatagcattgttcccatgttatcctaaatgacagccagtaaagtatgaacaactggacttgactgtcaattattatagctaatgccaaatcaattctatctatatttggttcaaaaattcaaccattatgtcaggtttcttcttatgttaattaccatttaatattgtattatatttgttaaaaaaatattttatttagttgtgcggacgaaatcctctttgttcttggtttttgctagttcgaaacatgttgtgcgttggattatatcggcttttaatcagatcaaggtaaatgttaacagagcattatttaatgatgctgatagttttgggttcagatgtttggtccaaactcacgacggacggattttggaggcctttatagctagtagaatacgtgccgtctctcaaaaaattgcataaataataggaattaaagaaactctgagttagattcaacgacatttattatctaaagtgattatgcagactgatagtctagtttgtgttcagactatctaaagtaatttacatatgccttctagtaattgagtttagatgattgcaatgttattttgttatctttaagtaataacgttatttagtttgttgaacgatctctgcaaataaaattattcactatttagcccataactcttatttttattcaggtcttatttttcagaagcataatttacttcttaaattacgtgatattacaatagatgaagtttcactttaataaaagtttacctttattcaaaaatatatatatgtatatatattttattcatatatatatataaaaaatttatgtgatcttattttaatttagttgaaaagaaagcacagagatttttttattatgcatttttttacaaaatactatatatattttttaaaattttacctaataatttattttttacatttatattttctaatattctatatatatatatacagtagaaccnnnnnnnaagaatacacttgggaccaagtaaat

SEQ ID NO: 44765 - DNA, 2006 bp, Cannabis sativa
agatgaacagtagggaccaaaggattttgaatatgatgaccgttggtgaggataaaaggaatgatgggctttttgttaatgggtcgagtgatgtgaatgttgggctgactaatcatcaaataagtaaaggaaagagcccactgtaccagaatttaaatgtgaataatattgttaatgggcctccttcttcttctaaggaaaccattcagtgtgggcccgagttagtggagtccttgggtaataatacaaaaaatttggaggggctgtctaatttagataagggctctaatgatattgggccgaaccattattctcttaatgtccttgggctcgtgggggatagctcaaaattgcctagagaaactaatgaacccgaggagcatgctaatgaagccaaagccttggcccaatttttcaaagctcaagaaagcttattgcatgacctcaaacattttggaaaccttgatttgtatgagattcggaatataggaggagatattggggtcccggcttcatccgaagttaatgagagaacgacacctttcaagaaacgaaaatttgaagcgtcggcctctctttgctctcggcctcacaaagttccgcgtaagtatcctgatgtcgtcagggattttccatgggatactaagcaaaaagaaaatgacttggatttggtgattgatgatccttctgaggatagctctagttccccgagttgctctggtattctgaagaacccgctggttggttcttttgtgatcgatgacactgtttcgagtgggtcttctgattcccacaaccctgtggaggagaatgtcgaatctcctccacaggagtcatgagaggtactgcctggaactgtagagggttagggcagacctctacagttcgggagctgaagtccctgatccactctcgttctccggagtttgtcttcctttccgagatcaaagtggatgctaatcctctggtacgtatcctaaaaccttaaacacttttactttaacatttgtgttccttctattggcactgcgggaggtattattttggcttggaaatcgggttttagttttgaatgtatttcttcctcgtgtaatcatatttcgggaattgtttattcggatcccccctcttatccgtggctcctctcgtgtgtttatggccccccctacttgcacgcaaagaaaaagttctggtctgagtttatgaagataggagataggtttggcgggccctggcttattttgggagacaccaattttgttcttagtgactctgaaagagagggctcttcgggccgggatcctttcattccgatcatttctaatcttattgagagtagaggacttctcaatatgcctatacaaggggacaaactgacttgggataaccatcggccggagaggcaccatgtgaaatctgccctagacaaaggcatagttaatggggcttggattaatctatttccacgggctattctctgctctgaccaaaccagcaactcggaccataggccgctttgtctcctttcagggggtttggaacccaaatttaagagatgttttaaatttgaagaaggttgcacccgtgatgttcgaagtaagcttgtagtagaccatgcctggaaatcagttaatcatggttgggcccctgctcgtgttttcaaaaaggttggtgctactagagtggctctaattaactggaatcgctcccagttcggaaagttggaggtggccataaaagagcttgagaaaaagcttaacagtattcagagcctcccagctggtgcccgggattggaaccatgaatgtgagattcgtcgtgctctgaacgaatctcgagaaaggaaagcgatctattggaagcaaagagccagagtgtcttggctcaaagagggggataagtgctctaaattcttctttctctcggcggcgattaaaggcagaagaaatgccatagagagtatcctgaataaagataatatctggatctctggacgaggggctatt

SEQ ID NO: 44766 - DNA, 1210 bp, Cannabis sativa
gcttatgtctggatcaaaattacgacttgaattaatcattagacccaggtttaggccgaccttggctgatattgggctttagaattgtacacgctggaaactcaaataacatttaccccccgagcctttgggactcaagagctgaagaggcttgcaaccctctttccaaattcattcatagatgcggagctgggatctagaaagtccttttgaaattcccaagtaataagttgtgaaagcatgtggttctttcgtctgtttggaactgaggatacatgttgagagatcattagtccgtgcaaaccaggcaccttagaaaggcacataatatctagggatgcatgttgacagctggtttatgttagtgatattttcttaagtgtgtttcatcatttgaattgcctcgatcgtgagtaacgctttaactgctgacctttccattgcccgaatcgctgaatgggaatgtgttttctaggatgcgatctaaaccgtaggattaaaaacacgcgaatagccactttatatatatggtttgaatagcccattcactattttcgccacttagagtttttaatttcaaattttcctcagagtaaaaaatcatttgaaagaaaaaaaacctaaaattatttctggtgaatgtccaaatactttgacgaagtactttgcctccttcgaattcgttcaagagaaaaatctaggtgcaccaccctaaagctcaatatagatcctttgaagttaccacagtcgcagggatatcaagccgacgtcaacgagttgctcaaaaaagtttgcgcttttaaggtgagattcaaccatctcgaccaaattcattccactttgccttccattcgaccatagcatgacatttgaatccccatcttcgagcctccatctttgacacataagtatttctttacttcaaacaaaattttgaattgattttgggttgttagattgtcgatcatgtagttgtaggatttgtgaaaaattatggtgggtgatttactgttttggtatagttctaatgttgattatgacaatttagctcagcaacttcagtctgcattggcgattcaatgtctcttgtgaattctacattttaccgtccagatcgcttatggtgctggacagtctttgctataaactttgttctatctttttgtgttcctcatcttgccatctaggagtgaagttctccaagggacat

SEQ ID NO: 44767 - DNA, 1526 bp, Cannabis sativa
tttagatattttaaattattttttaggagtttattaaaagtttatgagactaattacactatatatattatcatgtaaaataattaataaaattattataaattactcatgaatagaaaataaaataaaataaaataatgataataaataaccaattctagctactagctgtataaaatatatatgtaaaataacattgctttaaaaaaaataaatacattaaggtaacatatatgtcatgacaacgatagtaagttaaatgtcttccagtaattataataattaaaaaaaatccacatgttattaattttgacactaaaattcatttcatatgtgattaattatcattaatttgacaccttatcatctaatataattataattaattatcctatgggattgggaagagaaaagtataaagcatatatgggattattatttaactcaaagtaactatatacagcaatagtatttatttatgtatattattatatataattatcctctatatattataaagatcaactagctaattatggaacacaagttgaaaagaacaaatattaaaaataataaaaaaaaaattgctttattaatttcaactttctgatgctgcacacacatatatataaaaatatattatggataaaaaggttgtggattaagctagcattaacaatattaatactataattaatttattatatacttagggaaactattattacaagtggttgctaattattcactttgttggtgatatttttttataatctctttcctttttcatattcattcaaaatgttttgtttcttctactaaaaagggaattaataatctttaataatttattcttgtctagctaattatagcttttttttttctttgttaaataaaaaattgaaagaatactttttaaaaaatatatacataattattaattacttcattataattccctaagcatctttatatagctagatcattatctaaagagcttgagtaagaacccacttattaattatatatttgctcttactttttaatttcgtaagagaattattacatgatatgaaaacaacatttagtctaaacccttttcccacttcatgtgattaatttttataattctattaattatcattagtcatggtgttttaacttttaacttaacataatatttctatattttagttaattattgtacttatattattaatttgaattttggctttggctttggcttggatcaagatctctttgtgtcgtaaattggtaaaaaaaaaaatgacgttttaattgaaaagcaatgatgaacttaagttgaactatgcatggaattgagtaaaaaaaaaaatatttttttttaatactattattttaatttgataattatacaccaaaaagtaattttacatcaattaagctcccaaaaaattaaatatatttactatatattaatttattccaatgaattggtgtacattagaattttatttgtaattatttaatattaagggtttatg

SEQ ID NO: 44768 - DNA, 1857 bp, Cannabis sativa
ttattacttatataaataaggtgttccacaattaaaaatttaaataaacccctataacatacggtataggatccggtttgcgaatatatgaaacttgaactcacgccattatataatgtgtcatatacttcaaccactaaactatgaacattgagttatttataatacatttaattttacttaaataaaaacctaataaagtattttattttatattttgggtcataaaaaaatgtgggtcctacacacaggcttagcccacctatatctaaaggtggctctaattcagtatagttttaatgaacataaattagtgatcatattttcttttctgaagtttttatgggcacctaacgtgccccataagcttcatcatcattaatcatcgtcattcgtcaccactttactctacatcattatgatcatatcattaattcttttattctccttctcttttcgtacgaaaagaaccaccactgctaccatgattaattattcccaaatttaatcttttttcttaactttgagagcttagacttgttgcgtttggagctgatcttttaatttaaatgagaagcgtatttcatagtatagaacgagatttaaggtgagaattcaaccctttgctttataatgattatagcaagtagaccttcagtttttgaaattctataataggtagactatattatatttaggtaagtacctctgtagtattattcatgacttatatgggtgattaggaattttgttgttttagagttagattgaattataggttgtttaaaggtttaaattaactaagttgattaaggaaaatttaaatttcaaattacatacctattaatgttttaggaaaaaacacttatagttttctcgataatgtgacctaggggtattaggcgctgaattatattccactcaggtcggctagcacactcacttagatatacatgtacgaaaagtatatatgtaccacatagcatgttatgatatgattattattgttattactcgattatgatcgaggtaaagggacgatgattacagttaatcgaattaaagccataacgtcaattgaaaccgttgttaggtttcttatttgtcgattatcttattagacaataacaaagatatatgaatgtaaggttaaaatatcggtgttgccttactatgcagtgagatacattaatactaggttagggcgtcgatattgccttattaggaaatgagatttatggatgttagtttagggcatcagagttgtcctattagggaacaacaaaattgtttactttatgaagtaaaagttatggcttgttgtattatacaagtactttagtattactgtttaattaggttattattattatttagatctctgatagttatattttattgtttacttttcctactgagtctttatgactcacatgtgctttatggtgcaggtaatgacaaagggaaactgggtcagccatgaggggactgtcttcttcgaccaatgtacaaattgacttatctgacttgtatagtcgagttgtgaggagttattttgggttgtacctgatgtttattcttacttacatttgtatctagccctttttgtaaaacttttgtaacagggaatctctaaaatatattttttgtgacgctatcatcttcattgctatagcttaatattagtgaaatttttattattatcacaaatcttattaaatggttaatctattattccgaaactacgtttcaaaagaatacatgtggcatccctagggttacgacgttataacttgttattagagaagccatggttttgaagatcttgaagattggtaggatatgtacatttgctag

SEQ ID NO: 44769 - DNA, 1642 bp, Cannabis sativa
ataattgaatatatatttttaaaatatatgtgtggaattgattaaattggattatatgtcaattaacatccaatggttacaagtgtagaatagattatttgcactttaaagattgaattgaattgaatggtgttgggttagattaattattttatgaacattacttttcaaatgaaataatctttttaatttttcttttctcgccataagataattatatccttgtgatgaaatataagttaaatgtaatattattgtaagtgagtactgtatgtttaattaagttttatttatattattaagtgtataatatattattaaattcttgaaagtaaagatattttattgttaatataaaaataatacttcaatttcctgaagatattactcactttgatgggaacctctgtagtaatatttattgcagtgtcttgtttaaccacaaaaaatatgtggtctctattttcatttcaaactacagatttttcttttaaaatcattctcgctgataacttctcattatatacttttggtttttttcttttaaaaactatgtattttagtttgtatatttaattttaaatttttattattttactaaacgtggtgatcgtgtattcaaaagaaagaaaaaaaaaatatgtagcattattgcatttttctgtctagaattattcaattaaaattaaatgatatttttgttttgttcagtaaattattttcttttttatctgaaatagtgaaaataaattgatattggtcccccactcaccccactggatactaacttatcagattcataatgcacttccaaatttcgacaagctattttatttgcaccaaacatctggtaataagtaaaacagacaaaccattttttatcattgagagaggacaaataataataaaggataatttaaataaaaaagaaaacttggtaaaaaataatcactaacgttgatcaatcaatcaatcaatagcaaatgctcataaaagaacaaaaatgtgaataagtgatatgaaaatcaaaccaccatcttattgaaacgttgaaatccttattataaagacaatgcaatagttttttagatcatgaaattattattgaaaagatgctaatagtacagtagtagctagaatagtgaaattacaatgtggggtttaatttaactgtgagttgttgattgttgttgttggttttagttgagtggtttgacttttgagtactttgatacccaatacttctcaatttcctctgctgttcttcccggaattcttccagcaataagtgaccaccttcaaatatacacaaacacataattagggatgtaaacggggcagggcgggtgcggggattgctcccctaccccatacccgccttaatacccgtttaaattaaagcgggggcggggcggggattacccacggaggaatgattcccatcaactacccattacatatatatttttgaaaaaaaaaatcatgtttcaaagaaatttaaaaaaaaaataataatcataaaaacttcgtaaaacaattgacttaagtagaataatgtgtacagtaaaaaaaagagtataatcaataaaaagcttaaagcatgaagttattttaattgtagtagttatgattttaaaactta

SEQ ID NO: 44770 - DNA, 2325 bp, Cannabis sativa
  modified_base (2294)..(2299): a, c, t, g, unknown or other
aagaatccaaacacctgaaggagaattgggtcagatcttgataatactctgtgacagaaaggaacaagggttagagatttgagttggaggagtcattatataacgctgcaatcaaggtaaggttactcaaacttttatgtgtttgaattcgattgttttagaaattaatatttaggatgttaataaacatacttattagtaaatctagatcctggtaaaatatattccgacagctagaaatgtccatttccttcacaacgaccctttcgtaatagaagccaagattgccaacaaaagaatttccttagtgctagtagacaatggaagcttaattatcataatttttaattttgaattccaggaaattgggctaacaaaaggtgacttatcaccatgccgattcaatggcaacttgttgatatcgatgaggaagatccaacttccagtttcactaaaagtagaacacaatgtatgttccttcaaacactacacatttgttatagtggattgtctcacaacatacaacgccatactagggcgtcctatcttagtaaatttgtgggatgttacatccattaggcagcatgaagtttccttttgatgatggaagcgttggcatagtcagaggtgaccaaagaagtgcaaggaattgtcacaacgtctctatctgatcaatgtttatggtcagagaataggtttacgttgctctcggaacagttgtacacgcaaaagctgaggctatcacggaggaggttgaagataagttggatccctgagttgggatagagaaaatgatagaaccacaagaggatatagaagagttcaacatttgtgatgcatatcccaccaaaactatcaaagtggggagaaacttacataaagcggtgaaagagaaagttgtggtgacagttaaaaagaatcaagagatcgtggcatggagttgcatagacatgagaaggatcaatccaaacgttagttgccatgctctgaaaattgatgagaatgacacagcagtctaccaaagaagaagacatttagacccgataagagttaaagcagtaaaagatgaagatgaaaagttagattccattgagttttttgagagaagcactatacccagtgtggttggccaacccggtcgtagtcaaaaagcccaatggcacttggaggatgtgcaaggacttcacagatctcaataaggcatacccaaaagactgcttccccctttaatgaattgatcaaatggtggatgtcacgtcaagatatgtattgttgagatttatggatgcttactccagctataatcagattaagttgcatatcgcaaactaagaacatatcaacttccaaacagacaaaggtgtgtactattacgtgcttatgccattcagattgaagaatgttgaagtaacctatcagtatttgatcaataaaatgttcaaagataaacttgggagaaacatgggggtatacgtagaccatgtgcttgtgaaatccaaaacttttgtagagcatagtgatgacttaaaggaagtcttcgaaattatttggatgtatggcatgaaactcaacccaaagaaaagcacattcagagtcttctctagtaaattcttgggtttcatagtcagcatccaaggattttaagttaatcttgaaaataccaaagtgtctaatgacatgccttctcccaaaaagtacaaagatgtacataatatgaccagaaggattgcaaccctgagtgggttcgtgtccaagtccatggacaagtacatcccatttttttcacatattgcgcagaaataagaaaattgaatggactagggaatgcgaagaagccttccaaacactaaaggaatatttgactaaggctccaattttatataagcgagtggaaggagagttgttataactttattcggtagtttttgatcacgttgtaagtgccaccttagtgagagaagaaggaagggtcaaactgctagtgtattacgtaagcaaaaggttgctgggtgcggagtctaggtatcccatgataaaaaagttgtccttttgcttgctaatcacctctagaaagctaagatcctactttaaaccctgcatcatcaaggtattaactaatcatcctctccacgaagtgctacaaaaatcgaaatcatgtgggagactcttgaagtaagctctagaacttagccagtttgatatccagtattagccttaggtttcaataaaggggtaggccctagccaattttgtagtaaaatgttctaggatgaattgttaggttttatgccctnnnnnnaactccatttcaatgtaatctatttt

SEQ ID NO: 44771 - DNA, 2521 bp, Cannabis sativa
tctgtacgtcttcaaccctcctactcgatagagaaggactgcttgaagtctgtcacacgcccactgatgtttcacaccctttggtcttttatcgtgaaatcatcgcttcaattttaatgtgactttatcctttcttcttgaaaaccaaaatccgccacataaaattcatcataattcttcctagcacgtggtttttctgtgcatgaaagatcactgcgggtttgatacgtcttcaacactccttcatagaagagaaagattgcttgaagtccttcacaaaccttgtgatgtttcacaccctatgatcttttaacatgattctcgcaagcaagtggtttttccatgcatgaaagattacgggttcgatacgtcttcaaccctctttctcagaagagaagaatagttgtaagtagttcacacgcccagttttgtttcacaccctttggccttttaacgcgaaatcatttcttgaattttagtgcgactttaacctttcttcacgaaagccaaagtccaccagataaaattcaacatgattcttgcatgcatatggtttttcatgcatgaaagatcacttgcggttcaatacgtcttcaacactcattctcgaaagagaaggactgcttgaagtttttcacacatcaagtgatgtttcacaccttgtggtcttttaacatgaaatcatcgcttgaattttagtgcaagtttagcatttctacacagaagccaaagtttgccacataaaattcaacatgattttcataggcacgtggttttttattgcgtgaaagatcatcgggggtttgataagttttcaatactcctacacagaagagaaggtctgctttaagtatgtcacacgcccagtgatgtttcacacccttttgtcttttaacgcgaaatcattgcatgaatttcagtgcgactttagcctttcttcacggaagccaaagtccgccacataattcaacatgattattgcaggaacgtggtttttccttgcctgttcgatacgtctttaacctttcttccaagaggagaaggatttcttgacgtctgtcatacgtccagtgatgtttcacaccctttggtcttttaatgcgaaatcatcgcctaaagtttagtgtgactttatcctttcttcacgaaagccaaagtccaccacataaaattcaacatgattcttgtaggcacgtggtttttcggtgcgtaaaagatcattaggggtttaatacgtcttcaaccctcattcccagaagagaaggactatttgatgtctgtcacacgcccagtgatgtttcacaccctttggtcttttaatgcaaaatcatcgcctaaattttagtgtgactttagcctttcttcatggaagccaaagtctgccacttaaaatacaacatgattctcatgggcacataatttttccgtgcgtgaaagatcactgggggttcaatacatcttcaaacctctttctcgaaaaaggaggactgcttgtagtctgtcacacaccaagtgatgtttcacaccctttagtcttttaatgtgaaataattgcctctattttagtgcaactttagtttttcttaacgaaagccaaagtcttccacataaaattcaacatgattctcgcaggcacatggtttttctgtgcatgaacgatcactgagggttcgatacgtcttaaaccctcctttttggaagagaaggacttcttgaagtttgtcacacgcctagtgatgcttcacatcctttggtcatttgacaggaaatcattgctcgaattttagtgcgagtttagcctttcttcacagaagctaaagtctgccacataaaattcaacaagattctcgcaagcatatggtttttctattcatgaaagatagctaggggtttgatacatgttcgaccctcctatgaagaaaaggactgcttgaagtctgtcacatgcccagtgatgtgtcacaccctttggtcttttaacacaagatcatcgctttctttttggtgtgactttttagcctttcttcacggaagctgaagtccccctcattaaaattcaaaacgattctcgtaagcacataattattttgtgcataaaagatcactgggggttcaatacgtctttaactctccttcccaaaagagaaggactgcttcaagtcagtcacacaccctgtgtttttcacaccctttagtcttttaacacaaaatcatcgccttaattttagtgcatcattagcctttcttcacggaagctaaagtccacaacataaaattcaacatatttcctataggcacgtagttttctgtgcgagaaagctcactgggggttcaacgcgttttcagcccatcgtcctaggagaaaaggattgcttgaagtccgttgcaagtccagtgatgtttcaccatttcttgagagtggaatctgttgggttttgtgccctaaataaaactcatttcgatataatcagattaacttactaataaagatcagaaataacaatttatgttgcatggttca

SEQ ID NO: 44772 - DNA, 748 bp, Cannabis sativa
ttgggaaagaagaggcagaacagagcagaaataataatgttgttctgagcagccaccaccttccgattgttattgccaactatagtcctcatcattccttaattgctccattgcccaacctttataaatctttcaattgtacctattccacagtcaggcaaactatgtctataatatcagtttacatggatccacccacttactttctatatttatataatgtatgtataaacctataattacaaagatataaatacacagattaagaatcacaccttatgtcacaactatacacattaaataaatcttttgtaaaggtttcaatataatgttatggccagtaaattaaagaatatttttcggtaccagaaagagaaagaaacaaactagtcaaaagtgacagttggaaatgatatttatttagggtatcatgtgcagaaaataataaaagctaattaggatttatgattcttaaaatttgatatgtactaaattatgctttttgaacttttaaagcctgacatagataaaagttaaggagtatgatttagtacatatcaaaattcgagaagcataatttagtagatatcaaaatttgaagagcatgatttagtacataaacaatcacttaaatagtaaaattgaataaaattagataaaaatccttaaatctaaccattttcaatattttaaaaaatatttttaatgattttaaaaattcaataaacatgatttgatacacgtcaaa

SEQ ID NO: 44773 - DNA, 1661 bp, Cannabis sativa
agagagagagagagagttagtttaaaatgagaagggtaaaatggggttttagtaaaaattaacacattttacaaattgtgtatagttttaaattagtggaccaattttagtccaaataatgcataaaaaatcaaattttccatttataattattaattttttaattattttattgatgaggttatttttttaatctagcatatcttttcccttaatgaggttttaattgattatttaattttaaatttttatattatgatgtctatttaagattattttgtaccataaataaagtgtttgctataagttgtgatttatttgatagtatatttatgtgtcaagtgtgtcttatttggtactatatatggtggtttattttgtgtttttcctaaaaatgacgagagatagcatagacacatgatccgttccacaaatggtaaagatacattttttcttcacagtataatgttttggaatgtttttcaacatctaaataaaattctcattttaagttaatattacaattaaaagggcattaattaagttttatatattttatataggtatgttttattttcattggtgattttaagatgcaacgactttaaaagataagttttattataattctctttcttaaatattttactatattattaatttctatgcaataattttaaaattacttattttaatattttttttttgtgaagttactaaatatatttgttttgtttttatttttttgttcaggtatcaacttttatagatgttgttcttttttttttttggttggattatgatgggctcaagagaatcaaacatttcttaaagagattttctttctgtaatgatttaggctctcttttagatgtttttaaagtttactgtctaattttcctaaagtgccccttattcatgtaaattattctggtaatatagttatgcatgaattaattgtgcatgcacatagggtggatagtagtctagtatggatgaaatttttctatctcttcttataatgtactgatcaatgctaatttttttcaatgaaagtttgttcattattaaaaaaaaaaaaatcttttagaaggaattatcttgcatcaaaaatataagaaggaaaaagaaaagaaaaagaagaaatttttcggaatttatatttcagcgatatgcacatgtgttacaattatatggtatgagtagagtaaaaatataagtatactaacatactaatattcttctaactcaataataagaaagttttaccttctcataacatcaaaatttaaaagaaccttccctcaatatttcactcaataatagctagaacgccaaaaattaaaattgaatatagagtcatgtatatagttatgtactcgtatacaagtgtgtatatataaacaacaaggatattactattagagtttagatgtgatatttatttatttatttattattatttaaattatatttttttcaattaataatgatatttataaaagtaattaaataaaatagactaaaaatagaatttgtacggctatttgttgggcgatttggagcactcagaatgattttgtttggcaaaaaaaggtggtaaacgctgaaggaattgtagtgttagctagaggttatcttgatcaatggacaaatgctca

SEQ ID NO: 44774 - DNA, 5325 bp, Cannabis sativa
ctcggtcaacagaaggaattaaggacaaaatcatgatcttagctttaaatgaaaatttgaaagattttgtttgatctgtcactacaaatttgaattttgttactgtagattgaggtttattttagaaaagtttctaacaactgtaaaaacgtacttgtggttgtctttagagtttttattatctataaaaagtacttagagagcaactaaatattttcatctcttatattcttcttgttttatattttcatctttgtgagaaaatagttttttgtgtgaaaacttacagtgttctactaggttttagcctcagtacttttgttctttcttcttagaataaggtaaagagcttcattgaataagagaagtgcacatttgttcactcattcttaatcaattattagatgaattattattgatttcttaagttttgtgatgaatgcacatttgttcactcattcttagtcaatattagatgaattagtattgatttcttaagttttgtatagatttgatatattttctgtagttttgcagttttaagctataaagatgataatatttggtgcacaaaaataataattgagatatatgtagaagtcgggaagcaaaacgtggttgaaagaagctgaaatgaaaaaatattgatccaagcgacttgttgcctgggtgttaggcgataggtcgcctaacttacaagacttgattattttggcacgtgcagattaaaaaaaataagcaatcccgaaaatatgattcaggcgacatgttgtcacttttacaaaatggactaatttttgcacgtggcggataaaaaaatagggcgtcccgaagataaggtccgggcgacatgttgcctgtccttaggcgacatatcgcttgacgcaattttcaaatttaaatcctaattcaaaatggtatattttctatctttttgggccgatataaagaatgatgtagataatctttggacaactagagagatataaaaagaaacctagagatcataaaacatattgaaaagtaagagaaagagattttaagtttaagtatcagcaactttcattagagtcattttcttcttcttcttcttctttatttttttatttagttatttaattatgaatatgatcatcgtggttattatgtttgtcattatgatttaaacactttttctagagtgttaatgagactgttttagattatgaattaaagagtttagattattctcatattcttgttatttgtttatgcaattttgtattaattatcattttattagtgctttgtcaccattaattagtatagagattttaggtttaacacttaggagaggtaatctaaaatcaaacttagaattgcataatatatgaaaagtatgagattgaaagattccactaattctatgagttttaaagagaattatattgcttgattgattaatactgaatagaaatattgtgttagttaattaagttaattttatcatcactagagaagagttaatatattacattaggattctttaaactacaaattatacaataaattaggataattagtaaactgaggttcatagtttaaaattataaaaatcaatgctgtgagccattatttttgattaaaatcattatttgtctatttatttttcaattattttattattctgtttttaattattatttacttttaattgtcttattaaagcataaaataaaataaaaaaaaaaaagtataataattagtaaaatttaataatcaatccaggtgggtttgacaacttttttttatcaaaactttgctataataatattatacgcttgcagtaaaaattatgtatcaagtttttggcgtcgtttcaagtgattgaaatttaaaattataaattagatatatttgttttacttaatggattatcattggcttgattcaaccatccgccaagaagaattataaattattataccgaatgagaggagagattttgaggatgaataaaaagatgagttcgtgcatgaagagtcacgtgaagtttatgtggaagagaatgtgacactcatatgtgatgaaatataagatcctattgattttttcattgtagtagaaacgagattgaggtagatgtggaattttcttcatttattgatatattattaaaattgcacaaacttccattttacaggtggtgatatgttagaaagttcaatccagatataagttatcataaaaattatatttcatccaacgaatgaaatactctactatcgatcaagtgttggctactagaatttttttacaatgggggtggagccgctactgatggcgatgatatagctatggatccatagttctagttgctctagtttttgttctctccccttaattttattacacaatggagagactcgttgttttaagtttgggggagaagacaatttgtatgttttcaatttttagtttttttatttttttctctgggtagtttttattttttctttaatactattggtgactatactaaagtttgacctatgaaatttgatgatgaacttatgctaaactctttgatatcatttagtatgtgcaaaaaatttgtggattgtgtttttaacctgttatgcttgcttttgatattcttatatgagttatgtatcgttctacttgttcaaaatatatattatgattttgtatgtatatgtagacttggtttgatttggttgatattcagataatactataacttgtattattaatttgttgaagcgaaatcctaaattttggttgtgtagagatatgattaaggccaattttgttgaatcatttgagtcaaaaagctaatcttgattcattaacctttgttgtcctattttgagcttaattttttctaattttattctttgttaaaaaatctatattatgagctatagacttaaacacttatccttaccttaatttacaccataaacatagaaagtttttgtaattaataaacaatatgatctaatagggatgataaatttttatgagaattatttttgaaaagtaaatatgccctcatagagttataattcaaggaaatatgtgtttatagagttataatttatgttcatagagttatgttgaaaaaagttcttttattataaaaaaacttcaaaaaaaaattcatattttaaaaatattaataacaagagatatatcttaagagattataactttattgtaagaaaaagaagcattaaatattgaaagaaaagggatttataatgaaagtttggtatttttgattagttattttgtaaatttatgatatgaaattagcttaaatgacattctcatctaccatttacctaaacatatataaagtccttttaatttatatgactttagtttacattaataaagatgattttttttttgatttaagcgtttatatattacaacatgtttaacttgggactcgaacccaggacctccaatactcacccacccacctatagccacttgagctagcctcaagtggttcattaataaagatgaattgattatgcaagtttatggttatctgatttatttatacaaatgaatcatatgtatgtagcatttataaaatttacatatgcatattttactaaaaaaaatataatattggaaagtaagtttggtgggttgaaattttagtcctttatttaaagtgtatgctgaaaattgaaagatattttggtatttttagataaattacctttggtctaactttcttgatttcgtcatctaataattgatttgttagttttttggtttttagttttagttttatttttttattacttgaggacaagcaatagtttaagtttggggatataatgggtgcacattttttcactcattcttagtcagttattaaatgaattagtatttatttcttaagttttgtacaaatttgatgtgttttctgtagttactttctctgaaccttggctagatttctattcttttttagcattgttcagggcaaggttgtaatatttctgtgcattttttctcattgcccctaaggaaactaactcgtttcatgttaggaatttgacacacaagtgaaaaatagaagttactacttttaagtcatacaaggctgaccgacctagcataacattaaaagcagaaggaatgtttatcgctaaaaattgtatcatgattgttgttgtggctggagatttccctactgtgagtggtaggcggcacattctgagtggtgttatgctctggctggagaattcataaactagctacgtgcagggaactaaatctttgagatgaagatccattttctcataagtagtcttgaacaagatattagatgaggctctattgtcaatcattgtccaggccactattttgtttgtaatctacacatacactacaagaggatcattgtgtgaataaatcacatgattggaatcttcatcgctgaaagttatagttggatcttccctccatggttgtttgggttttttttcttctacggccaaaacttcttcaccttactcgtactgaagagttcgagcatatttttctcttgaatttttagaatctccagcaatatgtggcccctataataacttgtaattacccatccacaggtggtggcatcaagtggttttggttattattaggttgggcagccttttgttcctggtcgacctttacatacctatgtatgtgtagattgttctatccgattaaaaattcaatcttttcttttaattttttacactcgttagtatcatggccgaaatctttatgaaaacgatagtacttagaatgatcccttttgctcacgtccttcttcattggtggaggtctcttgtacataactactgaatccatggtcgtaaggatggtttctatgtcctcagtaagaacagtgaagactgtaaactttggacctttctcacgaggatgttggtgtttgggattgttgttaaactttccctttttttcatttccctaattatttccaccattccacattttcctgccttaactactttgatcttggcttggaatagaagtatccaaggtcgcactaggagtttgcttttagccagcagaatctactattcaagcagttgtccatactgcctcttctagttttatgaatccatctgcctagtctaaaaactctgccatggatcccactgttagcctcttgatatctttccataactcccccaatgataaaattcctccaagtatggctacaagtcttccttccttggtcaatccttttactcttgtggctttgatcataaaccgactaatatagtc

SEQ ID NO: 44775 - DNA, 1939 bp, Cannabis sativa
taaaaagtaaaaaatgacatttgctttattattttaaaaaatagacattaactatctataaagttaaaaatagggtcatttacttgcatttctctttaataaattcaaatgaagtttgtattcctatactataagaaagctaatgtttaattgttatattatttcatataatataattttcagattaaaaattaaataacaaataaataagtatgacaaataaaaacctattgatgatatatttcatatatgtcaaatataaatatcaagagtaaatagattaaaaaaaactagtcattacaaattaattaataatgtatattatcatataaagagtaaattaagatgatgatttagaagagtcgtagaaaattaagtagaaatgttaaaacaagatctaaggaaaaggcttttaacagaacttttttgtttgatatagaaaggaagaaagaaagagtgagagaggtgtataagtattgttacatatcaaacaagacaacacaattaattaaatgttttcaaatctcatctccatgcattcctccatcaattgatcgatcctttgataataatgctttcaatttatttttgcatgactaattaattaattatttcttctccacaaatcctctgcgaataaataaataacagaaaccatttaacttttaattttaattaacaaacaaataaacaaatgttaaatgcaagtgtaatattaattctaaacgaacatttactccttatttcttacattagagagatttagtttattttgtgaattttcttgggataatagttacaagaatttgtgtacatcatcatgatgatattaaactaataaatttggtgaggtttttacctgtgtgtgtgtgtgtgtctctctctctagtatagtagaatagaagagaagaggagtcccctgcatctgcatgcactccacaaatcctttaccacagaaccaacaaagaagacatgatattcaatcaacaaacaaaaatatgatgaaatatatggctaaacgactacagataagatgagattattttacaaatttcagtatttcacattctcattttggcaaattttacataaagactttatcatattaataatattaaaagatgaagaacaacgaaaaagtaaaaatgaaggaaggaaggtacctttcgatgagtgaattcatgtggtaatcttgaatcggaatcaagaatcattattgttagtattatgttccccgaattgtttttcccaggttgtattaacatatggttccagaatttcttctttaccatcaacctcgattgtcttcaataatgatgaagaagtttttataatcccatctgaaaatctccttatcttaggacaatttcgtatgtataatcgtttcaaacttgggaagctcataactttatttcctgagtagaagctttcgagattgggtaattcagttagatatagttggttcaaattctcaaaaactagtatggagtgatggtgattactactgttgtgcaagaacacagctgaaaacaacacaattcaagaaataacagaacaaaacaagagatcaaatagatcaattaactatgaactgaaatgaaaatgaatggaatcgaattcaccaagaattaatgaggcaaagttttgaatgtgaagaagaatctttattgctaaattatctttgattacaatcaatgagagaaagaaataaaccagaaaaaaaataatctgatacaaaaccagaaacaagttacattcaatcctcacatgagggaagccatttcatgaatggacaatccctttaacatccctctagtaattctctcactgtatgtgtattctctcttgtttattctctctctaagcaattagcaatgcatcaaaaactgtacctaaaacaatagaccagaatcccttttataggagtaggttgaagctg

SEQ ID NO: 44776 - DNA, 1454 bp, Cannabis sativa
aacctgtagctcagagcatctatccattttcaaaacacaaactacattgatatacagagcccatagagaatacaagtttctttcataggaagaattctcggtttctacaatgtcataccactcaggcatcttgaacccaaatcctaacagttttatcaccttcaaggccagcagaggcaattttgttctcagtagggtgacatgaaacagagatgactgtatcagtatggccttctagtctttgaaccatattcttatgttggagatcccataagtaaacacatttatcctctgatccactcacaatgtatttaccatttgtcacggaaaatgtagatgttatgcagtatgttttgttcacatgcccactgtaaattttcaaaaacttaccagttgagtagttccacagcttctgcaaacagggaaagggatcaccagttaagattaacaagaccccaacatgataagcatttcaaccatgaagcacacaactgacttagttatgcaaactgttttcattctgttagttgttttaacagtcaattagtgtaaagacatttagttaagttctgtaaataatcttacgacagcagaagttttctaaattcactctaaatagctcttagcctgagctattctttcagaccacaagcaatcatttggtagctaagcacataaaaaacaacaaaagataaaattataataaatcagaaaagcaataaaacaagttatcagaaaatagaactgccaacacccgatatacaactatgagcatgttaactaatcctacatagaatgaagcttaatacaattgaactataaatgtgtttgtgcttttactgcttaaaagatatacttaattcaaaaaaaaaaaaagaaaagaaatcaatcctaaatagaaacaatcttaaacaaaaaaaattgttaacccttttctcaataactaaagaactattttggaaatttgagtctcaaacaggtaggcaacaacaacaagatgcttacttgttattactcttatcattcattttaagattcagtaattagtaattatagcatacaagctcataacaactagatgggttacttgttactccttattattcatttcaagattcagtgattagcaaatgtagcttacaaactaaacataacaataaaacatttacttgttactctctgagacgtcctaaaacattgtataataatttttagctggaaattttttagctattgatagtacaatacgaaatttagtgatcaaagaatgacagcacgatttgctcaaacaaaaaaaaaggccaaatcatttataaacatttgtagcgatatacaagaacaaaatggaaagggatttaccagtgtgtcattgagagtggcaactagtatgaacttgccattgggggaaaacttagcgaaagacacagcagggaccttatcatcaataagagtct

SEQ ID NO: 44777 - DNA, 1910 bp, Cannabis sativa
tatatatataatattaatgcctataaaaagggaaccaggaggaagttgtggttggggttatttgggtttggaatataaaggcagtgtggtttattgcttcctttttttctgcaccttattgattatgtggaacaaaatcagtgttgtggtagtagcaatccttataagctttttgttacccttaatcttacttctcaaccaacttcgaaggtacgaacatgcaacgttgaagtcttgaaacacaacttaatttacaagtaaacatatctttatttttatatgctctgttattttagatgttcttactttcattgcctgagctagtagtactccttccccccacctaactactttttttccatatttatgtagaaatgtatttgttttaaaaaattattaccttagctcattaaattcatattcttgattttatttatatgaaaattaattaataataattcaagttgttaccgtgtttgaggaaaattactaacctactttcataatttcattatgcaaaattgaaatattcaattaactaatttgttcattagagcttaataacaataataataataatatttaataaacttgatcattgtcagggtgtgggactctgttgacttgggctcaaaatcccaacctgaaaacagggcttctcaacacgaaactgctccaacagaaataatagtgaagcttgttatagataagaagagaaaccaagttctgtttgttgagtgtgataatgaatttgtggatgtgttgcttagctttctaacattaccaatgggaacaatcataaggattggtgataataataagaaatctggaattggatgtatggacgaattgtataagagtgtagaggctatgaatccaaagtgtttttggaccaaagcttgcaagaacatgttgctggaaccaagaagcgcttacggattagagttgagtaatttagcggtaaagattgatgatggaatagattatgcaaagttctacacttgctcaaaaactccatgcttgaactacgagtcgttgggttttgttagttttttaaagaactcaatatgtgcttgtgggaaaacaatggacaacaaactgagaatgaggtatggaaatggtggtagtaaatgtaataatggttattggagtttcattagtagtaagaagaggtttattgtaagtgatgatttgcgagttcttccagcatcaatatctaatgctctgcttctaacacaaggactcgttgataatagcagtgttgaaaatcggaatattcatgttggtctccaagaggtaagaaagtgttaatcttaacacatatattaataatagagcattattttttataggtggccccacgattaatgagcgatattttttaaaagagtattgttattgagtaccaccagtaatgcttaacacctttagccatgtcaccttgtaattggctagcaatactctttaaaagttattatattataggaaccgatatttaattagaccaatagcgatattgacacataaaaatgtgctaagcactactgatatcttttagcattactcttttaaaagttattttcttatgttatataagacctaatacttattacaccaataacttggagagtgctaagcacctattttagcaattctctaacataacaactaacatggccgattgggttaaaaaaaagttattgaaacttttattaaaaaagtacgtggttattttcaaaaatcactaaatatatgtattttataaaaagaaatgtttttaatcactggctgtgtgggttctacgtgcagcccaggcccaaccctaagaaatgattatttcagaaataaacaaaaccataaaatttcgcacaatctgtacatgactattaaattaagttatagacaacagt

SEQ ID NO: 44778 - DNA, 2723 bp, Cannabis sativa
ggtttgggttttgtaaaaagaatcctctctagatgaagaagattcttgggtgtaagtgtgagagttgaaacacttagtgatgactaaacagagaatcttgctcaatcaatagaagagaattacggtggtgttccagaattagagtagagctatagatcatattgatctattaaacttgaactagtatatatcttggtgttgatttctttattttctacatttatcgttttctaaatccatatactctgtttgcccctattttattttcgattgttgttttcgatttgataatcttatcattgttaatcatttaattatttagagttttattaatttgattctgcacgattaatcgtaattttcccacaataacttttatatttataaacatctatacatgtttgcaagttgtatttacataaacaccaaatatatataattaactattttaaccgtaaatttacaaatgttctactaaaaaaatttgcaaaatatattttatctttaatcttataaaggaataataaatttgtttccataaaattttagttattcctgagttttattatactctaaattggggattagctttgtcttcaataatggacaaaaaaagaaactcgacagtataaatatgacttaaatatatataggttggaaagggtaagtgaaaacaaattggcataattaatgagtgaatgaagatattaataatgaacaaaaaaagaaaatggtcgaaataggtatttgtgattaagaattttgattttttttttttaattccactgttgatatatactactttaattagtttaatcttggcattaattactaaaattagacttcatatatgttaccaaaaaaaaatccaaattaaagaatagtactatatatcatgatttatatttggatgtgttttatagtaattattattttgaaatactttttacttttagtttttgtgtttgaggtacatataatagtgtgaaaattaatattcttcagcctagctaattaatgagttgtacaattaagacatgattttagtatcataatcagatattttttattgtttatttttggtgaaattaactttaattgaaaaaaaaattaggattgtaaaagagaaaaaatagtagctttgttagtgtaaaaacacatttaggatcctcaaattagaatgtagacaacctacacacaattatctttttctacatacaactaattttcacactaaagatacacatgcgaaattgttattttgtgcatagatattattaaatgctatattattataatttaatcattaaaataaaaaacatatataatactatatatttgatgatatgattctatcaaataaataattcggtgaaaatttttgtactgagtctttaaatttccaaagagcttaataatattgacttgtggactaagcctcattatcgctcaaatcacgtaaaaatatttgtattctttacttataatcttttttcttcaagctcaatctattactaattcagtttttgagaatcttgattagcattttggtgttttaattaagaacttgaaaggaagtctttaccatttttgtcttctacaaccatgattgcatatagaaatgtggccgggaaagacatccattcgcaatgacaatgaattgctacaaccgacaatttaaatcggccccttctagtagatgttcaggccgatgacgtggggggtagtgaaagtgtcgaaagtagataaccgtccacctcaaaaaatccaacaccaagaaaaatacattggtgagactcccatcgacgaagattactaagaaagccaagacagggaccaaagagatggctacaaaaaaaaaatataatgacaaaagaatacgagaagtgctatgaggaggacccaaaggtggtgaggttaagacaagtagtcttagaccaacaaaggtaaatggtgaagcaagaagaagctacatgccagattcaatataaactttcttacagctacaaaacatggtagcgaaagggaatcttaatgctgaaaaatccaccagcaagaaagtttaaccatctctgggctggaccgtccaatctagcaaatgacaaggggaaggccaaaatggcagagtttagaagcttagaaaatattttttgaggtgtcctgttttcaatctctgataacagagcgtatttagaaacatggcgttccttccttctggtgtgacaaccagagcacaattttgctagctgctagccatatcctccatgcccaaacaaagcatatatatatatatatatatatagagagacagagagagagagagattaatctctactttgttagggtcaaagtattgcagcaactaattcaagtgaagcatgttctaactttggttcaactagctgattacctcaccaaattaatctcaagctctagatttgcagaattgagaatcaaactcaatgttgtctctaaagccactattgtggtaaattaaacacgcaagtatatgtatcgttaacaagtaatagacttacaaagagtgaggtcgatcccacgagaattgtagttaagtactttaaaattaaattcttacttctatttggttaaataaaattaagagagaaaatttaaaataagaaaactagcgaaagtaggaagcaaataaataaataaagaaaattaacagttaataaaaactagggcttcgattttaattgtat

SEQ ID NO: 44779 - DNA, 1745 bp, Cannabis sativa
agagagagagagagaggagaaaaagtgccttcttgattattctaatttctaactaataaaagaatatgaaacctaataattctctagtaaatagtaacttacactcagatcaaataacttaaataaaatcactaaatgataaatataccaaatggtaacaagaccattttgcccttgcttaatccaaaaagcatacttgccagcttggggtagtttggtcatttctaaaactccaaatattcctgacgttcccaacgtctatctaggttgccccgctattactaaaatactaaatcataagaaaatgtgattttattggccaaacatcgtattccaatattgtcgggcataaaatataaaaatataaaatttcatacatagcataaattatacacctaaaatttatataaattttcataaattcataaatcatatttagaaatctaattttcataattaagctctaattatatgctaatttatcatatttaaattaagcggtctttacagttagagtggatcatgtatgcactaatgacaacttagcagatcttttgacgaaaggactagctagagagaaagtctataaaacttcgaaaggaatgggactattacccttagaaagatgagtgagtcttaatggtaacccaacctaatgactggagatcccaagaattaggttcaacaggtaataacaagttatgatgagatatgtgttgattatgttgttgttgtatgagaagtatgaagtcctaaagcgataagagggtgagttagtagaaactcttaatgagatctatactctatgtggagtggagtaccgagctacatgagtactcttgatagactaacttatgtggatgtgggagtggggccacttcctgtggaatttagaacaaaatttctagagtgttcactatattgaaatagatgtgcatggtcattaacacacgggcttgtttgaatagatccttgaaagattggtgtgtgttacgatgttagagatagagttcaagatttcgagtcgctctagtaaaatttaaattgtattcactacgcaagatacaaatcaaaagatatctttgtttaagcactgtcttatagttgtttgatattgctcgagaaaacttttaaaaatttcaagtggaaaattgttagaactttgtgaaattttataaaaataaaaaataaaaagtgaagtgtgtgagtgaatggagtctcacatgggatagaaacacttcattagaagtgtatataatgtgcaagtttgagatttgggttcggggtccaaggggtacccagttttgtgcgcatgggtgaggactcacacactagaccaccacacacccgcgcagtgtcgtccgtccgactgagttgagctaggcaagtgaggtgtcacttaattatttaataaatatttatttataaattaattatcttttaaagttaaatgaagtagcaaaaagcggtcagttaatgatccgcttttctctgtcatgatccaactcctccacgattatattaccgttttcttaccgtttaatcttggattgacttctctatataagtcgtattagaacaacggaaggatatatcttttcaacaaaaaaattctcttttttccttatgatttttcttagagcaataatttagggtgtaattgaacgatatcgttcagtgcagtacatatcgtatatacaaaggctgttttattctagggatgtagttgctagactgtcatgcat

SEQ ID NO: 44780 - DNA, 1609 bp, Cannabis sativa
  modified_base (548)..(548): a, c, t, g, unknown or other
ctgcaaattaatgacatccagtaactatgtgtaattatttgacaagttgcaaaatttttatatattctagtaaataaagtgtaagatttgtttgtgaataaagtgcacaagtctttgattattttttaagtatctatactttagtcaattttatattagactctgttggcagaaatgtcacttacaatcacagttttttttcataaggaatattactattttattttatagtatacttgtaaaatatattttttgtaaaaaaaaaatattgatataattttttttttttgagtactaaaataaaactgtctaattgatacatttttttttatggaacaattgatacataataaatagaataatacacaaactttttttttttctgtcatatacataacctaatcaataataatgatagaaatatgtaacaaatgaaaaataaagaatttttattttatttagctgtgtttcatgttttcttttagactgatgaataaaaggtaacaaattgcttttggaaagttttggatattattattattattatnattattattattattattagtgtattattagaaaaagcgtattcttatcctaattgctttttacaaatcaaatacagcttacacaattccaaacaaagcaatgggaatttaatataatagatgataatattgtttattgattattaaaataataagagagaaggaaagattaactaaatgatgatagagtggcatccaattttagggaagcttcttattgaataatttaaaacaacattttctagagattttattaggaaacttcgtcagccaaaatagaaaacgaacaagaaattgcaatttaaaaagaaagagaaatgtggtgtgtattacaacatttttttgtgatagcatataagacaaaacgtctttattgaatgtttcttgttatattgtgttatttcttttttacaaaagattcgattacgaacaatcttaatattttatattcaatttcatcaacaatttaaagaaagggagaaataaatgtttgacttttgaggaaaaaagataaaatgttgggataataacaaaaagtacatcttatcccaccttattctaacaaattattataattttgcaaataaataacatttatacgtatttttttactaaaaaaatgtatacattttggttcgactaatctaggaaaatttgccagaatataaattcagcattataaacattatcctttctcttataatactttaaaaaaaaattgtaaaactgtttcaaaaaaaaatacaaatatctctagaactctcttgggtaggctttgaaatagatcactcatttttcttgtaatttatgtcaaaaatatctattgcatgcttttctctttggatagatgagtccatgctctatgaccagacactgcatattatgacagatggcaaaaaagtaccacctccaagttttttttctttcttccatgtcaaatctttataaatattgaatataattgactattaagtatttgtacatttgaaaccatgggtaaatacatacatacaaaatggcagttatacacataactataatacatttaaaaaaaaaaaaaa

SEQ ID NO: 44781 - DNA, 2420 bp, Cannabis sativa
ttttttttttataatagtgaaaaaaaaacttttattttctctaaaatttccttatttttttatagtaatacttttttttttgctttttgactatttctttttcatcaagtgatgtgttattttttttttgtactttttggtttttttttttaattaagatatttgaaaataatatttttttaaaaaaaaaatgataacttcaaaatttttggctataatatttttgtgcttttggctttttaaaaaaaaaaaactaagatatttaaaaatgatatcttttaaaaaattgataactctaaaatctatcatcatattttggcttttgactctgtttttttaagatatttaaaaaatgatcattttttttatcacttattactaaactctccctatatatattttaagagtaatttacgttataaatacctaagtttgattctcagttacaaatatatacctaagtttaacttttggcggtaataatgacttaacatttaacgattgagtacctacagagttccgaaaatataacataggaattattaccgtcaaaaaataaaacttatgtatttatttgcaactacgagtttaacttaggtacgtatttatgtcgtaaattactatatcctaatttacattctctggagtgttattttcttagggacttaaatactgataagaagaatggaaaactaataaatcttgatatgatttttattgatgagaaagtgattaatatttttattcatatttttcctctaatacttttatttattaatttatcaaattattaaatactcaatgtgtcttatatttatttgacaagaaagtctaatgcatgcaataataagaaaaaagattaatttctaattaaatttaagaagctgtagagtgatggttttttgtattgtctgtaaaatttgaaaattgttgtactacaaatgagtacagaccgccacttttaaatgactacgaaattttatttttagttacaacttaagtagagagactagaaggagaaatagttaacattccgatcaatgagtttcaattcataactctaatggttggtggcataagtatccaatatttataaaattataatttttagcggtataagtacacaatagttgtaaaactctaatttttctctagtttgtcatcaatgattctattattgtcttaaacataacacaaataagactcagattctaaaacattatgttaggttggcctgattttacatctaacttctcatatttttttaaagaaatttatataaaaaaaataaaaaagttaaaatttaatacaatttttattacttagttatcatcaaataaaatatataaattatttcatatacataacttaaacaattttaaacatccgtttcaagcgtgggttatttgttagttataaataagaataatttctaaattgtaattagttatatattttataagtctcatattaacaaagtatacttttatataagaataattacatgtcaataaaatatatatattataaatttatttatgtaaaaataataattttattttaaattgtaatacatgtattgttattatattgatattttttagtatttgattttttttagtataactctatttaattataatctctcaattaatataatttatttaattgcaaatgtattttaaataaaggttgtattaaatttctaacaccaaaatggtacatatttaacattgtttaattacgttcatttccaaaactttcagtgtcctatgtttcttttcggaaaaaaaaaaaattaagaaaacatgtgttaattatattcatttgtgtgctgactgagcttgtacaacaccaaattttggttggttggatgggccaactagcaaccacattagtattactacttttgctcaaagaaagtgaaaattaattaaagaaagcaaggtggtagccaggtgagtttgcctcccaaaaagagaaaactccagatttattacagaatgaaccatttcccctctgaattgagacagtcaatcacttgctccaccttgctataattagagagactaataataaccggccagctttgtgaaagcaattgcgtttacttcattatgaccaatatttggtttgggttattcttggacctgatgactccaacggttgggctttcttttctctgtctgctctatgtggatgattaaggattaatttattttattttttattttttattttttagagtgatttgaattacaaaaaggcaaaatgatatatggacttccagctaacaagccaagtatataaagtcagaatataaattgctttaaactaagagatttatagaagactaagttatgttagaaatttagaccaaacaacttgaaattatccaaaaaaaaaaaaatagcacccaa

SEQ ID NO: 44782 - DNA, 1029 bp, Cannabis sativa
  modified_base (994)..(998): a, c, t, g, unknown or other
tcttgtcaagagcctgtaattacaatcatccaaaatcaatcttcgttttttcttccttataatattcaaattcaacatattcaaaaccgttcagacactaagttctcttctctaacatgttcaaaccattattaacatcattttcctaacctccaaatacttaaacatccaatccacgatcaaactaacctaatctatatatacacacagacatgtatgaaaaattcttttaacgagttccaacactaattatcatcatttcccataatcaaactatcttaatctatacaaacacatatcaaacacaaattcaacaacagcaaaacaacctaatacacaatctgatcatacaaaaacagagaaaatagagaaagaaaatacatacatcggaagcattgctgacgagctcacgaagaaagatctccttgttgctgtagaaagtgttgatgattaaactgagaagctggttgatctcagcctggaaagcaaaggtctcggtatcccccatagtagctgaacctaaacctctgtgagaaaaagcttagatctagggttttggaaaatggagacgaagactgaactatgcaataagagagagagatagacgaggagtgaaggaagcgaagtatatataagagaagattgttagggtttctagatccttctataactaattttaaattaaattgctttatatatatatatttgtttaatttattaagttttttttagacaattaatttgaatattcttttaagaattttccagaagcttgaaaagtctgtttatgtaattttgaagagcggcacattgccacgtgtatgtgggcttttttatgggccttggttgactcaaaattggcccaagttttatgggcctaaattgatagatcttttcttcattttgttttgagataatacacaacaacaaaaaaaaaaattaggggtaagttgaaaaatgcctcttttattcatcaattaatcaaatttacctnnnnntttatatttatttgaaacatacttcttttta

SEQ ID NO: 44783 - DNA, 1399 bp, Cannabis sativa
tatagactaaaatagtagaaaagttctcacaaaattttttaaatctagtaaaaatgattataatatatgtataaatattttttaataataaaaagcctcacaaagaaaaaaattttggggtctatcactgaaggtgggtttacgattagagtaaagaggagcagaatctccacagatggagagttgcaaatcatctatttctagtcatttaacttcgagaaattttttgatatcaacaaatacattatacacactcatttgaaaaagtaaaataaaaaatttacccatatagataaaaaaaaattattttcagatgaactcgatttaggcttaaggcttttgtatcaataatattttggctctataagaaaattacatagtcaaagtttgataatatccatgctactatatgatcaactcgattaaagagtgaaaccaaagaaggttccattcataattaaagccttacacatagaatttcatctttagtcatttcttcctttctttttctttaaccggttgtcttttctttttggtattttcagataaagatgataacctataattcacccatcatctaaaacttttcatagcaaagccatgaagtgggtagaataaaacaatagatcgatatcattgataagcttttatttggtccattatgtcaactttttctttacatttttgttttctgatgttcaacagcaaattaattatttttgttttcgtatataaaagttgttcatatatatattttgagcagttccaagttgtagcatgtttcattaattgcttattcaatttattagcaactaaaacatctttgttggcattaaaaattagttggatctcttatatgggtagacaaaaggatgggatacaagattgaccagcacagtactaagtagtgcttggtaaatttatttaaataaatttttgtatttttaatatcaaaaaatatatatttgataaaattgttttcaatttttaattaagaattaaaattttgaataaaaaaggaaaattgcattcaaaatttatactttttcttgggagtaatgatgtgtgtatttaagatgggaaatttgactttttatacttacaaatacttaatatttttcctctaaacacataacatgtcatttttgtgaaatatgacacattttacaatatctctaaaataccttcatttccatcggacacaaatacaaaaaattaaattttaacatagcaatcggaccccatcgggttacacatcggacaccttaaaattttgatttttaatacatgcatcggacccctccatcgggttagacatcggacccatcgaatacaatgaaatttgatttttttaacattaattggaccccatcggacacaaatgcaaaaaaaaaaaaaa

SEQ ID NO: 44784 - DNA, 3370 bp, Cannabis sativa
  modified_base (461)..(462): a, c, t, g, unknown or other
tgtttcgttttatgatattacgtttttattcaaaaataatctatatctattattttaaaattattataggatttttttttcagaaaaaatatgggatttttacaccaaatattaaaaaatttaatttattttctttttttttattcggagcaattttttttaaaaaaatactatgtactgtgttaagttcttattgttttttcacgattgtttttaattatttcactgttattttaattgttttgttttgttgttttacggttattttataaaaagatagtatttttataaaaaaattcgtgtgtcagtaaaattgtaatactcagtattttttttaagtaaaaactccaaacaatattaaggaattattttggaaaatttataaaaatactggaatttgggttaacttttataaaaatactatcatacggaaaaaatttcaaaaatactgtgtttttatnnaacactagtaaaacacaaaacagtttaactcaaaattacagtagaacaactaaaaaacactagtataacatcagtgaaaatttaacactgcagtatgaaacttataaaaaaacacagtaaaaaataaaaaaataccgcctaacagtatttttataaaaaattgacataagttagtatgtaaatttcccattattttaacgttttgctgctttcattaacaattttcgtagcttaatataatcaacaagctctcctaaacagccggcgatgcaactaagcttaatctccttctcatcacagccaccaccacacccgataaccctacaacctcagcttgtttctctctctacctctaatggcggcttcgtttagggcaatctcccgcagctttctcagatataccaaacctcttccaattccaatttcttacaaccccattttctcccgccgattttcttccaaactctttgtcaaaggtaagttaattttaatttttgtgcttctgggtcttacaattattatgtgagattaatgtcattttattttaatttttctttaaaagatctaatcttttcattttcctggtaataatttttaaagcagcattgagtttttaaattctaagcttcttcaacatcatcatttgtatgtaatttgtaaaaaaatttggctgtgttgattgatgatgttgttgtttgctaactaagttatgttatgtttttgtgttttggattttccagtctacatttaggctataaagactttgtttttgaaatttggcttatagagctatgaattaagggtataaagagtttatgaatctaaaaggttacagtttttggtatgttaaacttagtgtaacagaagtttagacagtataaatgtatggtggatatggtataagaatcatagaattcaacttggaaactaatctctaatgtttgtttttataaatagttgaattttcccacacacttttaagagtaggacactctaatactaaggtaaagaagttgaaaatcaacacttaagttgcatttgattggatggaatgaaagcatagaattaggaatggcaatggaaatagaaatagaaataagaataggaatagaatgaaataaaatttaaaatgcaccaaaaaataataaaaataattatgattattttcatctggtgttagaatagtatttcttttcattttaaaataaaatagtcattccactcaaatagtagaaaaatttgttcagcggaatgatattctaccactataaaatgcaatgcaaccatataaattgattcctttccattccattttatttcattacctccaaccaaacacaaccttagactcttgattcttggcattggctgctggatccatgtgatagaatgataggttaatttggctcatttggttgggtgaccggactataacaaaggttgctttgcttcttatagaggatgatgagagatcgtttgaattgcaaagtagcaacctatttaaaaatctattattgaaaagaatagcttagtatggatttttgtacaaccataatgaacaatcattaaatagcatggaaaagggggaactttagaatcctttgtattagaagtctatatagccactcaactttggttagtcccagatacaataccatctgtgtccacttccatgtgattgaacattgaagattctaatatttttctctaactatatggctcaagggatagctaaaactacccatatttcaccctgtccttacgaaagtccctcactccttacaaagtgacttggcccgtacccaattttatttaatgtatgaatttcggtcaaacttccacccagtaaaggagtagtcctaaatagatgatcacccaattttgtgtttgctgtaaattttctcgagttttcaacatactcagggctgttaagcgaaccagaacattttagaagaggcgaatatttccatataaatgaacatgagttagactggtttaatctccttcattttgtttaatttcttgaacataaatttacaagaaaatacatcctctactcaatagggtagtttggcaacataaatttaatcatcatacgttcatagatatgattagacttaagctcttatggagatagaatttatagaatcaggttataaacttttttccaatcgatagggtggattaacagcatcaatttcatcatcatcattatctgtttttgactgtaccaagactgaggttaatatttaaatccctatggggctgttattttctttcatctaaaaattcctggcaaacacaatctactgtctgttgagttaattaagtatttcctgtcaccatgtgttattacatgagttgaacttgttgtagatatgctgcctttactaaaagactcataagtattaacagttgggttttctctcacaggcatatctttctcgacaacagaggagacattggctaaagtgttttcaagatttggcgaagtaattgaaagtatgcagttgtcacaatcctaatgctattaacatgcccatattattcaaatgatcctcaacattgttggttctgcttcttttccagctaatattataatggataaaactcgaaacagatcgaaaggatatggatatgtgacctttgctgaagaagatgatgctgaaaaggcattgattggcacaaatgggaaggtacagaaacatacttacacagtactgatttttcttttccatttcatttagttaaaaaattgtaaaattttaaatgacgatacaactgcatatgcattcaggtgatcgatgggcgagctgtttacgtagacaaggtggagaaggtacggaagccatggccaacaccaacagtaagagaatcatctcagccaccagaaacaactcctagtcct

SEQ ID NO: 44785 - DNA, 1423 bp, Cannabis sativa
gaccctattccaaattaaatagtcaaaataaactgaaagatatgttgttaagtatatataacagatcataacaaattccatactttcaataagagccaaagtctctattttagaaattaaaaaaaatgaaaatttctatttagaagaaacagacaaattttatttcatgatgatgataataaataatataattttttttaataatattataattaaatcaacaaaaataaactaaacatgccaggaataaaataattctcacagcacttttaactaagctgtcagcagtaaagcatatatatactttcaacagctaagctaatgagaaactaatatggatcattacatacttattataaagcagctattaaggcaaagaatttaatatatatataaagagtaaaaaatagtttaatttataagtgggtggtgaatgaagcagtagcagggccttctagacgaatataatcatacatgattccctgaaaaggggtggtcgtatttgttctggtaagaaaaatggtgttattcccttccacaaacaatgaccctggaatctctatgttgaacagccaataaagcccatgaattccatgccttgctatactgttgtcttttcctattactccactcgtaaataatggaatcttctcatctgctttattaattcttacctgcatcaaataagaattttgtgcatttattatttcttgtgaaaaaattagttaaaaagaaacattagttaaggttaaatgttgtgtaacatacttgtaattcggaaatatgtgcggtggccagggctatgcgcaatgcataggtttgggtctcagtcctattctgaagaccaaatcttatttgccatgtagtatctgtatatgtgctattattactcctcctatcacaaaaataaataaataaatataatcctaatatatgtgtgtggtattactattagtttaaattagaaactactaattaattggatttaattattattaacctggcgacttgagcaaaaaaccaatctttacggtaatcgttgagaccaacagtgtaaatcaagtcgttatttggatataaatcggtgtatctatcccaaagtccgtactgcctatacctgtaaattcattgcaaaaaactaatcaaaatttagctaattaattaaaaatcttgaaaattatatatatagaaccatttataatacactattcaaaattgaatatacgtacttttgagtgttattgagatagagtttgttgacataatcaggattaggatcaggaacaaagaactctgcagcagagcggtcaggagtgccaatttcccacaatgttggcccatttcttgggggtttatacacaagtactcccatctctttatgtgcacctacaacattattattactattaattgttgtaagaac

SEQ ID NO: 44786 - DNA, 3960 bp, Cannabis sativa
tatattgaattggattatatatcatatttttatataatactatgttaaactttaatttataaatattatgtatttaagtatatataattttacataaaaaatattgcatgaaatacaatttaatataatactatacaatacaatacggtgtaatacaccataccaaacgaactattaatgacataatttatacattcacggttagaccatttccaatgcaaaatgtaaaaatctagctatatttggtataaaaagtaattttgtgatattttacattaacttttattattgtgctctaatgcagaattataaattttaatgtgaaatttaatatattatttaatgtatactaagacaacttttttcaagaaatataataaaaatgattcatgataaactgtatacaaatactactttttgacataaaaaaatttcgaatataaaaatgacgtgcaaacaagatacttgtaaaacaacataaaaataattattaaaaaaaataaatccataaaaatgttaaaaattaagtaaatacatatttttgtaattttttatctttatttaggtaattatgaaaaaatcccaatgctatttaatttttttttttaaaaaaaataactatagaaatatgctgctttcttttttttttttaataacaatatattggagaatatgccacagctagcaaagcttgctggcaattcttaagaaatgaaagctttgattgattttcatgatcacacgcgtttaagctgtaaaaaatgaagaacaaaaaaggtatctcctctgtattggggacaatccaattgattaatttcttttcttttcttttttgatatgataagcctagggaataggatattgaagatcttgcatttcttttacataacaattaacaaccacataataacatttgttttgttagtttaatggctctatagataatatcattgatttattctgtatatagaaagagtgcacgaacgaggactctaacaataacagctatattggtatcaaaattttcaaaaatcatacagtggaacatattgagaaaaatatttattaatggtcataatcacacgtacgcgttgcatgtaaaatatcaatgaaaatagatactcgagatttatatatgttaatataatgatgaaatgagttggaaaaataggtgggcagggagcatttgcataaacattgctgcactgtatacatccaaatctgaataccatgtgcatcattttcatcagaagatgcttcacgtctttctcaccaaatgaatcttttttccctttttgtataaatacatacagagttgatagtagaatagagaaagaaatcatcacatctaaaacttttaggccaaaatccctttcttgagaaaaaaaaaatgtctgcctcaaaaaccaacttacatattcgctcaaacagcttgcctacgaaatcacatccagctattgaagagtgcaatgatcatttggtcagattaggggcttctcgtgtagcttcatcatcatcatcatcttccattgcccaccaactcagtggtcttgaggatttgcacctttgtgttgagaggttgctcgagttacccctcactcaacaagccttctcccaaggccgccaagagaaatgggttgatgaattagtggatggatctcttaggctcttggacatatgcagtgtagccaaggatgctgttttgcacacaaaggaatgtgcacgagatattcaatcaaccatgcggagaaaagttagtcttgagagtgagattaagaaatactctgcttcaaggaaagtggtgaaaaaggcaatccaaaaggctttaggggggttgaaaggtgctgaatcaaaatacacatcctctccttcaaataacgatagtgaaatctcagctttggttggtgtttttagaaaggtggaggttattactcttgctacctttgaatcattgatgtcttttgtttctggaccaaagacacattctaagctaaatggatggtctgtagtttccaagcttatgcaaagcaaacgagttgggtgtgacgatgaagttgcaaatgaattcgcaaaggtggatgctgtcctattgagtcatgaaaaaataaacaaaggtgatcaagccatgcaggatttgaaaaatctcgagatgtgtattcaagactttgaacaaatgctagaatccttgttcaggcgtttaatcaaaacaagagtttcccttctcaacattctcaacaactagtttataagtattttgtatataattatccagccttggcatccattgttttgatagcctagatcaaattgtacttttgtacttgtaaatataatccatatagtaaagtaacagattcttttgcccaatttcttctgtttatattgtttattaaattctatttcttttttgtcatatgatcagtattgtcaaggtgaaagtagtactactataccattgaaagaaaatatttataattaaaataataaataactagagttgatgccaacatgagatgcatgaaaattaataaatcgatcaagtgtattaacatttttttttaatctcaaggagatcatttaataaaaatatcgcatgcaatcactagactttactttcacacgctttagacagtgaaatctgtgctggctttgttactgttaagagaccaatggaatcaaaaactctctttctcagcatttttaaagtaactgaatgaacaacaaaatttaaacatgctcatgaaaggatcttacgtaatttaaacgagaatgccaatcgtgcattgcatatataatagcacattgtgattaaaaacgtcaataaaaatgagatctggacttagtggtaagaagacatagtcctcagtcctcacaaagtatgtttggattcaaatctcaatattgctcagtgctaagagaatgaaattcactagcccgccgtttaccaagctctcctctttcgtctgagaaataaatgtaaacatctctcttaaatttgctagctaacaagcactgttgcatagccattgggtatgttgtaaaaactacttgtttaacacaaggttgataccatatccctagctagggagtggtaaacccgaggagtaatattagagagtctcacattgtgaaactaaattacatacttaaggtgtatgggctactcctctcatagccaattggtttttagataaaacctcatgcatcttacattctaacatggtatcagagccaaactaaactctaacgagtatctgatctaaatctaaaaatcggtctaaaaagatgagccaaaaaatttgcttgtgattcgaggatattaagccacaaagagttactgtgagccaaaagagtcacttgtgatcgatcgtataagattggtggacataaaaatagccactaccttgaggcaagatgttaaagaatctcacattgataatatgttgaaagtaaataccatatataggatgcatggattactcttctcataaccaattaattttgagatggaaccccatgttacattctaacaaataatcattcaacatactattcttgaaatgatggtggctccttcgggattgtttttggcctcaataccccatgttacattctaacaaataatcattcaacatattgcttctactgataaatctaggtgaaccaaagcgagaggaagcccttgtagtcggagtgttccctagatttatcaatagaagcaatatgttaccctacataaagaggaacttgttatcagtagtgcaaaagtaactttaaacgattgaagtttgaaagcttcttcaaaaatttaatcataaagtttttcaaaagattgtcttagtaaatatttaccgtagcatgaatttcagtattataatatgtgttaaattagatctcactgtaatatttattattactgtgttacaagatgaagtgaaaaaaaaaatacagataaaatac

SEQ ID NO: 44787 - DNA, 3386 bp, Cannabis sativa
acacacttggcatcatctaataggcccaattcatttttttttaattttatataaaaaatcattaaaaattaaaataaaattttaaaagtaaaataaaataaaaaatgatattaaaaaaaataaaagaatcaaagaatttttacgaacaacttatgaacaatatctaaatctgattaatttcttttaattaaaatcaattcttcaaaacagtcttacaaaaaaaatcttcaaaaaaaaaaagtacacaacactagatcttttcatagtcttgttcattatcttcaacatatatatatatataaattagaataacagaacaaaaaaattcagagatttaatgggtcatcttcttccacaaacccatcaaatagatccaaggaacccactcgatctaaacccaagagaatccccgcaccttaagaaaatcgtcaaagccccattaccgtcgtcttcagaggatcctaaaaccccaaatccccatcttcctaatgcttgaacagagttcatagcagtgtgcaaagctgctgcattttcccccatttctcatcacaaaacccaaactttagtcctcagtcaaatcaagagtcaaatacacaaaaactccatctcaaatttcaccaagaaaatcaaggaaaacaccaagtctgatcaacccacatttaccaagccttcacgttcaccaattcgtctgtcctcgataatttgaaccagtaaacaaaaaatttatataatatatatttattgaataatatacaatacaaagtccaaagaaataatcgacgtccacattaggttgagatttgtttttaatgttatttgattatttagcgttttttcttccacagattatgagtttgcgtttatatgaggaagattgtaattgtgtttgcagaatgttttaatttgttaggtttaattttaatttcttgcagatatattcgtgcatttttttttccaatctaatatatgctatttaaaaaaaaatctgatacatgcttcattaagtacagtgagattaccttaattatagtgcccgagtggggttttgttctctctctgtttgcttcagagcagttaccgttttttctgcaaattccttccacttcttccttgcggttaccaatcatggtcttgaattcatcctctacgccctctttcgatggcgtcgtgctccaggatggcactttctccgaacagtatttcatggtccaggaggctatatatggttctctgcacggcatctatgccttatacctccagtttttgtttgattactctgcctctttttgctttatggattcaattcttaacgacatgaatgctcaattggttttgtctgagaaggaaagagcagttcactctttcactgaagcagatctctcttctgaaaattctgccccaaaattctttcttgtggcgtgctgtctgtcgaatgcctttaatcccaaaaattttatcaagaaaatgggcgaattctggagcaataaatgtcgttttcctgttgaggtatctgaaatgcattctgatttattcttactaactattggttgtgcaggggacaaaatgagaattcagaatggagagccctggcattaccttaatcacattatattgctgcattcacctatccatttacagaatgtctcaaggaatgatttcaccaaggttcaattctgggttcaaatccatcgcctccctttcctcagcaagtctcgagctttagctatgaaggtgggagaatggattggtgaatacattgatgtatatgaggattctcttcatgaaggttgggggtcttttatccgaattagagtgtggattgatgtttctcttcctctcatgaggggcaaactggttactctcccgaaagtgtgtgatgaacatttgttggaatttcggtatgagaaccttcctattttttgctttcattatggtagaattggccacccctttgataagtgtagtggttttttggagcttgtggatactggggttgaaccagatcttccttttgacccttccatgatgggggataagcttcccaactcgggatatgaccgatataggcaagatttctccaaggctaatgtgtaccttttccttactagaatggctcgtaaatcaattgcttctactatcccaaccaccaacacttaccaaattcgttccaccaccaccaaaccttacccgtctcctcttacaaaggctgaaacaagtaacactgctaaggaaaagcctcctcagaaagagactatacctgaattaccttctccttttcccaattttttccaaagcctctcggccaccatgctcactaccccaactaatagccataccataccaaattctactcacctacctcaaaccagccatggtatttcatcaaacatctatgccactaatccaccatcagatcacctttcctctctaccgggccaaggtttacaagctcttttctgtgattcaacaattacttctgtctgagacaaaggtaaagcggtgttagttgaagaaactattcttgagggacagctgctagtaaggctttcaagcgacaagtcgaccctgaaaattttcgcagtgtgttaaagagatgcagaaataacattggcagtagcaggggggtcaatgaattcaacaatcagcaagtttctgatgctctgtcggattccaatgaggagaattcatttttttcagcggaggttgcagatgagcaaccccgcatggagccatgaatatcattagctggaatgcgaggggattaggcaacccttcggcatttagacacctgaaactgcttgttcataagcagcgtcttcatttacttttcattatggaatcaaaacttgcttgtaattcaattgatcgggttcgttcctctcttaagtttagccatggattagaggttcctaggattggtttgaaggggggtttattgttattatggaaggatgatattgatgtaactctgaattctttttcaatgaatcactttgatgtttatgtttcgtatgatcgtggcactcggtttcactttactggtttttatggatctccggaatctcatcaaagaactcttacttggaatcttttaaaaagctttgctcctaactctaattccgaacctcggttaataatgggtgattttaatgaactcttatctaatgatgataaggaggggggtcctttacgaagagaatctcttatggaagagtttaggcgcactgttgatttctgcaatttgactccattggcttattcgggggataagtatacttggactaacagacattttagtggggttctaattaaagaaaggctggatcgtggttttattaatgcaacatggtaagacttttttttttttttttcagaaaatcatctat

SEQ ID NO: 44788 - DNA, 2629 bp, Cannabis sativa
taaatagaaatatatttccttaaataaaaatattcttatatatacaaccttaacgtatttcgcttttattttttttaaaaaaatattataataatattaataataataataataatataatataaaaatgataacaacaaggagggttggcaccttacgattggttagcgatattccctaaatcttattttttttaagttatatagaacatgttacttaattacactaataatggtatgataccagtaagaagggttgccttttagcatttcttataactaaaatataatttttttttatagtttttcttttttttttaattaagatatttagaaaataataatcactttttcaaaacatattaattaataataaaagaacaaattaatgaattttttctaatgtctcaaaaatgttaaaaaaaacaaatgtttaaaattcgagatgaactctaagattaagatataaatttgggaaatacaataatgacgattacaagtaaactacagtaatgacaagagatgtgatacagtaatgataaagggtgagatacggtgattaaaagaagtgagatacaattagacaacaagtgagatacaataataacaatagttttgaatgatcgaaatatgaaaataatgtattatgggaaatgccgtaatttttttctataccaccttatttatttatttttataaaaataattttttaacaaaacaatttaaaatactacatataataaattttaaacttcctaataaataattctaaataataattaataaaattatacatttagtttttaataaataaattatttataataatatgaaataagataatatatttataattttactatacattagaattatatttttaagtaactatttattataatactagaaaaaattaaattagtcgcgcggaaaacagctatattaactagtttttaaaatgatccattaatttattaataagttgattatttttatttactacacatgaaagttttatcgtcattttagaacactactcgggtatctaaatgatgtagtcctcgactcatgtgaaattattttatctcaaaatttaaaattttatcattattatattatatattctctgatacattttggaatgtaaatcataataatgagatgataatgttttttatttatttggtagtagtatgaaaaatgtgatattttatgtggattaaataatttaagatcttgaagaaaatcaaagagtatttttgccccgttgacatctaatcctagtttggccccagactatgacattgatatagctgttaaacaagggaatttaggtaaattccactgactatgagcataaagttttgagtaattaatgaatttacgcttttttaatcactttatatagaacattgctattaggcaccagtagtgcctaacactttctcgacatgtcgcgttgcaaaatgacatttactgccattggccaaaaaagctgttgaggacggcggatcatcatttcctgctattggaaaattgatcgatggtatcattggaagcaattagtattagtctactataaaatttcgacctattctaatttcattctaaggtcaggtaagtttgttgttgtcaaagtgaaatgggaataaagtaatttcttattcagaaaaggaacctttgcatttggttttgtatcgcatagtgaattatgctatcaactatctgaatccttgatgcttgcagttgatattgttcttaaacattgtattatttccccacatagacagactgaaagttaattagtttgatgatagttcgagagcaatcaattattggtttgatgaaatgtcaatattttaatggttggcagttgacaggctatactttggttaggtgagatgataataataacaatgaaagcccttaaattcaattcatacatcagagaacgggatggggtcacatgcataaacaaatattgtttagttgtacaaaatatgaagagtgatgctgtttgagtattattgtttttgttttctctgtaaaatagccagtctacacacatacacatgtttgaacctaacccacgtagcagtatacgttcattaccaatcagaaaatgtagttttgttttcaaccattggatttcatctaaggtatataatgaaaaacagaacatgttcccatattaatgggcgagataagacattataaaatcaattcagaagtaacaaaaagataggaaaaagaagaagaagaaacgtagtcgtacatcatcatcaagaagaagctaaaatgaaaagaacagagttgttgttcatcccatctcctggaataggtcacctagtctccatgcttgaattcgccaagcgcttgatacaatatgatgatcgacttttcatcacaattctcagcatgaaatttcccaaccatgatgcatatattaattctctagtgccctcactatcacaatcccgagtcaaactcgttcatctccctcaagttgacccacctccacccgagctactcaactcaccagaaagttatatctacgtgtacgtggagagtcttgttcctcatgtcagagatgcacttaaacatattgtgccatctcactccaattcaga

SEQ ID NO: 44789 - DNA, 657 bp, Cannabis sativa
ataaagcaatttatggattgaaacagaccccgagggcctggtttgacactctcaaatcaaccttgatcagctggggttacaccaacactaaatttgacacaagccttttcttcaccaactccaatggtcaattgcttctcattttattctatgtggatgatattttaatcaatagagcaaactctacacaagtacaacatgtaatctctgccctgcacaacacctttgctcttaaagttcttggactagttcactacttcttggggtttgaagtgcacaaaactgatcaagccgtttgcctaactcaacaaaaatgtatcagggatctcttggctagaacacccatttagaaagtgtatacttaaattttcaatgatatttagtagtgattatattaaaatatttagtagtttagcacataatcgcaatgaatttaatttttccttttatttgatttgagttgtgatattttttctttaggttactcaatttatttagtatttatcaacataaaataaaatttctataaacccaaaagttaccgatggagatgcaaagtaaaaatatagctcacttaacataaaatatggggaagtttatgttagacatttatatgtataaactgaaatatatatgattatgaataaagtgcggaat

SEQ ID NO: 44790 - DNA, 1190 bp, Cannabis sativa
  modified_base (1141)..(1165): a, c, t, g, unknown or other
cttacaagaatgaacaaatgaataactcacatgatatgaagagctctaaacttgaagccatttgatagaattcttgaggtttgactgctcaatctgcaaaacacactcatcaaaactaacatttggatcaaattagaacctcccaaatccaaaacataaattaataaatcaatgtctcgatttgaatcatatgaatgaatatgagataaacttacaagaagagagcaaatatttaatttggtatgggtatatgttgatcaagaatgacgaaatcgtgtcgcgcaagaactggaggcgcttattacattccctagagtcagttctcggaattgtgcagcgaaggacggaagaaggagatgatcacgttgatgaaggagaaggttttggagacatcgatcttgcaaattcctagatctctgagagcgacgtggacgttttccatggctagaaggaggaaactaaagttctctggtgagttttctagaaattgttgcgtgggtgtccttccgttgggagtggtgtccattgtcctcgagtaggatgctacatttttagggttaaaactatttatatacaaacgtgtctccgttaaaactaacggtgaaatagaaaataccttttaaaactaacggcaaaataagaaatactgttaaattaagaattgccgttagataaccacttttaatatataaagatatgcccttaatcctattaaacatgtcaattttaggtttaggaggttaatatgtgttaacgtaaatttaattgtgttaaacatgtctattctgagtttaataggctaacatgtgtttaacgtaaatttaattgtgttaaacatattttgacccgtaactattcatgctaaactcaaattcattaattatgttttgtttttttaattgtgttatcgtgtcataatctatatcaaacattatgcacattcatcaacatatatacataaaataataataataataataataataatcataaaaaagagcaataagtcatttagctataaagagttgaggggcggtggtaaaatgacagcttaatagatgttcaatttttaatttagaataaaattatttttagtatataaatagaaaaaagtgtcatttgttataaaataatataaaannnnnnnnnnnnnnnnnnnnnnnnnaagaagaagatgaagagagaaagag

SEQ ID NO: 44791 - DNA, 6697 bp, Cannabis sativa
aactgggactaggacccaaacccaaacatggacctagaccgagacctaggacccagacctagatggtacacctggacctcggcctcaaaaccgagacacagattggaactcaggactcggactcaaacccgaaccttgacctagactcaaacccagatccggacccaaacagacattggaactcgaactcggactcggaccaggtcatgaaccccgactaggtcatagactcggactggcaccttggactcagacctagatagggcaaccctaaacggggacaacgatcagaactgggaccgagacccaggacccaaccccaaaccacgaccctaacctaggacccagactgggatccataccggagattcccgctccaattgcgattttgagttctagtttgggttagagttcaggtcggggttcaagtcctggtcagagtttgggtttgggttcggatctcggtccacgtccagatcgggcaccgggtgtgggttagggtcctgggtttaggtccaagtttgggtccaagtctgaggttttgatctcgatctgagttcgggtttagttccaagtctaagtcttgagttccaattcaggtctgggttcgagtttgggtctgggtgcaggtctaggtttgggtgcattctaggtctcagtctgagtttgggtcccgggtttgggtccaattttgggtttggttttggtccttgtagggtttcgtgtctaggttcctgtgttagtttgggcccgaggtaggttttgggtctgagtctggtctgatttttgattcctaggtccaggtctggtcctggttcaggttggagtcctggatttaaatctgggtctgggttctggtgcctaggtccctggtctaggttccccatccaagtcttgttcctaggtcctagtctgggtccatgttcgggttcaggtcccgagtcttggttttagtccaggtcgcagttcaggtttgggtccaagttttcgtcccagtcttggttcgggttaaggttagggtccttgtcagggtcttgatcctggtctgggttgcgggtctcgggtccttgcgagggtttaggaccaagtcaggtctaggtcccagtcaggctcccagtccatgttcgggtcccaattttagtcaaggtctcgatctagaatctggtctgagtttggattcgattctggtcgcaggtacgggtcctagtcacagttccaatttttattctcgggtccgagtttgggtccagataggggttgaggtccgagtcttagtcccagtctaggtacaagtttttgggatcccagtttgggtccaggtctgagtccaggttcaggtttgagtcctaggtctggttcccaaatccaaacactaactacgggttaggtccaagcctcaggtctagatttggatcacggtctcgggtcccaatctagttccacttcgggttctaggaatcggtccgggtcctaggttagggtccgggtttggggtcaggtcctgggtcttgctcctagttctgatgcccgtgtcccgggtccaggtcccccattcaagtttgagtcttaggtcttggtccctgtccaggacccgattaaggatcacgtcctagttcgagtctgaattcaggttccaatctcggtctaggtcccaatctgtgttggaatctaggtccaggttcgggtccaagtcgagagttccaatatgggtctgggttctgaggcccaagcctaggtcccctatcaaggtataggtcctacatcccagtctgggtccatgttcaggattgggtctgagtcccaatttcgattttgattcaatgtctaggttcgggtttgggtcctggtctgggcccgggtctgagtcattgtctgagtttgtgtccgggtctgagtctaggtccgaatccccgtctgggtctaacttcgtgtcctagtccgagtttgatttccaggtgctggtctaggtctaggtctgggtcagggtctcgggccagatctaggtctcgagttttgatccctgtctgggtttgggtttgggttcgagcctaggttcgtatccggatccctatctaggtctgagtttgggtttgggatcaggtcccaggtctaggtctgggttcgagttcaggtctgggtctcggtctcggtctgggtacacgaccgtgtttgggcccaattttcagtctctattttgctctagagctaggtccaagttcagttctaggtctggctccgaaacttgatcacggtcttagtcttgttcgattgtcttggtctggtggttcttgttcaggttccagttttgggtcccgggtctgggtcagggtccaagttttgctcctggtcgaggttcgggtccttgtttgagtcccagatgtggatccctatgatgtgtcccaatctggatcttgttcaggtgccgggtgtcaagtttgagtttaggtctgggaccgagattaggtgcggttctaggtaccagccccaattctgtgtcccaagtctggttccatgtttggctctgagttcgggtctaggtttgagtcccgagtctaggtctaggttgggatccaagtctgggtcccaattcaggtctaggtttgggttggatttcaggtcctggttcagttattgtttcaggtctaggtctaggtccggttacggatctaggtctaggtctaagtcctagtttttagtcccgttcttgggtcctagccttcttctagtttcgattccaattttcagtcatagggtacggtttcaggtccaggttttggtttgggactgggtttaggtccgggttttagtttgggtcctcgtctgggtttgggtttggggctgggtacctaatcctgacaccgactatgggttcggtccaagccccgagtctagatctagatcccaatctcgggtcccagtcttgttccgattcgagtggcaggtcacgagctgggtcctaggttcaagtttgggactagggtggggtctaaggtcctggtccgagttctgttgctctagtccctatcccaattttgggtctaggtcccagttttggtttggatttgggtccctgtctaggttcgggtttcggaccttcacggtatgggttttggtctaggttcgggtttttatttggttttggtttgggtctggatcctggtcgtggtcctgttccaagtcctactccagttcgagttccagttgcaattctgagttcgagtttaggttcaagtttcagttagggtgcgagttcgggtcggggtttgagtcctggtctgagtttgggttcgggtacgaatccttgtataggtccggatcaggctctgggtgtgggttaggttccagggtctgagtcccaggttttgatctcaatctcagtctgggtttagttccggttctaagtctaaggttccgatcctcatctgggttcgagttcgggtgcaggtgcaggtctaggtttgagtctaattttgggtttgggtctaagtttttctcctaggttcgagtccaattatgggttcgtgtcaaggttcctgtcctggtttgggtctggggcaggtttcgggtttgggtttgggtccgacttcagattcttgggtccaagtttggtcatggttcaggttcgagttccggatttagatctgggtttgggttccaaggcctatgtccctagtttagggcccctattcaagtcaagttcctaggtcctggtctgggtccacgttcaggttcgggttacgagtctttgttttagtccaggtcttggtctgggtttgagaccaagtctcggttccaatcttggtccaggttcaggtttgggtccttgtcagggtctggatcctagtttgggtcacaggtctcgagtcctggcgagggctaattaccaggtcaggtccagggcctagtttgtgtccggtcaaggttcgggtcccaggtctcaggtcccagtcctagtaaaggtctcgatccaggttttagtatgagtttgagtgatagttttcggttcagtttatgtctcaggtcgggtgctactcacagttcaagttttgattcaaggtccgagtttgggttcgtgtccatgtctaggtccgaaccctatttaggtcagcggcttggtcagggtcttggaatgagtcccgagttcgggttttggttcaagttcgagtctcagtcctagtctggttccgggactgggtctgggaaaaggtcttggtcactgtcccggtcccggtccaggtcctggtcacggtcccgatcctgttccagggtcctggtcaagttcttgctcaagtttcgattttggtaaccatatttgggtctgtgttaaggtcttggtccagcttcgggtcctcgtctgagtcccagatcaagacatcaactatgggtcttgtccaagccggggctcttggatcccaagacaagatctggatcccaatcaagggtcccaattttgtttcagttcatgtcctagttcccgatgtgggtctgggtcaaggttcgggactgatactggggtccagtttcgggtctcgatccgagttctgggtccttagtcctcttcaatgtttgggtctgaaatcaggtctgggtttgggtcccaagtcccggttcgggtttagattcaggttttggacccaatcccagggtttgtctgtgttcgagtctggttcctagtttggttacagttttgggtctgggtctaggtcctagtcgtagtcctgttcctaggcccgatttgcttctatttttggttctagtttcaagttacggagtacgggttcgggttgagttcgggtccgagtctgggttcaggtcttgatttgtgtccagggcaaggttcaggtctaggtttaagtctcggttagggtccaaggctaggtccggttttgggttcgtttccgcgtcttggtagcgctcttattccaagatcccattccagttctagttcattttcgattttggtatgtgtccgggtcctggtttgagtttgagtttgggtgcgggttctggtctaagtcctagatccagacaccgactacggtttgggtccaagcattgagtcctggatcccaagtcccgaggagggtcctagatcaaggtttgggtatggggtcgggtcccagatcgcgatccaagttttaaggcccaagttctagtcctagttcgggggtccaattcccaggtctgggtcccccatctattttcgggtcctaggtccgggttgggtgcaagttcgtgttcgggttcggattcgggtctggtctgagtccaggtttcagtttttgttagtgtcccaattcgggtcccagcccaggttttggtccgggtttcgggtcccaggtccgagtcttgttcttgggtcttgggttcggccctagtttttgggtttgggtgttggtccgagtctcggtcttggtttaggtcccaagtcacaggtcttggtctgggtccaagtctcggtatgggttcttgtctgagtttgggtttaggtttgggtcctgttacagtcccatgtctgggttctagtctcagtcctggtccgattctggttctggttccgggtcttggattgggtcaggaacctgggacccgatcccagacacacactcggacctagacgtggatctggatacgaacctggactcggacccatacctagacctatacccaaattgggatcgaaacttgggacctagattcggaccgcgaccaagacccaaacctggacccaaacccaagacttggagtcggacctggacctagacccaaccctggacttggaacaggactcaatcgccgacctaaatccggacccgaacctgaacccaaacaagaactcagacacataattgaaatcgaaactaggactaggacgcgaattataacatgaacccatactgggacctaggacctggacctggatgggggacctgggcccgggccttagatccgagacttggatcagaacctcagactcgaacccagaccttaatctggactcaaacctagatctagagccggaccgggatcagaaacccgaactcgaactcggacaaggatttgaaccccgaccgggtcctagactcggacttagacctaggacctagaactagatgagggacctagacctgggacccaggcttcggaattggcaccgtgacccaagaacgaccccggacccgaaccctgaactaggacccggactaggacgtgggacccgaagtgcaactaaattgggacctgagactgggatctagatttggacccgggctggacctgacccatagtcgatgtttggatgtgggacccatacacggactccctagacctagactcggacccagacgtgtaccccgtgacccaaaacttaaagcgaactgggacccgtcaacaaaatcaggggactaggacctggtctcagtcctagaattggaatttgactaggacctagaccaagacccagaccgggatacggactggaatcaaaactcgaatcaagagtgaggacacgagcacgaacccagacacggacatggacccagacctagatgcaggacccggaccgggattggagactaggacctggacccaggtcgcaaacctagattggggacccgaacccaaaattagaactagaatcgggacccaggactgggactgagacccaaaacccgaccccggtcttggtcccagaccc

SEQ ID NO: 44792 - DNA, 1894 bp, Cannabis sativa
gaatgtaagtttagggggcaaaaatactaattagccaaaaaagtattagagagagattatttttaaagatttcaaaaatatcattttatatatttgggccactgcgatttcgaaaagattcgagataagttgagaaatacctcttttttgtatcaattaatcaaaaatattctcatattatattttattaaaatgtatctatttttgtgaatggcttgtccaatatactctcatcttctacttaagcatagcacatgatttaaatcaatctaaggtgtataatggggacattatctataaaaatgggtatatcttaaagaatatggaaatgacagtaaaaattaaaataaataaagtaaagttggtatacaatataattttctcaaaagattcaacctacaataactttaaaggagctcaaaatcagggtattcttgtaaattaatacaatgagcccatacgagcttgaaaaaatcagcaatcatgctaaaattgggccttatagatggactaccaagctactgtctgttgccaatgagcccaactatctgaaagaggacattttttaagatggtaaatgagaacaattttctttgttgataagaatgagaacaattaaaactaagagcaatggaacaattaaaaatccttaatacactctaactttgaatatgtagtgagttattgttttatgcctaaattggtatttttgttggttcatttcattttatattagaatgatttagggtaccaaaatgagagtatattttttatacgtatgtgcaacaagtaatttaaactctgatttagacaccctaaatgattccaaattcctataaaatggcacaatattctaaatgactctaataaacatcatagtataaaaaagtattagaaatatttctttctgggtccaaacgaagaatgcgtcaatacattacaccattaacaaagaaaataatacatttagcaattttattatttttgtttaattatcttttactaacaccaaccattgagatatggagttgaagatgaccaactcttcatctcacaatttccacaaaacatctattagtggttttttaatagatattttgtatatttattacataaattttcagcaatgaaaagcaatattttgatatgtatcacatgaattcatttcaactgtataagttttttatatttaataatattattatcatgtagttaagttgtttttctgattcaacattagaacaaacatataataataaaaaacaaagccctttttagttttttattctttctttcttcactttgtggaagattagtggtgtgtggttataactttattgtttaaactaaatatcctactttacaaaatcttaatactcttttattttagctttgaaaagttgttgtgtagtgagttattaatgttttatgcctgaattggtatttttgttggtccatttctttttatgtttagaacaacaacaaagaggtagtgaaagatgtccttagagcaacttgaagggtgctttttatttttttagctaattcttagctaaaatagctatttggagagttacttttttcaacatcatccaactatactatatatatttagttaccaattagtacaataattttttggttatttggagagtagttttttttttttttttaacaatttaaaattgataataatattaaaaaaattcatcattcaaattatttaacttttattttagtttttttttttaattattatcattacaatccacccatttaaaatgattaatatttgtgagcccgagagatttgcaatccttagctaacttcatcatcatttggtgctcttcatccttaccaaataataatggtaattagagttttaatctactct

SEQ ID NO: 44793 - DNA, 1650 bp, Cannabis sativa
aaaaactctccgttaaggttatcttaaattcaaagaaaattcaaaagaaatcaaaagatggagctaaaactagtgatgaagggaagctctatgtgaaaagaagatatgaaaaacaaaatataagactaataagaacagtcatgggacgatcaatcgctagtcaaagaccaagaatagaaaatgaaactgggaaagcttgctattacaagaaggagggtcattttttagatggatgtacgcttttaaagaacaaattggccagagcgaagaaagaaaaaagagacaattattgcatgtgatggatatgagtcagttgatgtgctcattgtatctatatacttatattatttgaaaataaaatgtaatatatattccaaaaataataatttatttttaaaaaaattattttaatttattgaaataaaagataatacacatttcaaatgttgaggtatcaaaatatctcaatttttttatttctacaaataataataatcagattattaaataataaaataattgtaaaagatatatatacatatatttagcgtatatacatgcatatacatagttggagtgagccattgatggccgtgtatggtggtgatggggtggggctagccaagtggaggcagtggcagggggaagtcgaccaccacgactggcacctcgaagaccaccaggcccgtggagatcaacgccaaaggccagtagtggaaaacgggtccattcgacccgcctaaatgtcaaattggagtgggagctcctggacctcccgatcctctccttctaccttcaagtgtcgagcatgggacccataggttcggtcgaccaccacaagatagtcatgggactgatcgaactcggtggccatcaatgcaacccgaacccaaaactaagctctcctcccttcaactcctttgacgtgcatggttccatgcgttgcccatgcacacgtgaactttttcatgtggctcagttttgagcctcacggcttgaagccacacctttcaaggtttgtgtctcattatttcgaggttcaaaacatcgtcttgataaggttaggattaacaccttaaactcgagctcactcatcaatgaagaatatgtaaaatttggaattacataatttgacaaaaatttgcaaataaattttaatataaaattacaaaaaaattcttataccacaattatggtgtgcaaatttttctaataaaaactgtaaaattgttaacttgattttaccatataattaatgattcacgttcatgcataaaaagttaaatccatctattcattatatatcaacatatgtatataaatacataattacctaacacagtatataatcaatatagttatgaagataactctcataccaattgttagtttttatggtccatatttgaattagaaaagcaggagcagatttgattaaaaaataatttaatctaatatgagtcataagcctaaggatctcaacataatatatacaaattaaatctagattaatgaaaagagagacaatacctcttgtagcttatcaggggatcctcgatatcttttcgtatttttatcaacatctaatctaagaacttgctgaagagctcacatcaaaatcttccaaaatagcctcaatactcaaaaata

SEQ ID NO: 44794 - DNA, 1011 bp, Cannabis sativa
ataatcaaaatattattaattaacaaacacctacaaaacaaagttagcaaaaacaaacaaataatcccccttgagaagcacaacattaaactgaaataaaaagctaactctaacaaaagttttacacaaacaccaaactcaactctccttggaaaaatgatcctatgttgagtatacgaaccataaaaattaaattaaaaccagtcctcctcctttttgtttatctataagggtcaaaaacaaaaagaaaccaaaatttccccaaaaaaattaagatttgaaaaatcaataatgatcaacaattaaaaaaatatatgaagaataagaaatcaaattttaagaggaaactcatcaaaaatttacaaatcaaagcacatgttgatacttaccaaaagaaagacaaatgaccaattttttttagcccatataagtcaagtcacatgactctcctcttttttcttaaatgaattttgaaattaaaaaaatacaaagaaactaaaatattttatacaaaaattaagttattcaaaagcctgcatctttaattccttgtttcataaaaaggacaaataaccatgttatgctttcaaaaatgataagaatttagagtctcaaatacaaatcatacttaccagatgttaaaaaaaaatagacaagttacataaaatgtgaatcagagtttttttttttttttaaaaaaaaaaaaatttagcaaaggagatttacaaacttgtgcacacttgcgaggcattagagtgtgcattgaaaatataatcactgcccttggcatgtttttcatttttttgccttttttaaattgatcccgaaattgaatgttgtcacaccataatgaggtagcccttttatatggcagtgaatcctcttcataactcctaattattacgacgttccaccttactgatcaaaagaaggctttcacacctcagtagaggtagctagctctatttcagctaggggtgagcgaaaaatccaagaaaccgaccaaaccga

SEQ ID NO: 44795 - DNA, 1061 bp, Cannabis sativa
gggaagctcatttttggagtttggaataaacaggggagagagagaatatggaattagtgtcagtcaagagatcaggagaagaccaaataaaaataaaagtgcagaaagaaatgcaaaacatggtctaaatgtttttcatcatgggaacaaaagtttaaaaattaaaaattaaaaattaaaaatgaaagctttggagagaacaaaagagtagagaagagaggacaagaagatgaaatatgaaatgccactttgtgaaggtgggggtacccaagactatttttttaatgttattttatatataaagaaaaaaaaaaggtacaaataattagaattagaattagaaaaataaaaatgcttgaagaaagagagagagaagttttattgtacttggtgtggttggacatgtgaaaatgaaacgatttggaagaagaaagaaagagcaaatatacgctggctaaatctagtaagacagatctaatccatgtggtgatttatctgattgtgtcattgaatgtaatattttgtgttatggaaacaaaagattctttttacatgttctctgagaatttgcaactccaaactgttcttcttttggaaattttttcatgtccagaaaataaaaacctttcttcatttgtttctgtgtgtgttgtgccaattgatagaaaataattaaggtggcgtttgattgagaggaatgaaaatataaaaataggaatgagaataagaagtaagaatggaatggttaaaattaaaatgcataaaaaaaataataaaaaaattattaatttttttttcttgttatattgaaatggtcttttgaaaaatcattccattaaaatagtattccaatactttaaaatacaaccaaataaagaaataaaatgaaaattattttttttctattccattccatttcattaccttcaaatttaattccacccaagtaatgttaagtaatgttgcttcctaatgaagattgagtcttatagttttatatttctaaagcatgtaacttttttttgaatgtaattaagaatgtaatattgttagagcacctc

SEQ ID NO: 44796 - DNA, 3284 bp, Cannabis sativa
  modified_base (527)..(538): a, c, t, g, unknown or other
cttttattttgtcgtttgggccattaatttagatgatggatgaaggatcttataaaaattttagtgggcagaactaaagatttttgttgggttcatatataaattagcttaactatcaacataaattaaaatttaggaaattactctatatactattttttatcattttttttttcaaatttacagcttgggttgtttcgatagttgctctggtagtttctatgttggttgctatatgaattttggttgcgatttaagttgttccgttaattgctatatgagttgctatgtagatttctgtaaaatacaaaaaaaaatactttgaagtgtaaaaataaaaaatgaacttatttatttttacacataaaaacagttttttatttattatttttttttttgcatttttacaaaattctacatagaaacctctattgcaactagcgctgcgacctaattcgcaacaaaaaatcgtatagcaaccaatatagaaactatcggagataccactttagaaactcaaaccgtannnnnnnnnnnnaaaaaaaaaaagagttaaaaaaataatatatggagtaattccccattttttgacacatctataatatttcacaagaaaagctctttttagagaaaaaataaagcttataccatataaagttagctacctaagtaatgtatacatcaattacttgattattctctacccaaattcatcattttactactcaaatttataattgtaattattttgtttattacttaattagaaatagtatttattactatagatatggtttttttttttatataaattcttgtttttgtaaacattaaattttcttaattcttataattttaagcagtttttttttttttttttgaaaaaaggttgttttattattgcaaatcagctacaataatagcttgcaaatcagtagggacaaggcccccactataactacgacctgcataagaaccggcattcctagccaaaaagttgaccgccttgttcgcagatcgtttcacaaaattaagagtcacactccttaaaacattcagcaaagaaacacaatcagcaactattaaaccaaaaggagaatacatagttactttgttttgaatggcattgatgagcacttgacaatccgactccaccaccacttgtgggtaatcggtagttttaagccaactcagaacctctttgagtcctatggcttcagccataacaggttcgacagcaacctgatgagccacagctgaagcaaacaagactcggccctcgtgatctctggccagccacccaaacccaaaccagttttcagaagcaaaaactgaggcatctacattgactttgatcgtatttaaaagaggaggaacccagtgcggagaattgaccacactagcaggcatgtcactctcaaaagattgagatttcgcacttttccattgatctaaataagcaaaagcagactgcaccacagtacttgcaaccggttgtttgttgttccaaactaactcgatccttgctttccaaattgcccacctgatgacagcaacactgcccaaaccagaagcaaaaaaagcatcggccagacccaaaaaccagtcggcaaagcacacaccagcagaaccctagatggctaaattaaactgctgctaacattgacgagcaaacaaacaatcaacaatcacatgctccacagtctcatcatgaagatgacaaaaagggcataccaaaggtacatcaacatgcctcactagcagattgatacgtgttgggagattatttcgacaagctcgccaaagaaaaacagaaatttttgcggggatcttcaaattccataatttcctccaaagacctgagttatcccctccaatccatctaccattcaccacttgaagtctcttataagcacttttaactgagtattgatcagatgcttcgaaaaaccagtaacgattatcaaactcacgagaggagctgatcacaacccccttcacaagctctcggtctacatcaaaaaaagatcattaaggatatcctcatcccaccttctctcattcggagccattaactgaaaaacttttgcatgcaataaagcaggatgagaggaagtgatatacggattatctttatccattaaccaaggttggttcaatacatccaccaaagagccattagctatactccaacgagcaccacacttgattaaagattgactctcaaatatgctacgccagacataactggggttattcccaatgctagcatcaagaaaagagccaagagggtaataccttgccttaaaaattcgcccaaccaaagaagattcattagtgagaagacgccatccttgcttccccaacatggcaatattgtgatcatgaaggctccgaaagcccattccacccgagtgcttatgaaccaccattctatcccaagattcccaagatatacctttaccatgagtattagaagaacgacaccaacacgaacataaaattctttccaactcacgacaaactttcaaaggtaaaaggaaaacactcattgcataactaggcaaagcttgagccacagttttaattaaaatttccttaccggctcgagacaacattttagcatcccaactctccaccctttttcgaactctatccttcaggaaacctagaacagcggacttatttcttcccatagtactcggaagaccaagataagtactattctcatctgcctgaaccataccagtaattctcataatacgatctctcatgccatcatttgtattggtgctgaaaaaaatggaggatttggcaacattcactttctgcccagaagctaactcaaatttcctcaacagttccataatgtacgaagcttccacctcagaggcttgacaatacaagtagctatcatccgcgaaaaacatatgtgagatagttggagcactacgcgcaatcttacacccgtgaattcatctattggtttcgtaccgctgaagaagagtcgagaacccttcagcacaaaggataaacaaatatggagacaaaggatctccttggcgaataccccgcgtagccaaaatcgggcctaaccgctgcccatcatggacaatatgatactgaaccgatcgaacacaagccataataagattaatccacctttgatgaaagcccattttcaacagaatcgcttctaaaaaaggccactcaaccctatcgtaagccttgctcatgtccaatttgagagccatatatcatttcttcccttgacttttcctttt

SEQ ID NO: 44797 - DNA, 887 bp, Cannabis sativa
cacttggaaacaacagaggataaaagccaagataatagtgttaaagtgtagaaattacttgtcaatttattttgttgacattttaagtcaaaacttttttctttttagtaggctttcaatgggtactgaggaagaaaaaagaagatagaaatagaaatagaaatactctgcagttttgcaggagtagcaccaaattgtatagttgggttacttgaaagggtttggcctttaggtgtgattccattaatgtacatcaaaaactgcagtataagaaatggacaagaaagagcagttttcctttcattttcttcacttgaatttccattagtctaattatttcatatttaattactgacaatgacattttgtggtggaactagtcactattagatatcgctattatcaagtcttatttacacttatttttttttaactatttcagtaagtgcctttatgtatttttgttttgataacgttggacaaaagataaaggtcatccatcccaagaagagtttggtggagtctaatgctaagtactatttacttttgatgagatatatatttaattatagctagtactagtaccatctactaatctagattcattttcaagtactgaacattagtattaaatttgccatggatttcatgatatttaacactaatatttaattgaagcatgatgacatcaatattagctttgatactcttaatattaactttatttcttacatttaatcaaccccaaaccatattagttgtgatacaactacaagattggttctgcatgttgtccatttagacaaaagagacctcaatattattttgttacaaaagctatccaatttctatgaagttatcgtatattatcattaaatagtagatat

SEQ ID NO: 44798 - DNA, 3466 bp, Cannabis sativa
tgttactctgcttcaaagctttcatggtatcggagcttcttgactcacgtccatggcttcttctggcgacaactcgtccccagtcggtgttacagatcctcggcctcaggtgccttcctcaggtgttggtgctacagatcctcgtcctcagccgccttcctcagctgctgtccctgcgcactggaatcccttctcaaactcgctaacctcgtctctcaccatcaagctcgatcgagccaattatcttgcctggaaatcccaggttgttcctacggtcattggacatgaccttgatgaaattttgtttaccaacaactctcctccgtctgctctaatcaatggtgatccaaaccctctgtatcttccatggcgaaagaaagaccaactacttctttcatggcttcggtcttctatgtctgaagccatccttggcactgtctcgaattacacctcttctaatgctgtgtgggttgctcttgaacagaagtttgcaggccaatctagagctcgtttacttcaattgaagggacaattgactaatctttacaaaggtaatctcagcatctctgattatgttgataaaatcaagtcaatatgtgattctttagctatagctggtcactctatcactgatcttgatcttattctccacttgcttaatggtcttggcccggagtttgatcctgtggtctcgggtattacatcaagaaatgattctctcactctcgaggaggttcaagctcttctcatgtctcatgagactaggcttgaaagacactcctccatgatggatcttcctacaaaaatggctgcaaaccttacatttggctccaaaccaggtccttatcgacatccctttcactctggccgaatgtctactggtgatcaacaccccaaagtgccaaatcgaaattacagtcgccctccctctaataatcgacctttatgccaattgtgtatgaaatatggtcatacagccactacttgtcactacaggtttgacaagaattggatcacccccaagaatcctccttctcagcctcatgttcatctcactgaacagcaccttaatcctgatcatcacactcaaactctccctgactttggagatgatattggctggtatgtcgacactggtgcgacaaatcatgtagcctttgctatggaatctttggacactgctaccccttaccatggtcaagaatcagttgctgttggagatggtaagaaattacttatttctcatattggtaaaaccactcttccctcttctcattctaatcctcttcaacttcattctgttttgcatgttccttcaattaccaaaaatttagttagtgtttccaaattaactaaagataatgatgtctttcttgagtttcacaagtcttgttgttttgtcaaggacaaacactcgggggctgtccttctcaaaggaattctcaagaatgatttgtatctgttaggagatggccaatcacctctgtccaacagttctcttcaatgcaatcttgtcaattcgatttctagttcatctcactgtaataacactactgttgaatcttgtaattcatcttctgcaacagttttaccttgtaataactcttctatgaataaaactgattctctttcatctcctactgtttatacctctactttgcataatgatgtaaatatgtggcacaacaaattggggcatcctgctcctgaggttttaagcagaatactaaaaacatcaaacattcctcactctattacaaaattacaattttgtaaatcctgtcaattaggcaaaagtcatcgacttccctttcctttgtccactagtagagcatctcagccactacaattagtgcacactgacctttggggtccctctcacattgtgtccaaagataactacaagtactatatcatttttattgatgactacagtcgcttttcttggatttttccattaactcttaaatctcaggcatttgaagttttcatcagattcaagagtttagtggaaaaacaatttaacttgcctataaaggctgtccaaacagatgaaggaggcgaatatagaccatttgaaaagtttctaagtgatcaaggtatcaagtttcaattgtcttgccctcatactcatgagcaaaatggaagagtggaaaggaaacatcgtcatgttactgaaactgggctaaccttgttagctcactcaggtcttgacatgtcttattggtggcatgcttttcaatgtgctgtgtatgccattaaccgaatgcctactgctgtccttggaaatctcagtccctttgaatgtttgttccatcaaacaccagactacaagattcaaaagacttttggctgctcatgtttccctcatttaaggccatactctcatcacaaaatggaattcagatctcaagaatgtatttttcttggctactctccaaagcataaagggtatatgtgtgaaaataaagaaggccgcattttcattgctcgaaatgtgattttcaatgaatctcactttcctgccttcaacgtcaacaacttaaaacaggtacattctgctgcaacttttcctacagctacattttccactcaatctgcccagttttttaatcaaactaatgttgcatctgttccatctgttattgttgctgagcctcatgactctcctcacattgatgctgctgctgtgcactctgcaccttcttccagtagcctgtctacaaccccaactcagcatatgtcagcttcaactgaatcacaattgcccattcccactgtctcaattccttctgcagatatacctaccagttctgcccccatcagaactcatccaatgcaaactcgatctcaacatggcattttcaaacctaaggcatacttggctaccaaacacaaactgccagaatcattaatgcctcgtgaacctaagtctctcaagtctgctcttcaaaattctgcttggaatgctgctatgaccagtgaagttgctgcccttaaaaagaatggtacttggactttagtaccatatcaaagtcatatgcatcttattgacaataagtgggttcatcgaatcaaattaaactcagatgggagtgttgacaggtacaaatctagactagtggctcgtggttatttacaagcaccagggattgactatgctgaaactttcagtcccgtggtaaagcctgtaacaattcgaatggtgcttactcttgctgtgtcatttcaatgggaggtcaaacaattggatgtttcaaatgcttttctaaatggtatccttgaagagacagtctacatggttcaaccaaaaggctttgaagatccaactaagcctaatcatgtttgccatttacataaagccatatatggccttaagcaagcccctcgggcttggaatgacaaactcaagactactcttcttgcttggggattcacagcttctcgagcagattcagcattgttt

SEQ ID NO: 44799 - DNA, 1360 bp, Cannabis sativa
tttgactcagtgaaacagaatcttcatacaaaatttatgttgtaattaaaaaattgacactaaaaatagttattttttgtaatgattgtatagatatattcacctttcaatggtatgtacatgctcacagaaaatatttgaaaatcaaaacgacaacaatttcagaaaacaaatgcattcatcatactgtactgtgaaataattaataaaaagatatggatctcattcattctcattttatttttttatttttgaaaagaaaaacaggatacagctagcagtcgtttaatttcgcgcttgtgagtagtgaccacatttttatatgtgtccatataatattgaaatattctgattttggttacacttgtgatctattaatataaaactttatattcaaatctgaataatgccatatatatttatatgttggccctgtcatatcagtttaataatttttatgataatttaagactatatattataaaaatgtcacgaggagcagtgccacataaattgcagatagactagtaattattttgtattgatgcatacagagtccgatcatataatttaattataacatatactccatacataccccaataaatatgtggtagctttattggctcaaatattacctaattaattatatttttatcgactaatagatatatggttttaattatacatgattattgattagagctacaatggtttttttatttatttttatttttgacatatagctgtagcatttaagggaaggaaatgtgaaactcgtattatcgtaaaagaaaattcatttaaaaaataaagtgtgacctacgtaaagcatctccatgatatattatttaattaaatttatgtgaaatttttacaatattatactccaatgatacattaagttatgcaccaaattagtgtatactaaattctttaccattaatgatgttgaattttaaatttacactaatttggtgtacaactttatgtttttttttctcattctactcttattttattttattcaaaaatattaatcttatatttatagtcctctcaaattaaaatttatcataaaaaatattaattaatttaaaacagtaacaaatttaaaaatacaaaataacaataaaaaaattctaatataataaaataaaaatcacataacacgaagttataaaaataaaaggctaaatatcatttcagacccagtgtgttttttttgaaattaaactcttcagacccagtgttttaaaaaagatattaattggaccttctgttttgttaattgacaaaatggaccttgtattttttaaaattgtacaaataggttttgaactgattttttgttaaaata

SEQ ID NO: 44800 - DNA, 1890 bp, Cannabis sativa
  modified_base (413)..(417): a, c, t, g, unknown or other
atcgttttttttttttttggttgggtcggatagtcgagttttttttgtttgttttgctctgataccatgttagaaatgtggaagtgtattgttcaggaagtaggaataggtgagtgtatggtaaggtgcatgaggtttttttgtttttgctctgataccatgttagaatttgggataaggtgaatgagattccatttcaaaaccaattggcaatgagaggagtacattcaacttatatattctattatctttccagacattaataatgtgagactcgttaacacacgaatatgaaattttttttacatgttgaaacagatagaggcgcgtcaatgtatattttttgaaattttttcaagaatatacgtaaaattcaaattaattgaaaaatactttagagtaatttgcggcannnnnacctaagtttaactctcaattgcaaataaatatttaagtttaattttttgtggtaataataccaagttataattatggaacttttgtaaatacctgatttttaagtattaattttttatatatataaaattagtttaaatataccaataaaaaaatgatacgtggataatgacttaacatttaacagttagatacttacagagtttcagaaatataacttaagtattattactatcaaaaattaaatttagatatttatgtgcaacctaaagttaaatttagatattcagaccgcaatattttaataaatttcaattacaataataataataatgaatttgaggatgaagaaagggaaggatgatgatgaattccattgataattcaatctctataactctctcggctattaactttagtaatactattactaattaattaattgattaattaaaagagaggcaaaattaacaaagttttgttatagatgatattatataaaacttgtttgaccaaactacaaaagtcttcatttttacttgcctcacacgttcatatatatatatatatggtaatgcatgattaattaaaacaaacttattcatagcataatattattttttttcttaattaataataataataaaaaaagtgtgggcaaattctatggtattggtatgtcattgattagatcacttccattctatccccatgtgaaaattggcaaggttaaggttaatgatgatttattttattattagttatatacaataattgtaatatttactcactcatatattatcataaaacaacaaatcgatcatttagaaaatagaagatacacaaaacaaatcaaagtctctttgtctatatatgtatatttagttttggttataacacttttggaaataatattaacgatattccttttaataacttttgagtgagagagaagtgacaagaaaaatgatagtgtttttgaaaaataattttataaaaataaataaataagaaaataatattaaatatagacataaaataaaattcctaacacatattaaaaaaaaataattcaacataatgaagagcattatcttatatatttattactttctatataaattaaaaaaaattaaaagaaaacactatgaaagtaaattattataaaataaatgctaataaccacaaattatgagttgcaaataattgactcaatcaaaattaaataatttgactatttaataagtaaatgggacaacacataataaagcctttttcatataaaaattgttgcatacacatatagcaagttaatgggattttttcactaatatacataattagaaaattatttacaataataaccttacacaaataattaacaatttttaacgtaccacatccaagaatacctatctttaattattagtgtctcacaataaaaaaacctagaaacatgtgcattaaatgttt

SEQ ID NO: 44801 - DNA, 3388 bp, Cannabis sativa
  modified_base (48)..(62): a, c, t, g, unknown or other
tatgccactaaaaaaaatcattgggtttatgccacttacaaactcaannnnnnnnnnnnnnntgccgctatttacccttatataaatatggagtaattatggtacaatgagtaggattgtgattctactaatctaattcagtgtcaattaggaaattttgcctagagttgataaataagcgtaatttattaattacggagattttattagaatatgtgtatataatgtacgttattcgtgaaataaaaatatttttaagtttgccaaccttggggactggattggaggccaaaaagatcaaaacaattttagagtgtaatttcaatagaattattatgataagttgatttttaaatatcggggtttagtggggtaacagtattagaatagtttacccctagggttacgaggttacttaaaggcgaagtaagggcatattaatctttttgtcctttgattagtcaccttattgttgagtggagaatggttgtgattcaccaaatttgtggtgaccgtcagcttggaaagatttaagatagaaatcaaaacaaaagaaattcaaagtgaaaagaaaactcaaaactcacctttcttcttcattctttctctctatttttgaaccctccaaaactagaacaaaccagcaagctttcctccacttttgaagcttattttagccaaggatagcgagaagaaatagctcctccatcctcccaagtaatctaaggtaaaccctaaccttaattttttagttttctaaggttttagatagttttaagtggacgttttgggtaggacttgttgatggagtctagggagattaggaaaggcttcctagagttgtttaagactgattagaattagtttcaagtgttttgtttggttataacaaaagttatgcaagtttgagttatgttgggaatttggcttatgcttgataacttgatttatgttgggaatttggctaaggtttcttcataacaaatgttccttataatttttataggttctctgcaaaatttggtaagatttggctcaagattgagtgagatatcaactttttaagatcagacaagggaatttcagaccgtcctatttctaaaataggtcgatcgtctttagaatagatcgtccatattgagacttgtatcgagaccccacttttgtattttattaatatttagggtattgtcatactatctatcaataaggaaacttctagatatgaatttaagacctagaacgggttaggtcaagttgattaatcgattcttttttgttgttgtgacattaggtctgggatcgttgatctttctccattttggtggaccgacatacctgaattggaactagagtaagaaagtacatctgcaccacatagcatgtcaagatatgactattatcgtttatgactcgattatatttgaggtaaagatacggtgattaccgttaagcaagacaaagtcatgacgtcaatcaaaatcattgttaggtttcatacttgttgattgtgttattagacaatgacaatggtatgtgggtgccaggatagggtattagggattttttattagacaactagagatgtgtggatgccaggttagggcatcatggttatcttattggacaacaatataaatggatactttctgaagtaacagttatgacttgtcttattagacaagtaattgtgcattactgtttaattatattattcttaatttgttatctaattgatatgtgtctatgtttaccttttttgttgagtctttgtgactcacaagggatttgtggtgtaggtaagggcaaaggaaaactagggtagtcacgagataatagtcttctctgacaaatgtacatatcaacttatctgacttggatggccgagttttcaggagacgttttgtgcgacacctaatgtgtattttaacttacttttgtagatagcccttttgtaaaacttttgtaacaggagatccccaaaataaatttttagcgatgtaatcctgttcattgctatgattttattttagtgaactttttactattatcacagattttattaaattgttaatctactattacaaaaacatgttccgaaagcacacacatggcgtccctaggagttagggcgcgtatcagagtatccatagttttaaaagtcctcaagactggtcagatatgtatatttgttgtgaagatatgtcaactcgtggtatagtaagtgttaagtgtttacttattatttaattgacagcttacttcttatgaagcatactagaaaagtaatatagtaaaaatatggtgtaattatatgtgagacatgcttattagcattgatatatggttgagaatataaacggttagaagttgtggatcacaggtgcattaggtcatgcaaccacgacgatcgaatcaattgaactgcgagttggggctcggggtaggtggtgaggaagagaatcctccacaacctcataattggaaacaagtatttgctgctatgcaagatacaattatgcagtaaggggaatagatttgagaccttagagagtaataggctcgccctccacctattcgggtacctttggcacctatggtagtgcagtaaaatgtgggagactatatggaaccgatttatgagttgttcaagaagtaaaaccaacctgtgtttgagggtggcccagatccactggaggcagagcagtgggtaagtatgattacctctatttatgactttatgcggattggacagatattttaattattgtagaaattagaatgcatatgttcccatgcatattccttttgtaaaatatatattattattattttatggaattcaaattaagagccaatttgttctcttattttgttgctaagagttaggttggctaaaaaaaatttaaaatcctaaaatgagatatacttcaaagaccgaaaaaaataagttaaagagtgaaattgcacttataattacttgatttcttatcagttcttattttgagtatattaaaaaaaatattaaaattacttgcaatgcaaatagtttataattgatcaataattcaaattcgagaaaatatttattaatacttaatttcttaataactataagtttataaatataggtatatatattatttgaggggatgcaatcttaattttaaatacttaaattttttttattaaatttaaattaataaacaaaataaaaataaataaaaatattactaactaaatcacataaattctctatttttttattataattaatatccattactatattaattaattattcgaaaaaatcatatttgttataaaataatataatataatataaagtaaatgagaagaaagaagaagaagatgaagagagaaagag

SEQ ID NO: 44802 - DNA, 1586 bp, Cannabis sativa
attataatcaattccagtgattagctatccatgcattagttcgtaattagttttggtcaaattagccctccatgaagtcgtggttgagtgactgtcaaccctacttggtcgagtagctcttaagttagggttttgtcgaatagacacgggacacattcattggcctggtcattccttagccgactcttaaagtcggtttctttcctttctaaagagtaaacgttgactaatctagagaatcagccttgttaatttttggggttaatagtttcataacctgtctttagtaatggtgaattcctatccaaatctaatactaaaattctaaataaactttacaaaaagtgtccgattatcaaaggttgacacagatctgatgttaattcatcaatggcctgacaaaccgcttaataagttcgcaaattgatttagtggagagtacgtgagtatcctaaagtgtactgattcaattgtaacaaaagtttttatgcaaggattggctcatggatcagaattaaagaaaaacataatagtatataactaggttagtcacatacaagagctctaaccatggcttgagacgtagcacttgaagtcaaggaaaagcactatacaaaagaaatgttaaaggaaacttttgccatggaagattcattgctctatcatataaaaaaaaaaggttgccaacgatgcgtcccccacgaaggaatgaaataagacaatttagtgataagggagtagtaagagtagccacaacaactaacactgcacaagtcaggcaaataagtggacatcggatcaaagaagaccttctccagatgattatagcgttaacaaaactaatgagcaacctagagtttttagaatgcaaggataagatgagaaccaatgcttagtctattcaatggacttaagcaaacttctcgttcatagtatcaagagtgtgatgaaaacatcgaaactcatgatttattaatgcactgaatttaggctaatgtgataatcggtgatgggatttgcttacaattagataagtagaatgtctttttcaggacattagtaaagtaaactagcattagatgtattggctatacatcgtactggaccaatcttgacagtgaaaaagatatcataaacttattgttatatatcttctaagtcaatgtcacttacttgatcatatatcatttaatcttaatcctgagatggttaagctgtagattaaatgtattgcacgagttctttaacttgtttgttactagcttacccataggactagcacatacttacatattgagaactcggtagtgtaaatgagtggcagtgttaatcattgatatggaaatccatagcttctgtgtctattagaagtgaaacgatagttccttagagattggcttaacacgataaatgatagagcgctcattttgataattatattagttttctgaaatatcatttataagtatctaagtattttaatgataaagtacattgaaggttaaaatattaattttgtccctactcaatgtaaaccgtttatagaggatcaatgattgttgtgattgaaataatggataatttat

SEQ ID NO: 44803 - DNA, 1689 bp, Cannabis sativa
tccggggtccataccaaatctttcggcaatgggaataatcctgtcaggtcggctgatggtgcacgttgttgagaagaaaacatacaaacactagaggccttacttaaataatttttaaagtcaatttgctaactggtaagaacaactaaaaaggatacaaagttccttcagtgtcaatgtaggcaacctttccatttcctccatgcatgttagtaggaagctgcagagattataggaaggataataaatagagcaagcataattagtttcgtgcttttgcaatcttattggttaataaacccacaccaagttttatatatggtgtatagcaatagcactaatcaacccccgtgatcaactttaatatttaaacacaagactccaattgttattttctgaagagttaagaacattgtttcaccataaacgtaagattggcaaatcttaaatgatttcaatccttgtactgatatgaataatagggtgatggaggtacctgagttccattaaacagaaaaaaaaaagtacctgagtcgaaacacacagagtatgcgcaagctgtgtttttccagacctgagttaatgttaaagatgcaagctaaactatcaattttcgtatcaacaacaaagagtgattcatttatagccaaatgaaagaagaagaaaaaatagcattttatcaatgaaagaacaatgtctcatgttctgaccgaaattccccaaaggattctgttattgatctcgtttcgatcccacctgctcaaaatttccatcatatatattaattaatattttcttttcctaatacaagctaaaactcgtcaaaaatcaaaactcatagacagtcaaggaaatagtagggcgaaattaccccctaacagctcatcaagggcttggcttccagttgttatgcgtataactaactttctctgcaagcaaaaacaataaccaaagatcaattggaatctcagttgagcatacgttctaactcgtcttcacgaagaagtttttcagcttcagagaaatttaggatgaaaagatacagtatacttaccctgagcagagcatcacttcctgtaatgtaaccgaaattctgcaaagggaaaaacaagtatatgtgaataaattgattcctgagctatgccaaataaactatagacggtcgaaattatgtagttcaagatttctaagaacactaaccactatcttctctgcagcttcgcagatcttatcgactttagcctcagataagccttttattcccgttaaatgctgcagcaaagatcatcagaaacgaaaaagaggaagaaataaaacgtgccaaaacactgaccattcaaacgattattgttccgaatttcaaatagctgtaccttcttcgtatgcatcatcaagccattgcatgagtaaatccctgcatcttgaagcttcttaatgtctccggcattgattccttgagcgattactgcacagaaacacgatctatgaattgaaagcaacatttcttgccgattaagttataaaaacgaaattgctgaataagtaaatattgcacgctcaaaacaattaaaattaatacacacacaaatacgacataatttaaaattaatgaaaacagaattagactgatttagatccgactcattgacgagctaagattgaagtaatcactctccgtagaactacaga

SEQ ID NO: 44804 - DNA, 2170 bp, Cannabis sativa
  modified_base (610)..(626): a, c, t, g, unknown or other
aaaaaaaaaaaaaataagaatattctttctatatttttctatcttttacatgattaataaaaataatataattttttcagatattttgtagtttatttaaagttaatttatgaataatttgcatatttaacaaaattgatgtcttattattttcttttaatttatagttgttttttttttattatttttatatatagttgtttttatattgttgtttaggtgttctatagttgttttatagttatttttttgttatttttatgtttttttgtatagttgttatttagtttagggtaaatagcggcataagtaccaaaagtttcaagtttgtaagtggcataatctcaatgtttatttttagcgacataagtaccaaatgtttataaaactataatttttctctaactttgtcaatacaaactctgttaatttcttaaacagtccacatataaggtccaaattcttgattattgggtctagacaaaaacgtgtagtactatttacttccaaatattcatttaataaattcaaaacggagtctgtaatgacaaaactagagaaaaattacagttttataaacattggagacttatgccgctaaaaataaacnnnnnnnnnnnnnnnnntacaaacttaaaactttgagtacttatgccgctatttaccctttagtttatgtgcattttttgtcgtgtatattttttgtttattctagacaatatttttattgtatatatgtgtatttgttttgttatttttatgttatttttttagttatttttcaaaaagaaaaagagaaacaaacatgctaaaagaataaagtggtaacaacaaataccattaaaagatatacaaaaagataaatcaagttgtcaaaactaagtaaaaaaaataccatacaaaaatatgttgaggagttgatattattttgcttattgcaattaggtcaatggtttgttattattttgttactttgtagttatattattgttgttttatacttgtttttatgttgtttgttaagttattctaggttttttttttaattattttttagttgtttttttattttttttattttacttgttatgcctatattttgagccataaacatagacatgatacatggaaagttggacatgaaaattgtgcaaaattgtaataaatgaattgtctcagagatataattgattacgagcaatatcagtctcgcattacgcattagcagttgttaaatgccaaaataatatttaatagtgaaaaaaatacaaacttaattaaattttaaataatatttcatgaaattaatgaaatatattaatatgttgcaaatattttatttaaatttaaatttatctttgtttataaataataattagtatttatgacataatgaaaagaaaaaaataagaaagggtattgtttttaataaaagaattacaaattaattagattttaaataaatatttttattaaaattattgtgatatattttatgttgaaaatattttgtttggatttaattttgtttgtgttttatagatgaagtagtatttgataaacaaaagggaaagaaaatagaaagtggtaaaaatatagtctaaaactttgaaaatttgcattttttcaagctgagaagtccaaaaaaacaaggcccaaattcagctcattttccctctccagcaaacatcagcaccacgtggcgcacttccattggctcggcagaagcacgataggcgcaccagggctttgtccccactccgtctccacgcgcgcgtgcagctcaccagcttctgctggtcgtgcgtgcacgccacttctctggcctgcgactgggcctcgtttcacccgtggtccccaagccaccaaagtggaattttctcctttgttttgcagtcgccacgtgtgacatgcaaccaatgagagaatgacatgtgacactccggtattaacaattagatatttatattttttacccaatacaatttgtaataagttttattacaattcaatacagttttagaccaaaaaaaattagagaaaatgctcaaagtagtccgtgttagtttattgcttttcttagttaattttcttatgagtttctaagttcccttattattaaggtgaacgatgaaatctagtgtatttaattaagtatttatttttattt

SEQ ID NO: 44805 - DNA, 2193 bp, Cannabis sativa
atacaacaaaaagggctattagaattcaattttattatattattggaccaatattagaaacaataacattaattaaaccatagacaataaaagaacaaaaagaacaaataaatacaaaggcaacactactcaaaaatccatcggattgaaatagcgactataggagtggacacttcagaaaatgctgtgaggggagccaatataaaaacaaattttaaggggaccattaagcaaattttttaagaaatatatttatgtatatatatatatattatgaattatcattaaaaaattggaaaaaaaaattgcgagggcaaggatgagggtgagggtgggggccaaggcacccgatgatcatgtagctccgtccctagtgacaacatcataatcgaaccctatcaccccgagttaaacctcgagctcaactctaaatcaagccaccaagaaagtaagtacgtccactcaaaccaccatcagaactactatcggatcaactagctccaaggagaagaataaaccccattccaagccccttatgccaaccttcaaattcgattaaactagtgagggaaaaatacggcgagcttgtgcaaatgaacttgttgcgtaccaattcttcaacaacttagaattatttagtgatatgtataaatattatttattttaatataattattttgattgaagtaccataaaatttatttttgagatgcaataatacgtgtaatataaattacatacaaatttaacacgtctaataataagtaattttaacgggttaatcatcttattcaactgatttttatacaataagtatatatcaaatttgtgtatgatatatgtgtgcacatattttttaaataaaaaaaataaacctgaaaataataaaaatcatttttagataataaatagtacttaaactatcgcaataacacattaatatgcactaataattaattagcaactcatttgtgggatagagtcatgttggaaacagatagtttggtgtgtgtccaagtgattcaaagcgatattttatacctttacaatttgtatttttataaaatgatctgcaaataagttggctcgcaagagaatcttgtttctctacaggtcgtgtacttcagttggagactcttcttctgaagtgcgttctattattttaaattaaatgaatttagaatttattaattaataattaatagaacttatgatttttattaaaaaaaaattaattagcaactaaatgtattcaaaatctataaaattgaatattaaaatacaccaacataattaattactgtatatgatttcactcaaataataatcattaatctattttttcctaggaaaaataataatcattattaagcatcacgagtataattaaacaaagcaacgtggcagaaaaacagaacacacggttctcgaaaacccaatagagattcgccacatctaccgtggatcctacgtgtaatcacgtgacaaatagccgaattttcatttttctaaatttattaataaataaataaacacgaagaaaataagtaaaaaagtacaactattatcactgtataaaaaatcaaaagtgaaattagagagttggggtcacgtggggtcggccggtaaataataaaaacccatcacgtggggcccttcaccaaacctatcatcatcatcatgttatgtagttcttccattcgattctatgtatcatgggatcatccattgggattacgatggtgagtgtgagtcacgcgcttctgttacgagtgccaccaagactttggacggaatattctgctgacgtcactatgaagtaacggagtaagtgactttggacggaatattctgctgacgtcactattgttgttggctgctagtgtatacatattcagacggaactcgtttcttttggttggatttggacgaaatcaaaaatatgatgtcgaaaaagtagtttcattttgattttgattttgattttctgtatttttaaattaataatccttattttctaatcatatatacatgtatgtatgcgtgttttgatgattaatttttgtaattaaaaaataataatttttaagtgtttcttaaaaaaaattaaaaaaaatattttttttacaaaaaaataaaaaataaaaactaaaagaaaattctacaatgcaccctcttaaaaaatggatatat

SEQ ID NO: 44806 - DNA, 2499 bp, Cannabis sativa
gcgggccaccttgtttctttcattacccttagccgtctcattagctcggttagtgtgatggtcatccgaggtaactcttcttcgttctgttggttccctggttaccttgtttgtcccatactgaccatcacggctcctctagtgtttctgtcgttggcctgtcacgcctcatttctgtgatgaagtcgtgcagctgatactcgatcttttgtttcaaacatgaatgaatctcccagcgccgatgtttccctcgacacctcctcagcatgccgtctttcttctacttctagagccacgtatcctcgtgccatggtcagggcccttgtcaaggaaaggcatggttccactattatcgcattttttaattctgagccatgtagtagcccctattttagtgcctttgttgctactgaatcagtgcactttgggatgctaacatattcctcgctgaatctattaatgaatttttccaagggctcatccggtccctgatatattagcatcaaattcgtatccacctttgcaatcctgacacttattgcaaagtttgcttgaaaccttaaaatcaagtcttagtaagagtttattgttcctgaggccagattgtggaaccatcgcagagcggggccccttaacccctgtgtgaaggtcttacattttattgcttctaagtcatccaacagaattgacacagttaataatgttttgctcaaactaacatacacactcggatgggtctcctgtcccattgtattctggtaactttggggctacgtaacgttgcggggcctctacgcgtaaaatataatttctaaaaggtgagtgggtggatccttccatttgtgcccactcgctttgtatccctacttggctctttgcttccaaagctagcagcttattcaacatcatttcctgtagcttctctacttctttattcaccaccaaaaggtttccagcaactattggtttggtgatctgcttccggggtgttgtgcaaagtgcttctgcttctgttatctcctccacttcctccctagttcttcttgattggtcctatgggtgcggtatggctcctagtgctgctgggttttctttcctcccaaatccttcatgcatgcactgagtgtggttgctggtgtgattgttgatgtcgttgtttcctttttcagcggtttcacccacttgttggttgttcatttcttccgcatgtgggggacgctgatatccttcaagaactaccttcatctgtccgttttcattctcgagcctctgtatgtgttccttttggagagcaattttagttccttgtgttgtcattttgtcctcctgttgctttaacctttccagaatctcacgccatggtgggccttggtgcaatgcttcattgttaacgttttcggtgttcacctgggtttcatgagtgttacccggatcattaagcgaggtgaggtcctcttgctcattcgtcatgtctattcaattatttttccaaaaaatttccttctcttttttttatcgtgtgtggattgtgcggcgaaaaaggtctcctgaaaaagaactggttttcccacagacagcgccaaacttagcctaaaatagtcgtaattttttttatgaaggttttttctttttcagttcctaatcccctcctcctttcacgcagtcccattcttatttatattgtacgtccttttattgcatggatgatgtgtccttaactcaacatattcttgacgcgtgtcttctttctttgctcgtcgttgtccaccacgtgtcttgttgttgggtgatggctggttttttttattgtccgttggatccgacggcattgtgtcttatttctgctatttatcttacttctttgggcaatggtcttcttctgtcggaacaccttctgttaatcgtggcgaatggagagatcataataatgactttcgtttaatgccttttttcgacgggagtatttatttgttgtattttaaaacgttattgctctacgttacccgaatcttcttggggggtgaactatccgtcggtgggctagatggaaggtcctcttgagccctgcttgaacttgctcatcttatggcttttcttccgtcggtcctaggttgtatattttaaaccctgacttattgactttccttggattctaccgtcgtcatttgtttgcctttctagtttttggttttttttttcttgttgctactttctcgaggtgcggtccttattttgaccttcttgtttttttttcatttgtgctttttaccttatatttttttatctcttgggtttcttactgtaccatccagtaatgggcctttttaattttactaaattattgggctttagaattagaaatttatctaatttgggtctttgtacttttacacctaattgggcatttatttccttatcgccattccccccccccccccaaaagggaccccccaaaattttgccccccgaaaaaagtttttttttttttttttaaaaaaa

SEQ ID NO: 44807 - DNA, 1248 bp, Cannabis sativa
tgatgcaaaaattagggaacacatagtcaaaacctaccaagatgacattgctagtcaccacagacgcttcttacaagaaattacagaaggtgaacgtcgtttcttgcgagatgtttcttggcctgaatcccccaatttatcatctattcctctagctagttctttatttttacccagagtcacaattgattttgaaccaggtgacctggactttgaaatcatgacctccaagccttgaaaatcaaacactccccaggatcctaacgtcaccttcgaagtcgaactaatagaatcgaagttgctagccattggaggttacgtaggcaccatcctaagaacttgcggtattgagattaagcgggaatgccgagtaagatcagtggttgttggcgagttcagttgttacccaccagtatgacttactcgcgaagcatctgaggggatcagtggtgaggccagtacaagtggctcgactgggataggcacttggagcctcgagcacatcaggctagagccattatgctcctgcgagactacttcaaggatttcctaaaccatctcgggctttccccattccaatggaatcccatttcatatagaatcctcgcaagtttgaaggttcagtacaaatttcgaattgggagtgccccactccccaggaaatagagtatcttaactctgtgaaggcttttcttgcgaggaagaatgcagtaggtggtttttactaccttgcaactcacacaggtgatcgtaagatcattgtggatttgccaaataaaactctctttaaagatgaattcttttggaaaactggtctttccccaattggcacaaccacctttggcgtaatacgtaagtaatttctggttaagacttggttaaattattccatgtcttttttctcttattttgttgatcttaatttttcctttatttttggtagctgtctcaaaaagagcaattttgactctcgagattgccgagcgatacaggctcctcatgggtcttccctttggtcttcggttatttgagttcctcttgaacgtggtcattctaaggtctgtgggtttctttactggcaaggagtttacttgcgatcaaaaatatcccaagtattcttattggcagtagattcctatcccagctaacgaggaaggccaagattatgtggctcagggacattacctctagaacgttgtcccttaggaagctgaaggaggagcatcctgaggtaatcaatgtggttgg

SEQ ID NO: 44808 - DNA, 2194 bp, Cannabis sativa
aaaaccgtaaaaatgttaaaaaaacataaaatgtaaaaattttactaaaaatagtgccttatgtaattattccataaaataaataaggatataattacccaataaagtagaggggtattttcgtcataaaacaaaaaaatatcaaccatatataacagtcttttcagcgggaatcacaaaatccctaattctctttcttctcatcactctccggcgactatggcggtggtggttttcggcaacttagctctctcaatcgacgtagcagcttcttcttctcgtcctatattacctgatcgtaaggttcgtccgatggtggctttggactggccgccgagaagagagtctcctcacgcgttgttgagttcgtttaagggttttgaatcggagggagagattcggagccagagagtggtggttcgtggaaaagcgaattctaaggttaacggtggtgtggattcttctgatgccggatcgagcgatgaagacggtaacggtaacggtaacggagattgggaagaggataggtttgattgggagaaggaaatgcgcatgagagttaaggagattgaagagaagagagagttggagaagaaagctgaggagttgcagagtcaattggaggatggggatggtggtgaagatggtgtggaggagactgaggaagagaaacggatgagagttagaaaagagcttgaaaaggttagattttgatggaattttgtatgttttggattgaagttttgaactttgtgtttttttctttctctaacaatttgttctttttagtaattattatcattaatcaaatgaatatgaattacagagctatactatttatactaatggcatgttaatcggtataatttaacggagaaatgtaatggaataaatgaagaataatagcattttacaacttatgatgtaattggaatgcttaaattactaaatgctttgaataataatattgtcaatattagagaaatggatgagagttaggaaagaacttgaaaaggtgagatttttctgttgtttttgatagaattttgtctattttggattaaggttttggactttatgttttctttttcgttaacaatttgttctaaagccaattgaatgaatgtaaatgtaatttttttatatgatgggttttaagctttgattacttgaattattgttaagtagaagagtagttaatactagaaattttttatggaaatttgtgtctttttgatgaaagttttgaacttcgtgttttttccttacaatttgttcttttaagttatcagatgtgaaaaaaattatgaagaaaattgttatcattaatcaagtgaatatgaattacagagctttgctatttatactaagcttgtagctataaattgtaactaactcttaactaaacagcatctaactaactcaaacagatataactaactaactaacaaattcctcttattggcttaatagtgctcagccaaatgaatgaatgtaaatgcaagctttttatttgatggattttaagcttttgattacttgaaagtgaaagttttcttatttgggtatttttctttgccactctattgttaagtagcagttaatgctagaataagagtaactatgatgtgaatttgggatttgtttttactgataatatcataagataaagttttgttggtattttttcgggttgtgggaataggtagcgaaagagcaggcagaacggagagaaacagcacaattgatgtttgaattgggccagaaggcatatgggaagggcatgtatgggcgcgccattgaattcttagaaggtgcgctaacaatcataccagggccgacgctatttggcggtgaggtcggtttttgttaacttctactactaatgaaaattgtgttctttcttattatgaacaaaccaatgtattaagtataaaccttggttattttgtggttttttagattcaaatatggcttgccatggcatacgaggctaatagtcgccacaccgattgtatctctctttacaaacaattagaggcgaaacatccctatgtcagcatccgacgccaagctgctgaacttcgctacattttgcaagctccaaagctcaagatatcccaagaggaaatggtgaccataccattgattggttctagttatgacaggtaccgatccatttctctagttacaa

SEQ ID NO: 44809 - DNA, 1612 bp, Cannabis sativa
attgagcaagaacatgtacaatatagtcgagatcgattttctgatgagttctctcaaagtgtctcaactttcacactcttacccaagaatcttcttcatctacaagagattcttcttacaaaatcctatctctgctctctcttttctctgcacctctctctctacctcttaatcttttctatctctatctctcaatctcaatttgaaccatattatgaaaagataagtgatggtggtatttataagatcaagatcttagggttcggtggcagcaagaaacgatgttattaagttagttaagcaataaccgacttaaccaactctcctttgagtgaggtctccacatcaacataagtctaagtgcatccgagagcgagtatgagggcttctggaatcacagaccaaggcactcgctgaggtgacttcccaaataggaaagaactagctggagtcaactagccgggactttcttccaggaggaataactagccatctggaactctcttccagaggaggactagctttcctgaagcctacaccttgagtggacataacagtcattcgggaattcccttccggatggcaactatcattccacgagactcttttcgggctggactagttagctatccaggaacatacttccaggagataactaagcttccattactatgacagtcaaatgaaaattgtttatttaaaggaactataccacaaattccaccttgttactttaacattaaaagaataataatgataaaaaaagaatgcagctatcatggttggtatactagaaatctagtatactagcttttaagattgatgaaattcaagcaatacttaaacttgtttacagtcaagaccttactcccatcatcaacatgattattttttatcaactcttgttttacctaacaaaaatctataagaccacaatcatcaactcaacttttgaacctctccatagccgcccagccacgatctttgccccctctcttttcattattgtccataatttcgttgaaatcactaatgcaaaaacacaatcccacaatagaatcctttatcagtctcaaaagcttttgagaatcctctctgaaaatctagtttgaattagagaaatgcaagtaaataaccctatttttaactttagtgacagttaatgtcttttttaaaaaaaaaataataaaacaaatgtcattttttactttttaatacctaaaatacccttccttatataaaaggtattataaaaataccttagagtaatatgaatataacatacaaatactatacattagagtaatataagtattatgttttttttatttttattttttttactgataggtattcttttaatttaatttttattttttcccctcatgatatataatataacttaaaaaaattataccttagagtaatataaatataccacaacaattctatagtcaaataaatatataaaaaaaacttaaataaacttccacaagttttttttctctctttctatcatgatataccatagccaataaaaataatataccactctatttatttattaatatatcatagcacataataaagatataccgtacaaaataaaaaa

SEQ ID NO: 44810 - DNA, 2622 bp, Cannabis sativa
aaaatttttagacccaaaacactctcagttccggtcttgccttaaaagcagttggttatatacaccctcacgtctaagaacaaagacttttgatgatgaacaaaatgcaagaggcttaatttgtcattgtatttagagcaaagaaagaatgcaacacccacaatcttattggtcaactacataataaaacgaaattgtttatacaatttcacgacatatctacctaattggttactcgatttgaaaaataatttgtataaaaattggttaactacctctttaaacttttggtcagaaaaaaaaaatctcttcaaagagaaatttatgaaataatatgaccttaatactgaaggggggcgacattctttattaattatgagttgagatttagaagattaaattgtagttcctgctattatttttgttctgtgttacttatctgtatcactcaaaacaaagtttacttatttaacgattagaaaagcatgataatataattttaacaaaatattataaaacatttttttttaattgtggatattgtcttatatagaataaataataaaatattaagtcatatataagaatacgaactattctacttattactaatgaataaataataaaatattgagtcatatataaaaatatgctctactcatattttgttccttttatagttgtctctaaaaagtgatgaatatgtatgtgggtggtaatgacatatgtcaatgatgcatttatcttcttagtaatcatcatggattggtgggacacaagacaaatagttattagaatttatgaagaatggaatattttgtagaaagtatagaaatggttttggggcttcattaaacctttttttattgatttaatcatactaaataaaacatatttaatgcaagacccccttgcttatgtgctgatctcccttcagttgaccagtatgaactcctttcaggttcagctgattcaccgtcttttttcaacaccttgaagatccatgaatatcaatctgcaacaaaaaagataacaaagtgtatttttccctaacaaaataagaatcaagtaatgattttatcaaaggattggagagccagttagaaaacagttaaaccagtttatatatcgctaactcaactactaaactgactcaaccaataaaaccactaaagtctgacgtagcaaaatatgcaacaaaaaaaatattcacacagatgcaactaaataggatatagatgaactattctataccaagaaatgaacaaccacataatttgccacacgacaaaacatgacacttacacaagattttgtgactaaagagatgtaatggtagtgaaagttgaaattgaatacaacatgttagatactattacaatgatataatactacatatatgattttatgggacgaactatatgattttatgttctatgttttatgttttttcactgagtctgttgactcacatatatatatgattccatgtgtaggtaatgcaaagcaaaaattgagcaataataagtttggagcttattagtgattgtacatattgagatggttaggcttggaggattcggttctttaggacgatatatgcttatatattttgtagttactaggtgacactttttagattatgatgtattttgaaatatttaaaattataattacgcgatctcaaaaattgtatttagtatgtttatttaagtaaaattgatcttatttataaaagtttaaataaatcatatttttcataaaaatcctttaattcgtaaaaattagtacagtaacttagaaaacattatataacgtgcttatttaagtagggggttacatgacacatgttcatttaatcaatatctaaaaaaacttaacaaatgaagcctaataaccaaattagtgttttactaaacttgcttactttctcctctaaaaataatttggatcactactaataaaattaattttggaaacttatactgaaaaaaaaaaaaaaaagatgtactgaatatattttggaagattgagatataacataatgtaataatgtagtggtgtggtggagcatttggcttttgaatgatatcggccacatgtgaattgtgatcagcaataaaggcacatgcttctgcatgcacaacctctctagtgctaaccgatataactggagtggagccataagtgttttcttatttttcccatttttcttgtaatgatgattgttttattttgaaaagaataatgattatgacacatctaaattgtacatattatttatacatatataattaaaagtcttttgattctcataaaaattaaatatgcatcattgtgtatataaaaagtttatacaattttttggaagactattttgtagtgtggtaatttattaaacaaaatcattcttgataattttaattgaagtaacatttaagccaaatttaactaaatatacatatgactagacatgttacgttggctagcgatacttcctaaagttattatattaaactatataggattcaatacttaattagataaataataatattgacacataagagagtgctagacactaataataccctttaacatttctctatacatatatctttc

SEQ ID NO: 44811 - DNA, 1211 bp, Cannabis sativa
ttattattactaccctataattatttttgtaaccctaatattgctatatattagtgatgatattaattattaattaatttgtaggtttatggatcctttgacaaagggtgagtatccacatagtatgagaaaactagtgggaaaaagactaccaaagttcacagaagaagaagccaaagttgtgaaaggatcatttgactttgttggcttaaattactatacagctaactatgcagcctctacacatttgcccaaaaattccctacctagctataccaccgactcaagagctaaccttacaagtaagtgtactatataatgaatcacattataattaattaccaacattattattaaatatcaatagtgtttaaaattatcaccaaaataattaataatattctatattaaaattatatattatcttaaattatactaaatttatatttaattatatcaataactatataatattttgaatgataaatactaagttaagcattacaaaaatattggcccctaattacttcttgtgataattctttctaaaagtaatatttttctttttcatagagtaattttaggtgacgtttggttgtaggtaatgaaatgaaatagaatagaatagaaataatttttattctatttctttgtttgattgcattttaaagtattggaatattattctaatggaatactcaccattttagtggaatcactattccattttaaaatagaagggaagaccattccaatataacatgagaaaaaatttagtaatttttttatcaattttttgtatgcattttaaattttattccattccattcttattcttattcggttatttccattctcattcatgttcttatgttttcattcctctcaaccaacacgaccttaatgtagtgcaaaatgttaaatgcaattttcttcaaacattatattacaaaatgaaatgactataaataataattatttttaatattttggagaaaaaataacatgtaattcattttttaatatgagaaactatgttagttttgagtagataatagtgtccaactaaatttttaaaaattataaataatttatatgtatagttgaaaatatactcatactataattaattgcatgcttatataaaaaatacaaacacatatgcaattcaaatgttttgaatattgtttatatttcaaaaattagtgaaa

SEQ ID NO: 44812 - DNA, 2292 bp, Cannabis sativa
gttggaaggattaagttcaagtaaaataatagttgagagagtttaaccgtaaattattctgtaagttcttgtgtcgatcatgttttgtctttcatacatatacatcatatattgtggtgtaaatttttgaatgttattttcttagctttagtagatattagtaattttgagcaacattatgaagtgtggttataagtatttactaatttttttatgataattattaaaatttaaatatataagaattcaagttggaaattatttttctctattttattttctaaaatacattattaaaagagtaatttgtagcataaatacataagtgacggtaataatacataagttatatttctgaaactttcataggtatctaaccattaagtgttaagtcaatctccacgtgtcagtctttgagtggtctaggtcattaatttttactttttatttaaaaattaatttaaatataccaataagaaaataatatgaggataatgacttgtcacttaacgaacatgtacttatagaagtttcagaaatataacttaagtattattatcatcaaaagttaaatttataccgcaaattacttgtatcaaaactttacttttttaattttatctcaaacttttacattatattatacattaactttttaaaaatacatcactaaaaaatttacttttttcgaataaattatatattaatatatacacattcacatataaaaataaattttaaaacctaattaataaaatttgattagaatagtgaatagtatttataaatataggatataaatagtaaacttcaaagaagtttaaaatgaaaaataatgaatttaaagcaatcagtttctatattctatttttttaaaatacattaccaaaattttactttttatattttacctcaaacttttacattctaccaatacattaacttctttattttttctctacataaatttttatattttaaaatatatatttattcgttaattttgaacatataagattaagtcatactcatacacatacaattatataacataaataaaaaaataataataaaataagtttagatcgataaatagtatttcttaacatgtaaaataactcatgtataccgtttttaattttttttattatttttttaaagaaaaactcattttaaagagagcattcacattaaacggtctactctattcattaaaatttactttaaaaccctattttctgtatttaatcaaatttttacattacacaccaccaattattttatttttttctttaccatttaaatattattatttttaattacgttcaaaaatatataaagaatatatagaaatatatgataaataattaaacttgttttagaacataagaacacttacgttaattaggtgaattataatgttcctttcttcaaatagagaagagaaagatgaaaaatgttaaaaaaaaatggtgttttagctcaaaatttaaagaatgttacagtgtttctccacatatggagaagtattatttatttttcaaacagtatgttaataaaatttaattattatgtattttatatatatattacaagagtaatatttaaataactgtagaggaaaaaaagtaaaataaaagttcgagataaaataaaaaaagtagagttttatgaggtattttaaagaatagagtacaaaaattaatgtgaatgttctaataaatagtactatttattagagctagagaagctagacaagtactatttttgtatgtaaattttgaagaaatgctaaaaggtattatggcacctattagtactcttgtgatcgtgatattgtaatcttatatattttactttaataaaaaaaaaattactgaaaggtactataagtgtctaacacttttttcagtgtcatattgatattagtataattaattatttaaaaataatatttaaaaaatcgctaactaatcgtggaatacaacttatagaaaggttagacactagtagtatgtattctaataacaatactctaataaaaattataaaaaattgttaactaattataaaatgtcatgttcataaattttgttgtaaaataaagttttatgatattctttttacttagagggagtgattggacaaatggaatagtaaagaaaaaagaagaatgggttttgtgatgagatcgatgatattaatctgtttgtttgtagtagaagagaagaggcagccttttgtgttgataagacactcagaagaatctctcaattaatatatatatatata

SEQ ID NO: 44813 - DNA, 2116 bp, Cannabis sativa
ctgtatcctttgccatgcacttggttaggataccagtgatgctgcacctcaagctccagggatggtgtgtgctcactactcacttcttagtcttcaaaactagaatttgagagatcatcactagacaaagatgaacttgcacagagtcaagggtggtcttcgtatagaagttagaacaagtctttgtcaatgtggtgcttgcctccttagaaattaccagggttcatttgcaaaagataggagacaagaaaggatgaaaaacaaattctatatgccgaccaaaccagattaaggatgaaaagaaagggtttcactcaaagttgaaattcttaatcccagaagctcaaaactttgaacggtacttggtaatttatagaatctcatgaacgagtagggaatgaacgattttaggtcaaaattgatatgcagtcacatagttaaatgttatagttaaacgttggttaatgttcgaaacctagaactatctattctacaattagtcaagaataattcaagaatagttaaagttcatggaaagaatccaaaaaacaacgcatatattcattagcaatcatttaaaagcaaaggataaacgacttactcattgtttgaagctctctcaatttgctcggaggctagcatcaatggaattatgggctagttcctttgaaaatttgggagaaaatttggacaggaatttttcctctggttctttgagagtaaaaatggctaaaaggatgctcaaaagctttaatccctttttataggcctccaaaaaaagaagataaatcatttaaaattcgaatatttagatttccccccaaaagtgaacgttagtactcattacaagaagtacaaccatcacacatgcagtgtcattcagccatcgatgcgtgatttgaggtaagctttcaagaggtatttaatactcagacatcgaaaaaactctcaatcaaagtcacatcagatcaatttcaactgtcaagacatgcgtcacccatctggacaagatctctgaccgaatgaagtccacgtgcgaccaagaaggtcccgcacagacttagtcgataaatgttatcctattttttttacactattacgtgtcagttagctggatgacacgtgtctcatattttcctacatgggcggaaggttacactcctagcagcccccaaagattggttgaaggaaccatatcaaccgtacatagcaagatgtccaagtagagccataaggagacatccgaccaaagttgatcgtgtgatcaacttgcatgcgccacaaaggatatgtgagttggcggttttagagatggacatccttgcttccaagacacgaaggtaattcttacattcgtgggattagttcaaagaataaaggtaataagcctaagtttttcattctttgtattgtaattatggaattaactcagtttcttattttatttattatagattaagggaaaccattcttataagcccctataaatagtggtttgatctcactatctagggagataaaatttaattcagaagaacactcaagagagaaagaacgatgtaagagagaattactaagagatttattgtaagagctttagagagaggacactttgttctttgtctctcaagcaatacaactaaaaagggagtatgctattatactattctcacctttagaaattatggtgttctctttacttactgtttttgctttttattatttatcttatttgatcgttttattttaacttattgtcgttggctagaagcaaggtcaataattatatatggagcaataaaaatatttgtatattcaaatattactcttacaatgtaaataatactggagatgtgattaaaaagagaaatttattatatagtttgtagtttattaccaaggaaaatgagagatggtgggaggaatttttggctctttgtaatttgtaaagaattgttctgacctttttcttggctttgttttgtagttggttgatgattaacaaagttcttatataaaaaaaatgaagtttatatagataataaattatatattttagagtgttgttacatcataagatacacttatatataatatataaaagagtaatttgtgg

SEQ ID NO: 44814 - DNA, 3106 bp, Cannabis sativa
gtcaaacaatctggaaattagacaaaatatagatatttttaatcatatctttaactttattagtttaactttaaattaaaataagagataattctaatttcactcaatcgaccatacaatgattcactatgatatctcacttgaattttattgtacatataaaatacgcatatatactcacatctaaaggacagtgtaatcacaatagctaaaaaatcctcaaatatcaaaattcaaaccccatttcaaaaattaataagaaaatacagtacctaatttaaaaaaaaattaaacatacatgtattacacttaaaatcacctaattgaacctaattaaaaagaaagttatttatacgtgtattgaatgtaatattaacctagtatatatagaaaatttttgtgataagaacacttattttgtccttatagtatgatgagatttttttataactatacatagtaatgacttttaatggtacacattaattattgtgtaagtaaatacatacaataaattatattattctaaagaattttgaaaatataaatgtcagaataattttaagaaataaaaataattcaaatcaaagaatgtgtgttaaaaaagtatctaaccaattaaaattttggcaattgtcatatttagttatacaaatatagggacacgattttgtcccgttagtgtacttttacggaatgtattccgtgatgtacgacaactattagatggggtagttatttgatctgagggttggggttgatataggggtaaagggttaaaaaatggtaacgtaccctgagaccattattacgtaccctgagaaaggctgccgtacatcacctaacgacttaagtacatcacgaaatacattccgtgaaagtacactaacgggataaaatcgtgtccctacaaatatattttacttctattcaatatatatttatatatcactttgggtaattctacaatggacactccaaaattaaatatatcaatgcaccccttaaactcttaataataattatgtctaatatcaagtccacactatttggtggggtgcagtacaagaaatattatttacttttcaataacacacgttctacaaactctagaattatgtgttctgttatatttgtaaacacattctgttatattaagtccactcacccacccttctctattaaaaaaaagtcgaatcttctttacaaaataataataataataaaaaaaagagttgaatctcatataaaacaagagagagagattttgaaagcaaggaattagcattgattatataagactgattacactaacgattatttttacattgcagttgcaagtaattataacttaattgtacactcttttttttcttcttgtttcattgttgtatgtaatttttttttatttaattctctcctaaaaagttcagttttgtttcctctttacatctaccattttctggtctttgtcaatgtagtaaagtttgattttttttttgaaataagattcactattgtataatacagtgtctctattgcttgtattcgtatatcaatactttaatctataacattattaaagagacagacataattgaattggatcagacataattattgttatttgctagaaacgtaagagcaaaataacgtaagtattttaataatcaattcaatcaaaagaggtcacattttcagtttccattataaacttgagcattattaatctattattatatgtaaataagtggatagataaagccactcatttttttgtatagatataccgtaattggtgtaattaatatattttacctttaacttaaaatatataaagctctatgttaaatttatccaacacatgttgattcatgtggtgctctacaccatatcccatagcccaatactggagtatccatattatgataatccaaaaaggacgtgttctttcttcatttcaaaaggatatgcaactagctctcatatcctaatccaatcaaataatgccaagtcatcaaatagtccaacccatacgtaccgttattgccacaaaacaaccccctgtggaatttaacctggtgggggaaatcaaattcatggtgacaatattattgaatttggaaaaagaagtatattttctatttatagtctcattttatgtatcatagcacatatatatgtatatgctctatcaaaaaaaattcaaaggaatgtgtttggtggggaaaatcaaattcatggtttgaaggaattttaaaaaaataattaacattttagaggagctatttggattctttggaaactaaaaataatggtgtcttcttgaatcttttctatgataactccacaagccatgttttatggacaattatatctcttgctcaattagtgtttagattgtgtaattttttggtgttagttcataatatttaagtccaatcttcttatttaattgtttaagtgcttttttcattatcgtttgacaatacaatattgattaatttttttttttctttttaatggatattgaatgcaactctttttggtggagtagcattaggcgttgctgataaatattttctctcaaagtttaatacatttgggatgtttattgtgtgatcaggttagaatttcacccttattgagtttgaagcttcattataatgactaaatgaataatataaagtgtcaagttcagacatgttacatcacctattttattttttatgaaacattcttgttggttattttagatggaaaaatatctaatacaacacttagatgaagaattgaggcgtttacaaagtgtgacccaacagatggaagagtgtattcattcaaagaatcacaaggttgatagattgctggaggtaattttgagggcagaggagggtagaaaaaattcaacgaatcaaattttgtctggtttagcaacagtaattgataaaataaatagttttgaaggtcaatgttcaaagggacatgtgcaaaccggtttggcagagagtaacatggaaaaagatgctaaacaatttcagatgaagcaatctaatgttggtgaagtgaaaactaatgtaatgacttcaattgaatgtgtagatgg

SEQ ID NO: 44815 - DNA, 2782 bp, Cannabis sativa
aataagttttcaaaatatataagtttttaaaataacttttttttgcacattttttgtaattatgttgtttttgttgtacatttatgaaaaaagcccaattttatatttgtaaatgataaaaaatgaatgattttttagccgcaaaacttcgtacctaaaattatttaaagagagttgctaaaaagtactatagcactcttttcggtttcttctcgctattagtgaaattaaatatcaaatctcatataacttaacaaaataatttctaaagaatattgctaaccaatcgtgtaacgctatccatagaaggtattagacaccacaggtgcccaatagcaatgctcttactgaaactgtaatttagtttatctccatttgttcacttttattaggtggtgactgggatgacatgtgtcaccacctaattgggccaccttatctatttttataatgtgactcaatagtgacgagtagggagcaagtcgtcagacacacatagttattgcacaggcctctaacagttagtgatttttaaaaactaaataaacaaaactttagaaagaattaaaatagcaaataataaataagtgatttttacgtggttcgggcgttaataatctctagtccacgagtcaattgtattagccattcaggcaagtgtttggataatacaatgtctgtttatagtataaatcctagctttgcactcattttatttctcttcaagaagaagaagaaagcttgtaggagttttgcagaggttcagctaatatagtggtcgacccgagtcatagtagtcgacctaggaggagaccctagccctgcgcccaggttgactacgggatctttgggatggaagttcagacttgaataacatgaatctgacccactatcttttagtattctgtaccatgaagacatggagcaacttaatccaagccccgagagttgaaattacatgaacctacaatccgaaagccaacctaggcacctagagttttacctggcgttcaagttaaaattctcaactagagttttggtttctgggaccgtcttagtgcaaaatggtcaaaacttgcattgggacatcaactagacatggacatatttgaggcatcagagtcaaaatcagagtgagctaatttttgagcgcccgaggacccgagcacccagcgcttaggttgacaatctatcaatctaggtgacttccaagtgttcgatttgagatccaattttttcatcttcttcatcttcatcaaaactggggaaatagttctttttggaggaaaaataacaattcttgggtacaaataataaggcccaccgccaaggttgaaacatggggctggccctgcaccctgattgacatttcgtcaacttgggccatttgaaatagagtttttcaagaattatatcgagcatcttctccatttttagaaaatattgagattcaactattttcggggaccaaacagaaattttggaggggcaaaactaggacttaggtctaaggttgacatattgtcaacctgggctattttggatcaagtttagaaaaaagtggtctaggcatttttttgtgatcagaataccaaagattcaagaaaacttggggtgaaaaccacaatcctgagtccctgcaaacagggcccagcgcccaagttgacctagggctgggctcagcacctaggttgacaattaacctggaatgctaccttatttaattccttaaatgccaaattctatgtgaccattgaattaagaatggtcaaaatggggtgggagaccttgtcctcaagttcagaagttggaagcttcaaaaacaaaatcgcaagagttcgagagtaagtacctagcacctaggttgataaaaggcctggtgtgctgggttcagcttatccaactctaatgtcgttttaatcgtctgtctagtttttcacaatgacaatgatatataaagtcagagaaatcaaattcataaattttcatttctcatttctagctcacctagaaatttcaagttttgagtctctcatttccacaaaatagcaacagctccaaagtagactaagtgatgtcaaaatattactgaggtattgtaaagtacaatccttggatgtttctacacttacccagcgtctagattgacaccatatgtcaacctgggcactgaatgtcaacttgggcattgggtcatgaattgcctttagtaaaacatccataacccactcaattttcattcgattgactccattaaacttgcatttcgaagttaatttaatgctctattatgtcatgtctcacactctagatataattataaagctatcatcatcaaaattcaccccaagagatttacaaaaacaagctttgggttacctacagcggaacctgctggactccaaaaaatggctatcaccaccaagagctaatttttaccgttagatcatcatcaacggtgacaaatattttagttgtattttcccctattttttggacctcattcacatataaaaggagagctccgttagctcatttttttacattcagaagactacccacaaggttagagcttctctctctagtctttctcgttctagatttgaagcttgtgatactagtctattactgtaattaccatcttatgagaaataataactcaaagtagacgtaccgccattaatatcgcgatataagggcgaactataataaatttattgtgtctctcttataaaaacttaactacttatttattcttgccaatctagtgagcgggtgtggc

SEQ ID NO: 44816 - DNA, 3110 bp, Cannabis sativa
aaaatgcgatttctgatctttattaattagtaaatttaattttattgaaatggattttatttagggcacaaaacccaacaattatctgtgatcaagtgctcatccttgagctgtttttctctctctcaaaggttttttccacaatcattcaacatgaaaggcaacgcaagattttcacccttcccaatctaaatactgtgatctcgatgaaccctccccgcaacaagcgacaacatcctttttgcacccattgtgagaagtcaagccatttgaaggaaaaatgctacatactccatggattttcccttggttatggtgacaaacggaagactaaatctacacaatgcactaccacaaatcatggtcagtcctccaagagtcctacagttcgaggccaacttgccaagggacctacggtcaactctacttccgctcctccttctccttcggtgtccgacatgctggcctctctccaagatatgatagcataactcactcaacagattcaccaaactcaagctgttgctgctgccaacactccaatggcatcaaacttcactggtaaatctatgtcatggatagttgatagtgggactactcactgtgtttattttgatataacatgtttttcctcccttcatacagtccctgttgcttcttatatctcactacctaatggacttaaaatacatatacataactctgaaattgtgtaattaaatcgtcatttacgccttactaacgtactttatgttccaaattttcaatttaacttttgtcggttttcgctgttatagaagacccaaaatactcagtttaatttactcacaaagcttatttttttaggacacaagtcagaatatttggattggaactgctaatcgtgttggacatattttttttttacctctagcaagtctcaacttcatcctgtagttttattttcaataataatactcgtaattctgctgttcattgtatcgttgtcaaaaaatagcatttacacctaggacacacttctatacgaattataaaatcatggaataaaacattgaattttttttattctgattctccaatatctccttgccatatttgtcacttagctaagcaaaagaaactttattttaacttagctaacaacataaaaactgttctattttatttaatacatctagacatatgaggaccatttcatacaataagtattgatgggtatagatactttctcaatattgttgatgatcacacaaggttcacttaagtttatatgttcaaaagcaaagttgatgctcaaacaatcataccacagttttatgctcttatattaaaccaattttctacctctataaaaggcatcaaatgtgacaatgcaaaagaactacacttacagtccttctttgcaacaaaagatatcacaccatatcattcttgtgttgagagacatcaacaaaagtccatagttgagcgtaagcatcaacacatattaaatgttggacgagcacctgccttctagtcacgtttgtctctcactactgtagttattttatacatgcaactgtctatctaatgaaccgaataccctctattttattacacttaaagtcttcttttgagttattatataacaggttgccttcctatgaccacttacgggtcttcggctgttgcctatgcatccaccttggacaactcacgacacaagttcagtccacgatcctggacttgcatattcattggatattctgctagtatgaaagcttatacattacttgatcttaagactaacaaatttttttactcttgagatattattttttatgaatacaattttccagctaaaagcacatgttctagtgcaaccattgatgcttttttaatctgctaatgtttcttctagtgttcatcctcatgtacctaacattgtaccccaagccaccctatccgagccacccaatgtcgtgactccaaccaagacgagtgtccctcctccttccaaatcaaaagctaactgtcccattgttttcccaaatcacctataggattacatatgagtattctactgctcacttaatttattttcttatcataagaagttttccctcgctttttgggccaccattctatgcgcccacttggtgtctgaacccaccaattttctccaagcttcaaaaatgcctcaatggctgaaagctatggacaagtgttgaggcacttcttgccaataaaacatggattgttttatctctccccctggccaccactttattggttgcaaatgggtttataaaatcaaatacaaagccaatggtgaggttgagcgattcaaagcttgcttagtagccaaaggctacaatcaacaacaaggcatcgactacctcgaaacctttgccccagttgcaaagttcaataccttaaaagtcattctttcccttgttgccatttagaattggcaactatatcaaatggacatcaacaatgccttcttacatggccacttagatgaggaagtctatatgtcttttcctttgtggtacaaacacaaaggggatcttcctcccaatgtcatttcaactaaataaaagtctctatggtcttaaccaagcatcgagacaatggtatgcaaagctaagctaaactttaattaatgatggatatacacaatcaccttctgaccattctttattcattcagtctactaatgatgctttccttgcaatgttgatttatgtggatgacatcatcatagctagcaacaacaccagcgatgccaatacattcaaaaggtaccttgactccaaatttaaactaaaggaactttgtcccctacggttcttccttggcttaaaagtttgtcagtctactaatggcatatctgtctctcaaagaccctttgccttacaacttctaactactacaagttacataggtgccaaggccatttccgctccaatggaacccaatattcgtctcagcaaggacaccgaccccctcaaggcagaccccacctcctatagaagcttaattggtaagctcatttatctcactatcacttgacctgatatctcttttgcagtcaacatgcatagtcaattttttaagcaccccgt

SEQ ID NO: 44817 - DNA, 4755 bp, Cannabis sativa
gttggagttgagtcaggattttaagggtttaatttatatttagattttatttatattttttaagagttaacaatagagtacttaattggagtatatatctattctatagaaaacttatggtagagtatattttttaagagttaacgatagagtacttaatgttaccgtgaatatcctatttcaacctcttagtcaatctctgtgttcgaaaacttatggtagagtatattttttttcaagacgatgtttgttatagttataatatcaagcttgtaaattttcaagtttctttgaataatttacagtattgataatatagttcctgatattttaatttaccacatgcgttcaaaaaacttcaaacttgttttcaacactgtaaattatttaaaaatttacaaaaatgatattataacaataacaagtactgctatgaaaaataatattatgacatattttgaggtgtggaggttgactaaaaaaaattgtaataggagattattattattattatttttgaatgaaagatgtaaatttattaaatcatctcttgagcaattacatcaagaatgctactcgggatagaagtcaccgaatagctgcaatcatgtaaccatgaaactctagctaagccatgagcaacatgattagcggatcgtttaataaaacgtaaattaacattttctaaatcagacaacaaggatttgcaatcatcaatacaactaccaaaaggagagatcatattgatcgagcttttaatagcttgaacagtgatgaaactatcagttccaacagtcacgttggaaagatttagcatctttagccaacttaagacctccttcacttcaatggcctcagcaagatttgggtgaacacaaccaacccaagaccccgactgagcttgtaacacatgacccatctcaaaacacccagccatacccaaatctgttagcaccctctattattgttgcatctacattaatcatgtaattatcatctaatggagcacaccattgctcatccccttcccccatctccatcagaaaaagagaaatattaaatgatttgttttgaacaagtaaccattgttcaagatcacctttaggaaaagcaacaacatctttaacagtactactcttcccattccacactttgttatttcgatcatgccatattgcccaacataacgtagcacccaattgcctatcctccttgctccaccgttgggactggtgttgaaaccagtcaccaaaggaggaaaacacagaattcccacgaagtaaaccaactttgcaccagcaagcagctgcaaagttgcacaaaactagacaatagctgatattttcagccgattggttacacccggggcaaatagaggggatttgaacatgcctttgaatgagctaagcacaagttggtagttagacaacgcttgccaaaggatttcttttacctttgagggaaccttcaacttccacaggtcattccaaaaaccagagttgccattaggggcttgaggatatttcaaatattcaatcaatttgtaggcaaatttgacagagtacttaccagatgtttccttgctccaataccaagtattggtatctcttgaagaagcaattgggatgctgaaaatcaactctctgtctgtactattaaacaaatcaacaataatctcacggtcctagcttcttgcatccacgaccaacaaacaacagactttttgatcacacaaactaggatggaacgatgtgacaaagggattatcattgtccggtagccaaggatccttagtgatggatacatccttgcccgtcccaacaatcaaacaaccccttttaagatacatctttagcttcaagaatgctcctccaaatatagctaggattacttcttaatttagcatcaaagaacgacccacgaggaaagtatctagccttgaacattatgaaaagaaataagaatgtggtgttgggtttcctcaaagagaaaacaaggaaagaagttgacagttaggatagcaaatttctgtctcgtgctggtaaagaagttcttttgaaatcggttgccaaatctctgtctaactatgcaatgagtgttttcttaatccctaaaggcacttgtgaggaacttgaaaaaatgatgtgcaagttttggtggaaatctaactctaaacaagggaatggtattcactagatgagctgagatcatttgtgtgttccaaaggatcaaggggggatgggctttcgccacttgcatgattttagtattgcacttcttggcaaggagattattattagagcatccctaatggtaaaaattaagggatgcttgcttaggtggatagatgaagtggcaaaatattaagatgctataccattggaaggaaaagaatgctattctaggaagatgtgtgaataatgatacacggtagcattgatgctatcattatttttctaataaaaaattaaaactaagaaattattattgctaaaaaattaaataataatgtgtgagatcataattatagtatttttgaagagtgttataccattggagtgattttagaagtaagaatagcaaaaatgatatggaagagagataaaataaaatattatatttttgaatgatggggagatttttagcatcattagaggatgctacctgttgcctcgaatttatcccaaaatacgtggcagcggttgcatgtgacacgtggatgtcaagggcacatcatccgtgaaattagccaagttatatatagataagcaagtgcacttcaaggagtgagccctcgaagaagagcataaggcccgcctttattttctgggagctaaagatacgacaaagcatctccgagagaaggagaatttgttcagacagtcatttcacatttaatgcggcatgagggaaacgtattagaacacccataaaaggatatgacagacggcgtcagcctcgtttacggtgattacacaataatcaaagagtctagtgacgactccattatgaagtatcacatcaatcaagagaggataaagattactgtcacctaatccctatgatacctacgacataggtcatgtatgtcttatttcatatatcttacctaagggactgacactaaaagacaagtgatccatttttaagtgattcttacaaaactctgtaaatacccaggaaccaaagaaaaaaggggatcgatcaatcgaagagaaagaaaaaagagagagaattcaccaagaacattctctgtataagaactctcattaataacaaagactcgtagactacagctcattaatgttctaaccacgttaaaatcctctgcattaattattccaaggctctcctcattatatcatttatttggttgtcaaaaatctcggtcaacactaccattggagatgctcttagcacttaaccaaattttttaaaatttatttattttgctgacatattatattcgaacccacaatgcataattttttttttaattatattttgctgacaaatatatatttaatatttatattttttttaataaaataaaattaaaactacaagtggaagaaacatatatttttttattagctttttattatagtaggaatgtaattcattttttattagctttttatagtactaatgtaattcaatgttcttttactaataaaattttaattctctacatacaactatacaataactaatttataatatcaaaagtctactatttttatagttaagaaaatgtcctattatagaaaacaaaataggagttctcttactataaaaattttctatatatttatagaaaacaacaaaaatttatagcatgaaaggtaaccattttgattttgttttttctaatgttacttaaaaaattttagtttttccttagtttctgattaattaagcagaaaactgttttttttttaatgattgctgaaaacaaactttacacaaaaaactgattttttttattttatttatcataaatttttaaaatatttttctttctgtaattattgttttcttattaaaaaaatccatattaattaaattgttttagaatttgctatccgaaaatagaagagaagagcttaccaagaggactcccttgacattgtttatggttagagaagtatctccaaaaccagtttgctctttcactattttgaggagaacatcaacaatgtcttcatgctcttgtttttctcttcctggactgagatgatcatcaatcaccctttgaaagaaatcatccatcttgtgaaaaatcctttcgcgcctttgttctaaacccgaaatcttgtcaacaatccatcccacatatggaaagtactcagctgcacaaaaacttcccatgaagattacaacctcttcaagtatgtcatccaatttctcatcacaaaaattattatctttaaaagttgtcccaaaagcagtcctgaaaattatgctaccagtaaaagcaaacaacttctcagtaagatcaacagcagcaccagcagaagatgtggagtgatgagatatggagttgatgagcttagtaacttcctcttctctaactgattggtatgaatttacccttttcacactgaagacctcaaggacacaaatcttcctaatctctctccaatattttccataaggtgaaaatgccaagtcttgaaaattgtatgtcagttgcttaggaccatgaaattgtggtctgctgcaactgctgagatcatgagtcttcatgacttg

SEQ ID NO: 44818 - DNA, 3839 bp, Cannabis sativa
tattgctagtatgtcggttttataaaccgacgtaaattctttaagtgacacttaaaaacagacgtaaatggtgaattttgtaatagtgttaagctctctatttataggaatatgtcttacaaggaaaggaaaccttaaatccttttttcttacaattaattaaataaataaaaaaggaaacaagagagctaatacttgatcaccaaacatagtttgacaaaactttatagagcttgagctctctttgtgttcttcattatttctaatcccaatagactcaaataatacatttctttctatttatgtcataattaatttattccttccatttaaatactaattttcataaaataattatatcaagataattatttttcataaaatattattttaataattattattaatttctaataacaaaatgtttaattaataatgtaaagtccttagttgacatatttggtaaaaatgacaaaattaatttttttttggtatgttcaaaattagttgtttattgcatttaatatttttcaaaaatactttctcttttctaagtgtaaaatatctttcaaatcaaattgtgcttttattggtaaataaatatgagattttcttatttagattatttgatatttatttatatatttaagcaaagtcttaatattaattgaattaattcttatctgatcttctagttaagaaaatatatagagctgtcatttaatgtatattttatttccttatttatataaaataaataaagaaactttgctgaaaatctatcaaggtacaataatgaatctgtttaaatggattgacagtttgtttgaacagattctaacttttcttatgggaatattttccatttaatgtttaattatttccttacttgtaaaacacgacttgttgtgtatttgttgagaatatattattactcaggttgtgggtttatatcgaaaggaataaaatattttattatttaataaatactatatctatatatggtatttatttgtaattgatttattttattccaattcttatatgctctcattaatctctcaagctaggttatgtgatgtctaaggaaaattcgtggaaatgaacttacctttgatggagtctagattcacaatcctgactagatatattaggattctgtttgctcactttccatatctgttcagacagaatttcatcatttaatgagtttttgtaaagaaactaattaatattttctctttgtatttagacctttggagctcaattttaggggtcatttatcaatataaatatgacataaaccaacagcaaaaggttgaactcttccacttcttaatttcttatatttttagaagagagtgtttcttttgtaaatgatggttattctgctattcctttgtgagtttgtgtgtctttgagagtacttttatgtgaagtaaaaagtgaagaacataaagaacaaccatcgggagaagtttcatccaggttttgttttgggaggaagcaagcaatactatcttcgggagaagatttctaaaagacttgcttcaggaggaagtaagcactaatatctttaggagaagatttctacaagttttgcttcaggaggaagcaagcaacattatctttgagagaagatttttacaagtcttgcatcgggaggaagcaagcattcatcaagtaatttgaagggagttcaaaccttggtgtcttaaggagattcattattcagcaaataagagtacatcaagcttgcagcaaaatatcattagagggagtctatgttttttattcaagtcaattacttgtacttgttgaaatttgactaatgaatcttatctttgggtatggctccctggactagtagcgatctgtaaggattgctgataccacgtacaaaatatcgtgtgtcattttaatttctacaattttactttctgcagtttaattttgatctatcaggttcggtttttgatagagtagatttcaattttgttcaaacaattttataacagttccacattaattaaattgtttgttaattttacttggtaatattaaaaatgaaatttcaattggtatcatagcggttcactaaactcttagtgagatattgtgattatttttcgtttaatttattttgtgtgaaatgttttcttttgcagaagttagtttggtgtatcgtcctccacttctaaatgacttaaactatccgtattggaaagttaggatgagagcttccattaaagcttaagatgagaaaacatggagagcgattttgtctggatggtcacctcctactaaaaaaggtgaagatggaaacatgaaggtaaaatctaaacttttttagaatacagaagaggaaaaactttctagctctaataataaagctcttcatgccattttcaatggtgttggggaaagcttcattaaacttgtttctacttgtgtttttgctaaagatgcatggactatccttcaaacccagtttgaaggaactgtagatgttaatagatctagattgatcatgttacaaactaggtttgatgatttaagaatgactgattctgaaatactgtacaaattctatgaaaggttatctgatatttctaatgaatgttttgcccttggtgaaaaacttgatgattttgttttggtgaaaaagatagtgcgagtacttcctgataggttcaatgttaaactcacagctatgaaagaggcaaaggattttagtactatgaaagtgcaagaattgatgggatctctttgtacctttgaattaaattaaaatattcgtcaaaaaggtaaccgaagtgctttcaaagaaaaagagaagaccatagctttcaaaagtattgaaaaagaagcaacagatgatgaagatggtgataatgaaatgacaatagttgtaatgaactttcaaaaatacatgaagaaagtcattaaaagctaatgcttttcctcttaaaccttttcaatctaataacaaaagtatttagtgtagggagtgtgcaggatttggtcacatccattcagaatgcgcaaacatcttgaaaaagaagaaaaagggtatgattactacttggagtgacaatggctttgaaagtagtgaggatgaggaatgtaatattgcttttcactcaattctacctagttttaaagttgaaaagaaagaaactgtttgcttgaataatgtttcaataaatgaagaaaattttggtagtgatgaatctgaattgaatgatgagtctttgattgaatcttacaaagagatgtgtggctcatgggtgaaactgtgttctaaagatcgatcataggtaagaaaaaataaaaaattattcttcgaaaataaagaacttactaatttaaatgagaaattgtaaaaagaaataatttcaaagaatgtaaaaaattaataagttgtctaaggatttggattcttttgaaaaaaaatgttagaatgcttaaccctaattctaccatttttgaggatattcagaaaacaggtcaaagaagtcatgtaggtcttgctgcttcaagctctcaaaatgcaaagaaaaccatctttgtctcagctagaaaattttcacctgatactcccttgtcatcttcgttaaaatcagtttcatccaatgctcaatttgcttcaatagttttgttatagtcagtaggtaaatccaaaggtaagcctaaaaaattcgttccaacctatcacttttgtgcaagaaaaggacatattcgacctagatgttttactctactgaattttgctaaaaatgaatatttcaagaaattcaattattttgataattcaaagagagtaaaaaaagaaaaaa

SEQ ID NO: 44819 - DNA, 3220 bp, Cannabis sativa
tgtgcttgaaaaatttgaacttgtgtgcagttgatgacgagtttgaagaagtttcttgtgctaggaaaacttaattagtagtgtgccgattaaaagtttgatagggcattgctcggtattgacattgactaataatttacgtttttcattgttccaaatgatagtgctcccggtcttgtaagctttcacattttatgcttttgtgttttctttcttcttgatgtatatgctgacccatttatttggtttccagagaagaaataacttcaatcaggggaggcgaaggttaaatggaagaagtttcagagctcagagagacaacagtattagacgaacagtatatgtttctgatattgatcagctggtaataattttatttaggcctgggttttttaatcctcacaacctagaagtatgtatgcacatttatacccacatacaattctatgcactgatatatatatatgtcaatatttaattaagtactcttacttgtgtctgcattttcgtttcttatttgaaacaaacagaccttaagaagaattgtttcttgaatataggtcactgaagagaggcttgctgcattatttagtacctgtggacaagtaagtgatattgcttatcagcttttgatctccatgctttttttttctttctgtggggattttttgggacgcgtttaaatcattgagtaagtgctaccaaaataccagttttctgtgctagatttgatatgcagcatatgctgatttggcgttgtgctggttttgtgctttccaaacagtttgataatttagactagatttgttctcttttatatgcctgaatgccagcagagactgttatacttgtcattgaatgtttgtatttgaaagatttttcccatttgggtatatctgaacttatattcttcagagtgtaacaccctggcattgtctatttgtcttcaaaatcttttgtttaattttgttcctagtgcattttgattgtggtaggcctatgttgtcacccttctagtttctcatagtacatatattaattcctgattcttaggttgatacttgatacttaatagtacttgtcaacttgctatttataatttcataagacgatttactataaaactactacttataaatacttataaattatcatgatggttgtttttagagatattagcatttctatcttaatgtgtaatattactgagcatttgttccttatagttgattatcaattttaggatgtatttgtaatttcctcctttctctgatgtattgtacaacactagctcaaatgatcacaattttctcttgatcacattggtgtgctatgttctttttgaatctttgatggtgatatattcctcagtactgtaatataatttcccgttggaagtgaaataattggtactaatggcgacatatgcaaccactttcagtattattgggaagcaccacaactatccaaagataatgcttttcttttggatgcattaacctctgaaatgagacataatgcatggctcctaccacaaacatattattcatatgggaggagaaattacttttcaaagttgttatggaacgtgctaaaaattgctcaatgttagttgaatatgattgttctgatattatgagataatttaagtctagggattgtttggtgggcatgattcaaccaagaggatggactagtccagtcttttggtaggtggtgagaataggtgggacaatctgaaggcttccaccctctccttttccatttcccaataaatgtgggtccctatttttgtgtgtaaattctcccataaaatgtaggctccatatttatatatatactgtacattttcaattgatgtggatcccgtgaatttgatttacatattcaccttaacagtctagtgctaacaaaatcctaaacaataatcctttcccatccctaccaaatgagcccttggaggctaccttggctaggtggccatgaatgcctttatgttatgaaaatttggtcttgattatagttctggtataattgttatttctattcaattaatcaatgcacctcagtttaatttatgatgcatcttttactaatggcttccctggagaattgttggtggcaccttgagtaatttgttttttcttgttctttctgctggatatgcttgtgtgtttgccttatattatttggattcgctctatggttttctttcctagttatttgtttaataacattttctgtatttcttcctttatgattttttattggaataaaatttatttttttaaatctaggtttagtaattatttttgcttttactggagttttatttgatacagtacatggtaccatgtttgtacttatgttgtaattcacatatatgaaggttgttgattgccgagtctgtggtgacccacattcagttcttcgttttgcatttgtggagtttgctgatgagcgtaagttcatcacaagttattaatttatttacctcatttttttaaatatatttcactcaaagaaatatattatgggtgttgatttacaattgtttatgttaccttcaatatgcacaaacagatggcgcaagagttgctcttaatcttggtggaactgtgctaggatattatccagttcgggtcttaccttcaaaaactgctatccttcctgtgaatcctacattcctccctagggtatgtatcaagtgattttgcataattgttcttgttttaaccagcaggggaacttgaatgcactttctgaaaattgtgtaatgatttttctttttaattattttttcggcagtcagaggatgaacgggaaatgtgttcgaggactgtttattgcaccaatattgataagaaggtacacgatgagagctgttgtattcattatactcattatgtattcatgcatatctatcatatcccacagatctacctacttaataaagtaatttattaatgcaggtttcacaatctgaagtcaagagtttctttgagacagcttgtggcgaagtagggtcattttaaaagcattacatagttatagatggatttatttattggtcttttttgagttccatatattagtaaaaatttatattatcatgactcactgccaggttactcgtttaaggcttttgggggatcatgtgcactcaactcgcatagcttttgttgaatttgtcatggtaagtttgagacttcactatggt

SEQ ID NO: 44820 - DNA, 760 bp, Cannabis sativa
tgacagacacgtaacacggacactcgtcctcatgcatgctctgccccaaacccaaccattccctgttctcatcttccaattttcattcatataaatagtacaatcataatctctaccaagatatgcaattataaacaatggcggccttcaacaagctctctttacttgtacttttactcctgtctgtcgtggtattaagctcgagcgtcgtcgacgtttcagaccctgagctgaagcagtgtaggcaccagtgcggacaccagaaaggcttcgacgaaacacagaagagacaatgcgagcaagagtgcaaggaatatgttaggcgaaagagagaggaagaaagaagagaaagagaaagagattatgaaagaagatcagaggaaacaacagagaggaggagtagtccgtacgtttttgaagatgagcatttcgaaaccagcgttaaaacagaggagggaagagttcatattctgagaaagtttactgagaaatcaaagcttttgaaaggaattgagaattacagaattgggtttctcgaggccaaccccaatgccttcattgcccctgtccaccttgatgctgactgcgtcttcttcgtttctactggtaattaatgacctttgagttgaaggataatatattattaacaataatataactgtgatttttatgtgtatgaagggaaaccgactgtgactctgttgagggaggagaagagagaaacttttaaccttgtagaaggagatatccttaatatccc

SEQ ID NO: 44821 - DNA, 1331 bp, Cannabis sativa
  modified_base (120)..(138): a, c, t, g, unknown or other
  modified_base (220)..(221): a, c, t, g, unknown or other
tgtattttgtaatagttactaatttaatactttgttttgttaaatcatgacaaaatagactctatatttttcaaaattgtaaaaataagactctgagttcaattttcaacaattttattnnnnnnnnnnnnnnnnnnnaagataatttctaacacgaacaaatatagaaaatgtaaccaattttttcataacatctctagattagattattattaagttnnattttgacaaaaaattagtttaggatcttatttgtacaactttaaaaaatataaggttcattttgttatttaataaaacaaaaagtctaattaatataataacttttgtaaaatacaggatccaaaataatattctataaattaatgatattaaagataacaatttcaaatgtgtaaatatatacatttaatgaaaaatgtgactaagttgatgagtattttaatttcaaaaacttgcgacagatttggttaagtgcatgagtatttagttgattcatgcaaatgcatgcataatgatggacacaatttgtaattaggtctcattatatctcaacattaattctttaattttcaaagcttttcaaattcatttaaacatgaagaaaaatatttagcataagaatatgaattcaaagacataaccaattaaaaccaaaattaagcccatactaattaattaccaggcagccttgttctcattaatccatgatgagcatatggaacatgtgcagggtccataagattctcaaccatcacctcatatctgaaaatatatcaaaaattgtaatgggaaataagaacaaagttatggtttgattaatagtttagataataatgtaaagtagaaaatgtagtaaaattaattatcaaaattaatcttacccataatgaaattctctatttacaattaactgagaaaatgatggatcatccatttctgcaatgtaaggtggtttttgttttgttataatatttttgtatttgggatctgtgtttggccaaaaccatacaatgccattttgtacaatgcttggataaacagaaacacatgctctcttggaagtgtgaacctgcattcattattaataatttaaagagaaatatgttaaaagatattatttgtgccgagcattcttttaggttttatagtgttactggtgcaattaagtatcaggtatcatataatttaatgtagtaacttttgaaaaatatcgctaactaattatagagcgttaccttctaatcaaactattcaaaacttatgcataacttctttttttttaaaaaaaaaaaaaattaaattttttatattttaatttaataattaat

SEQ ID NO: 44822 - DNA, 1911 bp, Cannabis sativa
acttgttagtaaatctaagatcttggtaaaatatttccaacagtttgatctagtactttaatatggtttcttgatgaatatttgagatttacccatcttgaattgaatgatgactgatgatctttgattaattgaggtccattgatcaaaattgtggcactgatacctaaatccatacttccctttgagactcaatttttcatgataaggagttcgaatttggctttccttatgaaacatcaaaggaatgaacattctaatgcacttaaaaatacatcaatacgagttgtattgagcaggatatgcccaaaacactttgtggtgtgtaactatctcttagaccaacaaccatgtgagcacttttgttccaactggtcgtaaatcactgtgaaacatctattcttgaaatatttggatgaaaaatttgatattgaggcaccactaaatcaaattcttgagttttgcatcatatttcgactaaaaacacgcatgatcacctacgtggtgcaacaccacctaggtgcatgaggaggcactataaggttatttggatgccaaacttccaaattagtgtattgaccagtatgttgatgattcaaaggattaagtgaagacgttcatacttggtggagaaacatttttgggttcactaggtaatgcacggggatcacctgaggatatgggtgtcactcgggtgcatggtgcctagggctatgacggttcacttgccacaagtcatcttagttctccttaatgctaatgaagcattttggccttcttcaatgaaataattaatggacagaaccacacgcttcaggtgaatgctcacttgggcgcatagtccacgtgggcgtccagtacttggacaccaggtgggtctgacaacttcaggtgataatataagttgccacaacccctatcttgaatcaaaacttaattttaccatcatcttgctcttaagtgtccgtaaaaaggatgtccaagcctaggtgtgctctaagtggggttgtacatcggtaggtttggtcaggttataacatacttgtaccaattcaatataaatatcatattgtaaatatttaattgtaactctcccgattgaaaacttagaaaaagtttaacctgtctaatgatttcatcagcttggttgggttaacctatccaaatcgatttttactttttttttttttacaattattatttttagtttttagtattatcaataattagattttaaataaaataaaagtagattatttatatttcaagtttaaaactattatattctaaattaaacataataaaaaatattaattgcataaatattaaattattaaacaacattcatccaaaaataggaaaaaaaattaataatatggtataaattttaaatttcaacttcaatattcaaatacaataaaaattattaactataaaatctaaatttcaagttaaatagtatacagttcaaactttaaaaataatttagctaataaaatttatgtaatatagtatgtacacttttttttatataaaaaattagtttaatcagtttattcgagttaattgatagtttggaataattttaatcaacccaatatatttatttggcgatttattgtttatcagtttattcggtttgatttggatgatttaattaggtcgggtagtttgtaaattttttttgaacacccctagcactaggtgttcacctgggcgttagtaaaaggattggagccacatggtgccccttggtgcacaatgacttcttgactttgtttgatgctcgaacactcgtatttaggggtgttcatctgatccgatccgtactatttttcttatagtgcatccgatctgcactaagtgcaaattttatattttagatcaaattcaatctacataataacttaa

SEQ ID NO: 44823 - DNA, 853 bp, Cannabis sativa
ggtgagttaggagtaaatttgcatgagtcagcgctgcgtgtatatgaaatcattatctttaattttcaatgtttggaagtactgactcggaatccagtcattgacaagtggtatactgacatttctatatttaatgttatttttccagaaaaaatttaaatatatcaattatgataatatcatagctgtttactcggtttctattacttaaattacaatccaaaaatgagtaactttccaataaatattaataattccaatatacttattcagtaattaatggaggctctctaattttatccgtctacaaacgaaacgtgataataaaagggattattgtttttgttttcttttcttagtgttttttttgtggaacaatagttatgttatagactattaaagtatttttattgaagatgcaaataaataatagaaaattaaaatttaggtttaactaacaaaaatatatttaacacattttatattaaatttgacataatatttattatgatataaaatttacatcattataaatatgctattttttatttacttttgtgttatttataatatattattagtatattttagctacagtataaaattttgaagtatttatatataataaaattaatgataaagttgttaattttttatttttaataaaaatattaaattttatataagtttgcagtttcgaacccagacggatggtccgtgatctagggtcgggttcggagtccgaggtcctgggtcttattcaagtttgatgtctgagtttaggtatgtgagcgaaaatgtaaaaaagaatatgttagagacaaaaaaaaaattaaaattgtttctaaaaata

SEQ ID NO: 44824 - DNA, 1235 bp, Cannabis sativa
aaagaaaacaaactcatgctcagcggatcaagcagtacataacttacaaattgcatgctcactatccatattttgaatcattatgctcagatactgaagcaatggtatttcaattctcgaatccctactaattttaagtacacgaagaaactcagctaaaacttgacattccataaaatatctgcataaaagccacaatttgataccaactcaacatacacagacatacttaaaagccaaaaaatagatatagacaaaaaggaaaatttcatactcaaaaatcatcgggtcttgtttgtccccataggtaactatctccactacagactgcaacagatctaccactgattcctgtagtaataaataaataaatatatcatacaataggaaaagaatttaaaagagaaaaaaaaaagaacaaattcctataaaattgagcagacataccttgttgtgctcatccacaactttaatttcccggagttcattcactacatatctacaattattccccaaaataaaaaggacaaattagctcaaacattatacgacacaacacaagcacaacaactctaaccttcaccaaagccataaatcacaatcaaaccgtaaaatcactgagttaaaaacaaaaatgtacaattgcaatggttgattaaagatataatggagaagaactaacttgaagttttggagggaaaatcggtcgagcgggcgaaagaaagagagccacatggtgatcgaaggagaggtgtggaggaagaagaagacgatctggttttggagcgaagaaatttagcggtaaaagttatgtgcatttctgaatagaaattggagtgtgagatgtgatgggacacagtagtctcttactcgtcttgtttctatggttagtggtttgttggtggctttggtttgggcgttgagtggtttacgtgtgtgtaatttacgacgctaaccaactttcaacgttcaacaaattctttcactcattctcaagttattttagaatcgtccgttagctgacgacttcatgacgataacggatcttcacgcaacctgctttgggcttcacaagctacgttggattgctagagtttctctttcttttttttttttttttactataatgactaattttaaagggatattttcataaataccccaagattacaaaaatactgatttcagttttttttttaacatttttacagatttaaattttttatttttacaaa

SEQ ID NO: 44825 - DNA, 2098 bp, Cannabis sativa
gtagtggtgtacgacatgttaaggggccgagatgaggcggcagggacacgcagctataaccacgctgccccaaaacaacatcagatatcagattcacacccacacccacaacatgtcccttaaacaaaacccaaccaaaattgtacaaacatgtttcatctctaccttatttattttttctttttttttagtaattggtttgcacaaatgcaatgcaaaagcaaaattaaataaatttttctcttactctcgcctactatatgagcctttgttttccctattctattcaaatataattatatgaagggaaattaagaggagatatctatcgcctctctctcactccaatatattctaaataacacatattaccaaatgaagcctatatagaatataatttagggatatatttaatgttgtaacacaaataacatattaattaatcaaataggctgccgatgcctttatagtacacccttgaaacgtctctgtatcaaaaagaatgctgaaaaagttgagtgcttcatctttgcttaattttgagtctttttgaggataaaacctaatatttgatgtctagtattaagctgtggatcaatcagtggatggttctgattcttcacaatacaggtttgggagattaattaggatcattatttggttctcttaaaaaaagaaaaatgaaaagaaagaaagggattatttgagtgagatattggcattgaaatattaatataaagttatatatattcaattcagcaaaaaataagggttatatgtattcttcaaaatataactttttcaatttcgtaaggcaactaattttttttatgaagaattttgtaaggcaactgttgttgaatttatgaggcaaagtgtgatgattattggttggtatttacacgtgtaagatttttttccctaaacacgtacgtgtgggagaaactgatccaacaaaataattacgaataatcattaaatcagaaatcatgtcatgtccccacattttttcttttcgtttttttcatatgttaaaagttctccaaattagttttaaaaacatatttttgatatttttttttttgagctccaaaggtgttcaaattaacatttttctgcaaaaaaaaatgtaagttttaacatttaaatgtacaacgttatcgaaaaaaaaaataaatttaaatatgttacaaaaaacatttattaaatatatttaaattatttttttagcatcgaaaatatttaaattattatgattgacaaacttaatatctaaattattttttttaatgatgaaaatgtctaaattattaagtttgtaagtagcaaaattttgtaaattaatatctaaatgatggagttttaatgttggttaacgagaatttctattttaaaaaaaacctttgttttattaatgtcgtaagtaccaaaattatttatctaggcaaaaaaaaaatatattttgtagtatttattatttaagctagactacttttgtgctgtcttgttttgtgtttctcaattctcaccgctctgtacgagttgtatttatataatctttagtatactttattattattttttttatttttgcaaaaataatcttcttaatttgaatactaaataaattaatcctaaaaaataaaaattaaaaactggatctccaaatccaatagtgaaacactagctatcttaggttaatctgcatgtcttgattgtttgttaatatagagcacataatgaagtccacacaatccataataatctcaacatgtaataatatatattttaattgaataaaggcagttttgccttaaaaaaactatatcactgcttcttctatatacatataattgattaaatatggtaatatattaaactattttgatacatgatcatgcagtggcagactccagtagtgtgtgtttggtacgacatgttgaggtcgaaagagggaacgaacgtacgtacgtcagtaagcggcgccaagcccaggcagccacgctgtgtgttacgtgcagtctatgatggcacgttacaagctaagtgatgcccacaagttggccaagtggtggcgcatgttgtggtgcatgcaggt

SEQ ID NO: 44826 - DNA, 1037 bp, Cannabis sativa
gtaaaataatttctaacaattaggcagtgtgaccatttatcaccatatctcttcctgctttgttatgagggtcttattgatgccttaatatttaagaaagttgagggcttgcttaactgtattaaaatctctaggtatgctattgaaatttctaaccttttatttgtcgatggtagtttacagttttctatggttgatttttattctagtgttactattaagttttactttgctataatagggcttcagctcaacttgtgaattttaataagtcctttgcccttttttcccttaacacccttgattatgtgtctcaatcctttttagataccttaggattggataacaaacatttataagtaattacttaggccttcctcagcgttttggtagatctaagaaatactcttttaattttattatggacaaagttaaaatctttctaactcttggaatgtaaatgttcttctaaggaaggtaaggaagttttgttgaaacctgtaatttaggctatcccttcttttgtcatgtcttgttttaaaattccaatagatacttgtcaaaagattgagtcgctagtggctaacttttggtggggttctttcggttataggaataaaattcattggaaaaattagtcttctctttgtaaatataaatttgttcgacgtctttggtttaggtccctatcccatttcaaccaagcaatgttagctaaaaaagcctagaggatattcactaatcctatgtcagggtttatgccctaaaagtaagtttttatggataatatattatagaatatatgaaatataattataagataaatgaatacattaattatagaagtataattaataaatatctaaaaattctttattgatatagagatagtataatcttgtaaggttgtacaagagaattaagattatacaatatgaatataaaacaagtcggtagtgtaataaagtaaggaatctctaatataaagaataattagcaattttgctccctgaacttttgacaataattattttggc

SEQ ID NO: 44827 - DNA, 1880 bp, Cannabis sativa
catgcatatctttataattataacataaattaatcaataaagacatatatatacatagatatatttgttgatgttgtagtaaagtgtttcttttatcaattattagcacatatattatatctaaacaatgtcaatgaaaatatatgttcgattaattcacatgaacaaagaatcaacagggtgattcagcctgttgaacaggtggtggttagtacatgaatgctaaattaattgagttttggccttatctaaaatacccatctgcaatgggtaagatttaatagtattattattacacattatttttctgtattctaacaatgaaataattggttggcaatcacatggccatgtttatatacaccccctttgaccaaattgtttgcttcagggaaacaatcttctcagacttgttcattttctcttataattaacacccttaattaattaaattaattatagcataatgacacatctaattaataagcatacgtcagtactctctctctcacaaataaaatatgcatgaacaaatctcagaagggaacttagttaatttgccttaaagttattaaacaagtattggtttacatttttttaaaatgtttttcttattaaataagggtttttcatcgtggcattgcctattggatagtattttaatgggggggttgatcaagtgttgcatagttataaatgtccaaaaatgagctaccaacaattgtctttgaagcatatctttaaccaataatattgctattggcacatgatccaaggaaagaaaaataaataagagaatgataaaattggatgtactagcataaaaaattgaaaaacaatttagatttaatcctgcatgagaaaattaaaaggcattagtaattaaatatgaaaagttaatggtaattattaagtgataaacctcaacatttaatatgttcaagcttttgtttcaaatttcaactcaaatttaaacacattaagtaaatatccataaaatgctatttaaatctcactttcaatagtggagtgtattaatattttaatattatattcttaatattagagaaaaaaatctgaaccaataaaattggatgttattcatgtgagcataatattcttcataagacattctttgtattcaatagaaatacatgattaataagacaatagagattaaatcaagatatattggatggatactattagtcaacacaatggaaagctacaacaaggaacacaaaaaaaataaaaattgcaactcctaaattaataacaataactgtttaattaaagatcaaacatataccttaataaatttggattttgctaattaaagaatcaccaaatggattaaatatattcatgcatgtgaaacatcctcctatatagtccttccacttgtttgtgtaaatataaatatcacattttatatgtcttggtgcacatgcatatatcggttcaatatatataactaatgataaaaaaaatgagtgtatgttaaatatttttaatatagtgtaaaagagatatattttgataaacttttttatttaattaattaaattaaacataaagacttaaatttcttttttattattgatcattagattcaattgaaagaaattattctatgaaagataaaagtatataagatcgatttgcaatgtggaaaaataaagatatcgagggtatatgcaaacgataaaagagatcgtaataccaccagccattgatattttgagcgtcaatcctagtgtttgttcggaatgggtaatctggcttacaagctctttctactcttttagatggaattttactatttacacagaatgagtgaggaactcgaggatcgagactctatatttataggtgagata

SEQ ID NO: 44828 - DNA, 3550 bp, Cannabis sativa
tgatgtcttaattaatattaaataactagttttatagaaagaaaagggtcagcctgaaattatattatttatcagtaaattaaatcttatattaaaaattaaataatggcattttttattatattatttagtacttctgttgagtagtgaattattaatgtatacttgtgcttactgcatatctttaggtgacatctctcccaaacaaactattgctgagagtggaagtcctaatgattctatttttggaaataagaagcctgatcagttcaatggatgctgcctgccaataaaaggtattttacagttgtgtatgtgataaaatgttgggacccgttatcaaaatccattgaagtgggtagaaacataagatttacaatatatcttctttattgaagtgggtagaaaatccattgaccgtcggtttatgaaagtttgtcctgtaccttattttccaatttattttcatcgatagtgtcttggttggtctcacagtaataagattgcttgtcttgattcattaaagcaaatatgtcagttccccttgcaaccaaaatttattactctcaaagaaacaaccgtcttcgctctgcattttgtcatctttactatgagacagtggcatcgactgaggaggtttgcagtggcactgcaaacaagaaaataaatgataatgtgtaccaatcacagacttcatctcagaaggacgagtcattgagacaaataaatacagggttaaacagcaaggtttgccttcacaaattctttctactcattattggtggctgtatgtgttcatctaggttttgttgtagagtggtctttctctgatcttattaggattgccctagttttgatttggctttccagtgctgatgttgtaaacgataaaggattttgaattatgaagaaagggatcacatgtctctccaataaatttcttacagtggcatatgctctgaggcgatatttcattttctgcatgattataggcactatggctagtttaggttgtgtgtttgtcaaaggttacactaatgattaagtacacgtgaatatatgatttctgttgcattatttggggatagctgatttgaatttatcattgttccattgaaacaggactcactttctctggtttccccgcaaagtcctgaccagtgccttgcacaaagctcagaaatgtgtttgggctcatctgaagtttctttgcctatctcaatgcagtttcctgttgataatgcttcgagatctctggttgctcctgttggtttatcaagaagcaaatacgtttcaaagcctttctcatatccaggaaattcaggtatttcttcaagactacatggtagttttatttgtgagttcacatttttggaatggaatcaagtttatacaaggctttgtataaacttaattaaacgtgtttgcaagtcatgtgatcactacaatatcccattagtgtttatacaatttttctttatcttgcattcttaagtgtggtgtttgttctatagcgatcatctcaccaaccatacgttgttacctttttctacggaggcctaagaaaaaatgttctgagggctgtttctgcttgaataatgtcagacctgtcacctgtttgtaaaccctaaacccattagtttttctaacttgtaaaaattcagcacaaaataaattattaagggtgcacaaaatttagctttggtacgtataatttttgaagagagcatctataggtgcttttccatagaatttctacagttccattgtttgattatatttggctttaaaaacatgacttggtttttaataccaatttatcactgactagaaatattttagtggttcagtttttttaattttcttttcatcttggcagcatttatacatttatgtgtttttttaatccactcacttcgttaaataccttcaagatggaaataatcgggtttgtcttgggttttgtaggacaacctctgcaagcagtgcagcagcaaaatggcagcgttcctgttttataggacttccaatggggccttttttgtatagctagaggaagatgtaattaaccaaatacttgaggttaggtcctaggaaccctttttgataccgaccaagaaatccatcaaagcttgttcattctgcctcgtgttcattatagccgagtaccagctagtgtttatagtcattcaagaatcaaaaacgaaccaatggctgatctcagactgccattctttacataacatgtgactttttattgtaacgtaacgttatgtatctttactttagatcagtttagaatgcataacatctgtccagagaggaagtaaatgggatatgtgagacctgtgttttccaactatgcacatttataatagtaatattacagttagttttcagtgcaggaaaaaagagagtcaaaggcacagagcaaagagaaggtattagaaatgaatcattttaggtgtgttggtttaaacattattgaattgatccttatcttttattattagttgaagaaccctagaaggaagggaaatgaggttaaatgggcactcaaacatgtctccttttgatgtggtaattgagagttaggtggggatggaggccttattgcttgctccaattcaatgaccaacccaagtgggggagttttcagcaggcgggacctggtaagtaagttgcccttgcaattatcacaatgcactgccaataaggtttaacgtgtgacagcaatagattaggacggcctcttaactttgtgctctgagaatttatttatattagaatttaacgtgtttatttttttttgctacttgtgtttataatatcttctaattcttgatgatgtgactttgatataatcgttgattgttttgttttgtcttgtctttactaccaataccaatataatcatcgttttggcatatgtttattctgtcacaaatatatatctaatatagctgattttttaagagaaaaagaaaaataaaataaaatacgaaagggggaagttgtgacaactgtgtgtacgtacgtgtgtatcattattccctccactttgtaacgtgggaaaggttcacttaaactataacaaaatattagtagaagctgtgagatggtttaggtgtttatttattcatttttttctctagtgattctataaaatatgaaattatgtggtagctgcattttcatatctctgatagaaacatgatatcagcaacaccgtattacgatatttctaatttctattccattggcatatgattttatctaataactgtatttacaatatttttgtcttccagcaaaaaagaaaagtgtatttataatatttgccatcttgtatttggtcagcgattttttatattattaaattaaaatatatagaacccgacattacaataaacaatagtggtatatcatttcttcaagggtgtccataaatcattcaatccaatggcaactaactgatccaattacaatcgactgtgaaacattggatatccaattgtgatcagatcagattggatgttatttttaaata

SEQ ID NO: 44829 - DNA, 2234 bp, Cannabis sativa
ctatttttagaatatagagaaattaataacaactattttcttctataggaaggagtagattatagttatggtagattttcttttttttctttttttttttttttgaaattttatttataatatatatttaaaaaactcatattttttgtaaacttttgtcaaaaagaaccataaaaaatgaaaatttccctgatttaatttgctacatatacgaaaatgctttaaattaattttgaagtataccacttataacttcttttaataatacaatattttgcattggatctcttaatctttttcattaaaaatatgtaaggtataattaatacataggatataaagttgctcttgtgacatttgtttatgtctctacatatgatagtatgttgtttttctcttgacaggtatgtgggacttaggatgcttaaacaaagaaccaaatagaagtattacaatgtatttcaaataccttttcataatttttaaattatgataaagtgtaatcaagtaatctttatatatttcaaataccttttcattatgtttaaattatgataaagtgtaatcaagtaatgtttatatatgtatgattatcctgtaatgatcaaactaagttatttaattttttttttaaatttagaaaattttaattaatatgtaaaaataggatttaaataatcttttgtattcgtcactcttttattttatatacatgtgaaatagtttgtttgaacattactttttatattgtaaattattttaaattttttaaaattgtacttaatatatcttaaataattattacctgcataatagttacaataggtacaaaacagatagaaatacatcaatttattttttttgtataattaataataactcatatgtataattaataagataaaacaatgatagtttgaataatactatagtgtatctactccacatgcatacttcactagtttaacaagtaatgttgactactatttttggcaactaaaaatttatgaaaataggaaagagaataaataagtgtagaaagaaaaattatttacttgtttatgtgattcagacttccaaatgatcttaattagtccacaagtcacttttattcattttgaattcttaaaatgagtgcgtgatcacattgaccaccaagaaattgagttctataaaccagtcaacttgcaagtcattcgaggggaaatgtaacgatcaccaccaggtcgtttcttcggcctctcaatgttatagagactgtatccgtggaccgagtaaatctttcacattttgtctcttttgcctccctaagttattttctaggttattacatatatcaaaaaacatttaaaagttagaattttcactaatcaataaaaaaataagttaaataaacttatataaatataccaagacccatttttcatgccaaagatagtcctctggccatactacacaaaagcgcatcgcttcacctatagtcgtgtatccttcatgattgatgggacatggaagaagagcattttctacacaagcttgttcgatgaatacctgacaatatttgctctgcaggtactcattattgtggaccgagaacttgcctttgttaaaaaaaattctccatcacaacgaaccccatagcaactttcagtgattccacttggctccaactaaacatgcatgcattgaagacggaaattttttgcatttctaaatcaaacaagaaacaataaaatgggtaaattgattatatttataattttgcattttaaattcattattattattattattattattatctcttctgaactactatcaataggtggcggtggtgctaatggagcagaaacctccccagcacgtgctgctggtggtggtggagcagagacagtgttggaatgaactggtggtggtgatggtggagcaaagacatgggtattgacccaaattcttaagtctccttgttttgatgattaatgaatattttattattattggttattaatgattttttgatcttgaaggaagaactaaagaggattaagcattttaaagcaaaattgactctaagaacaaaatggtgcaaaattctcgaaagtgacccaaagtagactccaagactctatgaaggtttatttacatctcttagtcttgtatagtgatttacaagttcatatttaaaaaaattgttgtattaattttagattaagtttagtatatttttaattaag

SEQ ID NO: 44830 - DNA, 1491 bp, Cannabis sativa
attaaattaaataaacaattcaaatttgggatcaacttgaaagtgctcatacttcaaaccaaattggcatttccttgttaatgaaccatattaatattaaagcaatattatatgctttattgtcattttggttatcgctgtcatcattgttagtgaccttaaccagtcagtttaggcatgagaatggaacttaaaacgtttataaagatgtaaacaccaaaacacaagtcaaattcaaagcataaagaacaagtttcaattcaagtttggcttacacaaacactattgaacccactaggacatcaccatattatttaacatattcatccatagtaacatattgtttgcaacccacattaagtttcaaggaacctcataaaagctttttattcaagtcatatttagctccggtttggatcagtgaagaagctgttgatggatggcatgatctcaggagtcttgttccgaacatactttctcagaaaatgctcagagtacttctctccctcagaaaagttgtccaaaacaccggcggccctattctccttggagaccctgttaaccaaaaaagaaaacaccacccaagttttataaagagactaatctctcaagcacaataatttctctctaatacactcaaacaccaaataaattacacataaatgagtctattgtgaatatctcaagctgtaacaaaaaaacagacatatatgcaaagtagacataataatgcacaagtcaatttattttaattgtcctcagactgaattcgcatttgttagttcagtccccatgatgacgaattgaacttgagaccgcccaaaagaaaaagaaaactatgtccctgattgctggacctaaaaatctgtggtgctcgaaacctcaaatcaacatcaaatggaaatcatcaaccgtttgatggttaatgttaagataattcattttctagactacaaattatccaattgaagttgcaacaaagggtaaacaagtattcacctataactatattagcaattaatcattatccatgtatgtatacatatacatagcataatataaataggatttacaagattccctttctccccgtaaaaaaaccacacaactcgaaaaatatcatattttaagcgttgaaattctcatgtttaatttagccaaaacacacgcttatatatattatttgtatttatagataagagaaagacctgacttcaggattgatacagatattgcgaaccagctgaaacccacagatcccaacggcgacaccgacggcagcgaacagtgggtaaacctaaatacaaaacccaaacccataaataattaggaaaacaaaagaaagttacagactttatcggaaagatgaaaaaacaacaaaggagaagtaagcctaaattgaaagcctacctcaggcctgagccatcgactggaagccattgattgttgtagcagagaagattgaagagagagagcttcagaattttacag

SEQ ID NO: 44831 - DNA, 2543 bp, Cannabis sativa
ttatataacagatgtggtttaaacttacctgaggcccctggactttgtatatccaagctgtcaaatttatctctcacatgacaaaacttcctctaataccaactcgagtcatgctttaaaacataggtcgatattgaattgttcttcaaatatatgttgttgattcatttcacccaaagagtatcacttttgtttgaaatagcccaacgatattttgcaggaatggcttgattccatttgaccccatctttgaacccaaaccaccatagttctttggaagacaaactttttcccacatgtagcttactcctatttccattccaaccccaaaggaagcctcgacaaagtttttcaatctctttcgtaatactttgaggaagaatgaagatgctcatccagtagttacggagaccaagtaacactgaatggataagttgggatcttcctgcaaaagaaagatgtctgctagcccaattatagagtctatgcttaattttctttatgatcatatcacagtcttccactctccatttggttggtctcaaggggactcctaaatatttctctcaagatagaatgtttagccttgctttcaacccctcccaaataaatttgggatttattagtgttgatagccagacccaatgtagcattgaactcatccatgacatccttgagcacttgaatcgattgaatattgcctttactaaataaaattagatcatcagcaaagcagagattgactattttgagaattttccataaggggtgatacctaaaactggtttgattggctgccatggataatctcctttttagatactccattatcaagacaaaaaggaagggagagaggggatcccctttccttagacccttttttccttggaagttatcttgcactctaccattcatcaaaatagagtatgaagttgctctcaaacatgtcataacccaatttataaatctggtcggcatcttgaaggcattgagcaaagcctctaaaaaatcccaattcatcgtgtcataagctttactaatgtcaactttaataatggcacctttgagagatattttttctattataattcttcaaaagatcttgaagaatcataatgttgtgagcaattgatcgcccttgaataaacactccttgattttcattcactatggttagaagcacttgagcaagccttgaataaagacgctttgatatgcatttgtagaccgttgagcaacaagcaatcggccaataatccacagccttttgtagggaaatcaactttcggaataagtgttatcattgtggcatgaagatccctcggcatgctacatgtgcgaaagaagctttccacagccttagtaaactcttctcccaattcaggccacattttcttgaagaaacctgctccaaacccgtctggtcctagcaattttgagtcaggtatgctgaagaaagcccttttgatctccttactagtaaaaggctttatcatgtttatttgctgctctatattgagacatttcccatgctccatacaatgtgatctgagagccatagttggtcttatacttgtccccatgtaactgcgaaagtgatccacaaagtgactgaccacttcaggaaacttttcaatgacttccccatgatcattagtataagcaacaataatattctccatcttcctttttttcaagaacgcatgaaagaaattattgctctcatccctcttacagagccaattcaccttgcttctttgtctcaaaaaactatgatacattttttcctgctcactaaagttggcagccgcctctttctccttcctttgcaatatctgatcatatggattcacttgggtttctattctagcctccatataactattttttgcttcctgataagttttccctatatcccctatgacctccttattgaatttcttcagcttgtgtttcagctgcctaagcttcagaaaaaggcctttcatcccttcagcttttataggcttaaaccaatcatcaatcacagtttttttaaactctgggtgatcagcccagaaattaaaatacctaaacggtttaatgcctatattctcattcaccctcatcgagataacacatgcacaatgatccgaaactacttcccaaccatagtgagcttttgtcattggaaagttgtccacccaatcttcattaacaaaagaatgatcaatcttcgaataaatcctcttatccccatcttgattgttggtccaagtgaacctagaaccggttttaataagaggatcaatatgacacagagctaaccagtttgtggcatcttctaagtctcccaaagtaaccaatttgcctcctttcctatcatctaactcgaataacgctttaaaatctcctattatgagccacggcttaacaggcagatttacccccgataaattagcccataaactcttcctttcttcggctgtattgaacccataaaccaaagtgacactcataacattactcttaccagccaattgacataacaatgaacgtattga

SEQ ID NO: 44832 - DNA, 1559 bp, Cannabis sativa
agaaattccataaattactaacattcaaagttgagggagagtatttaacattgtgacaaatttcaaagggtaataaaagacattcattcttttgttttttgacatgaattttgcaatttcagagagttggttggaagttattctgctgaggttggaaagttgagtttgcgtattttggatatgattggtgaaggattaggactcgaactcgggtactttcgcgacaaaactgaactggccgcagctcagttgatgaacatgaatcattatccaccatgcccagatccaagtttaaccttgggattacctaaacatggtgatgcaaacatgataactttcattcttcaagaaatggatggtcttcaagtgtttagagatggccaatggtttgcagttaagcctctccctaatgcatttgttgtcaacattggctacattttagaggtcactccctttcttctctcttgctatgcatattctttccttgaaagtgcatggttaattaggtttatttgtgagtttttttacttatttagtatcctgtgttttaaagaaatacaatttcaataatttataatctctgcaataattttaagaattagtataatacagtatttttagctcaaatttgataaacaaattacatgtaaaaaatgacattccaatgataattttatattagttttaagttttaaaatacccaataatcattaattatcaagaataaagaacactatttttgtacctattttaactaattatttttatttaagatgagtctcacttataaaaaataacttgccaaaatattacacaaaataaggtgataacactactttttaacatagtaaaccatagtatcctctttgtaaattacaaccttacatggtttaatgatcattatgaagaataatactaagtactaaaattgtattgtgttactaaataatgtgtgtagattgtgagcaatgggaagctaaaatgtggtgaacacagagttgtgacaaaccaaaatgttggtcgaacaactgttggcagcttcatttatccttcttttgattgtagagttgagccagcaaaagtcctcatcaacaacaataatagtggaagtgaaccactctacagagacttcatcttcaaagattttctagcctcttttttaattgatactaataccaacaacaaatcaccacttgatcgctatatatataaacgagaataataatatgtgcatttaaaatatgtaccgaaaaattacaaaatatcactgtgatatgaagcttgatctattgttataaactcaaaaataatttttatatttattaatgtatttttagtttgaattgcttgaggttagctcaaataaccataggtgagtgtgtgtgtcttggaggtcctaagttcgaattccaagtaaaacatgttgtaatatataaacgtttaaatcaatttttagtttgtaatagttattagttactcaccctcttttagctgtgccacctcaaatattaacatatagggccggtcttgaattttaatgagcttaaagagaaaaaaaa

SEQ ID NO: 44833 - DNA, 2980 bp, Cannabis sativa
ttcttcctctttattaaatccatagacaaaagtcacataaaactcctttttgttatcaacagcagtaacaaagaagtggattacttggctggagcatctaaggatgttaacaacaaaccttagagggttccaagcaactataatacgcccacctacatgccaagctatgttggtcgtaaagcaacatccagagaacatgttcacatacaaagccccaagttttggggctttgactctcgtctcgaggagacccactaaactagcttgttgaatggagattagttgcctaacattgttttgcttgtgctggttattgagccctcgggcgttctaactcaagattttatccattggaaagaggaggtgctccccctcctcctttcaattccaattgagccaaactttctggctgctgttgtatttcttcagagagcatttctgcaatatctgctacacctaaagcatcaaaatcattaaaaataataggtgatgtagtgtcgacagtaggtttcaccttccaacctctcactactgtttggaacacttcaggattcgattgtttctcttcaattttcctcgcatctttcttgactacccattcctgtttcttcccttctttcttcctgcaatccatggctgtatgacccatccctttgcaatgagcacaagtgataggtttccactcataattgatagccactgttacattggaaccaaactcattttcaaaatcaactaactcagagaattcttgtgtcatagatacttcaatcagcactcgtgggaaattcagtttatccctctctttggtcactgcatccaccattaatggtttcccaatctgccctacaatcttgaacaatagtttctgcgccctgtatttaagttctagatcttctaattgaatccaaattggtacagtacgtcttccctcttaaagttcacatttggatcccaaggtttcataatgacaagacgcttgttaaagaacgtataacctccattcaacacagaattcctttcttcaatgttaaaaaatctaataaggaagatgccataagaaatcatatatactttatcgattttgtccttccaaattctccttgcaaatccttctagaattgtcagagggggattagctcctagattatagcataccatcgaggaattccaaaagtccacctcctcctgaatgtcatcagctgtgatcttcactttactctgtgttgcatatgctgattcaagatttcgaataacacctcccgattgaagaacaggtggtactgcatccataccttgactaacgacagaggtgcacctctgatttgctgccatgaacattgcgaaatcttctttaatagcatcttgcctctgaattgtcttcaaagaagtcttaggggatagcggaggcataaacacatctattattctttcatcatcttcatctagtttcgtttcctccccaatcgaatgaccttcatcatcagagaattctaggggttcagcccctaaaatttcttccatagtcttagttttcttcacatcagctgaagagttcggacctcgtttcttcttcttcttagcagtagcctggatcttggattgagtttttgcccttgtttcagccatggcgccagctcgagagagctgcaagcacgaaaactcttttgcagccaatttaacatagaattttcaagatgacaagatttctaggctaaaatcccatgattgccatgtgttgattcaacagtcttttcctgttggaattagatcagttttgaggacagatgtttgaaagacacttactgagctatgcttatttttcaagcaactttgctcgcaaacattaaatgttaaagatattgagaagatgcataaagacatcataactattttatgcaaattgaaaataattgtccctcctgcattttttgatattatgttgcatttggttatccatcttccaaacaaggcaatacttggtggtccagtgtactttagatggatgtatcatattgaacgttttatggcggtgtacaaataatatgttagaattgttcttatcctgaaggttcgattacggaagcttacatggtgaatgaggcattaacattttgttcaatgaacttttggggtgttgaaactcgatttaatcgacctaaaaggaataatgatcgagttgaatctcgacctagacaggagttttcaatgttcaaggtcattggttgtctacttgggaaaaacaactaatctgctacattcacaattgaagcaaagagcagagtggtacatcttgaacaactgtgctgaaatatccaactaccttacatgcatgtttgatattaatttcctaccttcaacttttatttatcattcatgtttttattattaattgacttgtcttcttaatcatagtgagcacatggatgagttgaaaagacaaagtgatagttcaaatcttaagcatagataagaagttgaattccctcaatggtttaaaactcgactatgaatccataaaacacttaaattaattacataacacgttatttgtactcgctcttaatctgacttaagtacattgacattgtagatcaaccatttacgtgagtcttctccaacaacaatatttgacgaattgtatgttcttgaaaacaaaccaagttctacagtaatttactatccatggatgattgttaatggggtcaaatttatcatccatgaacgtgatgaaaagttaaagactcaaaataacagtgtaatggttccaaatgaggaaggagataattattatggagaactgcaaggaattattgaattcaagtatttaatgggttattgcgttgtactattcaagtgtaaatggttcaacactagtaagactaaggaagatgatagttttacaagtgtgtttgtcaaggatgaatgttacaaggatgatccctttgtacttggctcccaagctaaattggtatattat

SEQ ID NO: 44834 - DNA, 1331 bp, Cannabis sativa
cttttatccaagaaaacattgtatttttctctctttatctagtttattttggaactaaaaaaatagcaagagagtttggagctaaagttagttgattattattggttgcgaatacattttttcttgggtgagtgcttgagagaaagagaaaaagtccttgatgaattgaggttgttaggttacaatccataaaaatgttacctttcatcctacccgaacctaagcctcacattacaagcctagtaaagtccttttgatataggatgtaaagctagactacattagtggagagggttgcactaattcaacttatggaaggaaacattttaaactttaggaccaagggtagttgttataggaattcaaagtgttggtgggaagcaattgcacactctagtgattgagttactcttgataagtattatagacataaataacatgcaaaactcgattgaaacacacaggttcaaggcgtattcactactattatttcacttccattccatttaactctgagagcattttttttgctaaaccaagtttgaatgagtagtattctctctgttactagtgatttattatggttgttttgtatgtttttattgttctttttatttttgtttttcattactcgaggacgaacaatactctaagttttgagtgtgataactctatggtatagagttatttttattggtgttatccaaacaaaaaaaaaattcaccgaacgtggcatgtccacgtaagtaaagaaagagtacatgtggaatatatacttaccaattgcaagacaaggtctccttacaaggcatgggaaatccatcaagcagcacgcgaaaggagttaaacgagccgtcaaggagctgtaccaccatgtctggccgaccaaggggagtctataagctggtcgggatgagcttgtatggctggccaaggtttgagcataaactaggtggtcaaaaggtgactttcaaaccaagggagcttctgttcgaccaaggaagcctgacctctaaaaggaaaaagtgtacaaaggctagactccatctcaaaaggctggcctccacctctaaaggttggcctcctcttgccaaagctggcaggaacttgacctgccagatcctggcaagaacttggcctaccatatcctggtaggaacatgactttctagatcatggcaggaacatgacctgcaagatcttagtaggagcatggccggtcagcttttcccttgcaggacattcatgtgtagccttcatccgtggaaatcaagccaaggtacgtgtaaagcccgcttagttaatttggaaattagcagttgtttatgatta

SEQ ID NO: 44835 - DNA, 1421 bp, Cannabis sativa
ccttaaaaaagttttcagggggctagtacatgtcaaagttcaggggcaaaaatactaattagccttaattattttatgttctcattatgactgtcataaaattgtttatgtatttaagagtaatggcacttcaaagtcatacttattttaagtttgtcttattgttatttttggaaaatctttacctttcaacatgacaagttgattaatatgttcacgtacaaataatcattcctttcttataactagccaaaaataaatgattctttaattaatttgtacaaagtacaaaagattattttggggttaattcttaacctctatctaatttcataatcataaaaatctaaaaaattaaatagtcactaactctctatttctttttttctttgaaaaatgtaataaagggaagaaaaaagaaaaaaaggaaaaagaaaaaataagtcaagaattttactttagaaattgtttttctttttctcatttgaaattgtaataaaggaatgataaagtggggacaagacaagttttttcttttccttttctccaactacattattaactatggaaaaaagagtgaagaaattaaatgaatttcttctttaataaatttgataattatgaattttttaattttgtgtattttttatagtcttttctatttttactacaatattatattttaattttgatgtatacattagctggtgagataatagtaacaaaaaattattaaatcaattgatatgaatatgagaaaaaaattagaataatttacggcgtaaatatctaagtttatctttcagctgtaaataaatatttaagtttaatttttcactattataatatctaagttatatttccgaaacttcgtaaccattaagtgtcagtcattattcacgtattttttttttttattagtatatttaaattaatttttaaattaaaaataaaattttaataacttagaccaatcaaagactctcatgtgataatttatttgacacatagcaattaagtacttgtaaaaattctcaaattataaattaagtatttatttacaactaagtattaaatttacgtctcttcaaaaaaacaagtattaaatttacgtattttatgccgtaaaatacttaaaaataaataaataaaggggaactattctatatactattttttttaacttattttttttcttcaaatttacagtttaggtttctaaaatggttgcagcgctagttgtaatagggatttctatacgattttttgttgcaatttaggttacagctctaattgcaatagaagtttttatgtaaaatttcgtaaaaatacaaagaaaattattttaaagtgtaaaaataaaaaaactccgtaaataaataaataactatatacacatttatattacttttgtacatttc

SEQ ID NO: 44836 - DNA, 2071 bp, Cannabis sativa
ctgtgtatgatcttcctttctcttgttttgatgttggatctccgagccctaatcctagggctccaagacttaccccactataagtctcctcccctccctaatctgttctgtgtgttatttctctactttgttctgattttgtgatggtatttatatgttagataaaaccagagagagctaaaagttagttgcagagttttaacaaactttgtaactaacttaaaatctgtctgtaggatgatagaggccgaaggccacctaggcttttttttttttttttgcttgtactgtttgttgtttatttgaacaatgtagagggcatgtggggatttattttaacatttcagtattatttaattgtcaattaaggctcatttattagttaacgaaaaattgcattaacatatacatatatgcacaatatcaattttttatttttgaaaaagatatatgatatcaaattctcaacgcaaattatttgaccatctccattcattttaattaaaatttgtgtcgtaaatacataagttaaattttcgattgcaaaaaaatatctaaatttaattttttgcgataataatatctaagttatatttttaaaatttttgtaggtatctaaccggtaagtgtcaagttattattaacgtgtcataaatatatatattgttgaaaacttggttttttttttaacaaaatcatagtttgacaagtcttaacaaagtttttttttggaccaattaaaactttttcattttgtgtgattgtgataagatcatgctatttcattattttaataaaaaatataatttattaagataaatttactatagaagaatttaaaatttatgaacaagtatttatctataaacactctagtaaaagaaattaccaatatgcgagcaatatcattcgcaaatcgtagaataatactacaagaactaccaccactaccaattaataaaaaattaatgtttaacagaatagaatgaaaaatataatttgagtgaggattagtaatccaatcaataaccacaataaaattattgttaataataaagaaactcaaatcgaattaatgtgcaagaatcaaaactaaataagctatatatacacttaacaaaaaaaaaaaaagctatatatatattctgagggattaattagaatcaattaaatatataaaattgtacaataatggaattatatatgtcacatcatgcacgagactctcaattagtcttaaaacacaatgaaaatgatatatatcattatgtgttaattaataataataataatagttagagctgtgatgcaaaattctgatctcaactacttcttcacactcataattatgtgttaattatccatttatatacatatatatatataaaaatataaatgtaaactatatattgatatgaatttaatcggtgaaaaagacgagaagatgatcaagtcatatcaaaccaaaaaaattaatagagagattgattgattgggaaatacaaaggagaggattaattactattaatattattagctaataatgttctctttttttttttggaaagaataatattctcttgttaataattatatttcatataagtatctatatattgatgtaattaacaaataatatccttttcaaaaaaaaaaaaaaaaaaatattgatgtcaccattttctttttggtaattaaggaccaaatatgtcaccaattaaattttaattatatatgtaagaaggtatgtgaaaataacaacatatttaatgcttagctaacaaaatcaggtagcttataatttagttgttaatatatatatatagttatattcatatatatatacatataatatactcgcatattataattagattattaatattagttgattattatgaaatattttattgaatgtattttacgttccactcatttttttgttattattaattaataaattaagcttttcttggatcaaacagtactcacacccctaaaaaaaagaaattaatatagttgagttgaatgatttactaatgagtcgtaattaattaatatagttcttcat

SEQ ID NO: 44837 - DNA, 4018 bp, Cannabis sativa
aaatcaataaagataacaatgtttcttttcgttgtagtctggtgttcttattgttgaaggcaatgcttatttttgtcaagttattttgggaattaacaatgtggttttgttttagttatgattgcatatgagtaaagcattagtaattatgctactttctcttttggctcctcagtttccatcacatgttgaatactgtatagtctattatccttggttatcctcgcagattacttgatcttcatctgaaggccatgagatgtctcttttttgtattccaagtttgtttgacttgaagcttgtaaatctgtatactgtcataatttttgatggtttgtgcttctggtatttttagcaaaattttctgccatggtagatgaatatgatatagcatgtttactatgtgagatttatcttgttttccttcattatattggcagatggagctgatttctaaagcacgaaatccatttattgtggagtacaaagattcatgggtagaaaaggtgatagtctcactagaagtatttttcattctttattataaataagtaacagatttctactgtgcaattttgcgtgtacatttcacatttttcctactctgtttgtgataaatgtttatatacttatatgttgtgttttctttcatgtctttcctagtaagcctttagataagttaaaatgagttgaaaacttgctagaaattatgtttgttgtgcaattgactcttggtacttctttcagggttgctttgtatgcattattataggatattgtgaaggcggagacatgtaagttattttcttagatttagtcagggtgtgtgtatatttttttttaattgagaaaattttgatacctactatattttgatccctgtatctgggtaatttttcttttacagggcagaagctattaaaagagctaacggtgttcagtttcctgaagaggttgttgtctagcaaccttaatttttcactatcatgttttaactgcagtgattgcattacttaaaaataatttattttttgtacttatgactgaattctgcagaaactttgtaaatggcttgttcaactcttgatggcacttgattatttgcatgcaaatcatatccttcatcgtgatgtaaaggtcagtggaaaaaaatatgcggatttgtttagactttagagtacatgtatgggatccaaaatttactttgaatgttttccaattgtttcagtgttcaaatatatttttgactagggatcaagacatacgcttaggtaaaatttcatttaccttgtctctatcattggtaatttacaatttgacattacaagtacccccttcctatccttcacacatcgttacactattctaaattgtatgtgctaatgactaatgtgttgagatcattgatggaatcaggtgattttggtcttgcgaaaaagttgacttccgatgatcttgcttcttctgtgagtagccaagattaacaaacattactttcttgctatacaacctccctatgactcttaatgttgatcttcttctgcgtgcaggttgtgggaactccaagttatatgtgccctgaacttcttgctgatataccatatgggtccaagtctgatatttggtctttaggttagctgttttcctattctgatctccagaaactgaaacatgagtgtaggctatcgctataccaatttcggtccctatagcttatatgcataatgcaacttttttttttctttcctttttcatcacaggatgctgtgtatatgaaatggctgctcacaaatctgctttcaaagcatttgtaagttgctattaataaattaggaacttgattatttttatcttcatttattttctttggactatgttattaagaaaagatgaatccctcggtgcaaatttgtttcttaccagtcttaaaaagtattattcagtgacttcaatgtctcactgttttccaacctagcttacctttattttttagtgatcagtatgtttccgttgttttgattgctcaggatatgcaaggtctgataaacaaaataaataagtccatagtggctccccttccaactatgtactctgttgcattgtgagtcagctttcctctatgtttgcttcataatcttgtagatgttactatttcatatgtttcagattttgtaatcatttggttccttacatattttcaatcataaattgtagtcaacgccatctcttatcgtttcagcagtgaaataacttggattttctgtgtaatcatatcattactgagatgttttcggtttccccttttgcagtagaagccttgttaaaagcatgctgcgaaaaaatccagaatttagaccaagtgtgagtctcttttttctttcaataaaatattgtcaaatggcatttgccttttcccattatatttaaccgtggtagttcatcttataattgttgaagtttatctctatttcgccaggctgcagagttgcttggtcatcctcatcttcaacctcatatcctaaaggttcacatgaaattaaatagtcctcgacggaatacttttccaatgacatggtctgattctaactacataaagaagacaaggtttatggagccttcagttgttccagtccatataatcagggagaaaagacagtcactcagcaatgacagggctctaaatcccagtatatctggaactgaacaggattcactatgttcttccaaaatgacgcaaagattcccaagttgtttggattataagtttactgaattgtccattggcagctgcagttctcatgaaaaatatgaaatggaaaagtcagtaacgaaaaaattctcaagtgtcactcaaactccacgattgacaccagtaaaacattctattactccaaggagacagataacaacgaccaagattcctcatattgcctcaaaacgcgattcggtaagtttttatacacaatcatttactactaatattcttattatcgtacaaaaccaattatggattgtaactggtaggattagatctgcttcaaaacagttgcttagatatgtaatcccttatcccctagaacttttgcctatggtttctatttagatttcacacttcaatttagagctctgtatatagtatttttttctgaccataaccttatctttacagcttccaatgtcgcacattccagcaaaatctgcatcccaggttacaaggagagcatcccttccattggcaactagaggcacagctttggaatccccttacagaaataatattggtctccttcacagtgtggattctccagatgtctctgtcaatgccccacgaattgacaggattgctgaattccccttagcctcttcagaagaccctatttttcccacccgaaaaatctcatcgacatcaacatcagcccagtgttcttcttctgcagacattgcagcagaccgctcaatcatgaaggacaagtgcacagtacaggttgtagaaaaagcgttttctaggcgcagcatctcagaccggagtcatggagatgtaaaaaatggaagtgagccatctgagtacaaccctacaggagcataccacaagtcatctcctgagtcacaacagcatcggtttgacacatcatcctaccagcaacgggctgaggctttggaaggactgttggagtttagtgcacgtctcttgcagcaggaacggttcgaagagctgggtgtgctgttgaaaccatttggactagagaaggtttctccgagggagactgccatttggttggctaaaagcttcaaggagactgctacataacatagatggaaatcctaatgttggttcatttgattctgttgtttacactttgtaaattgtacatgaaaggagtcgatgaagttcagagagctgtcttcaaacttagaagacactccttaactagtaatgttagaatttgattgatagattaggcttcacgggtgattgtgtttgttttgtttgtattttcagatacaatctttttttttt

SEQ ID NO: 44838 - DNA, 1587 bp, Cannabis sativa
atgaacgacataatgaacaggctagacatgtcatttaagaataagtggagctaaaaaagatatcatgtgaatgaaaaaaagacaaagtatgtggaaaataatttgtagaaagtagacagagcaaaatgacgttttattgttatcgtcaattgatttctgaacgacaagcatcatcattgggtctggttgtgcggtaggatgactgagaaccagagagaaagagaaaaaaaaacgtgatctagttggtggataggaggaatgaatttgtggccgagatgtagccactacaaaaaattaggcctaggacaagtcatcgtttaaggtattttcacaccagcgggagaaattcgcatttttttgggattaagttcctctaccgatgttctcgatattagttttaccgaggataatttatttccctttatttttcacctgctctttctcttcccaaacccacataaaccaaaatcctccaaacccacattagaccagtcttcttccttttctctcagccctggcatccccctccctcaccgacgtcttcctcctactccgatgtcttctcttagctccaacgacttggtcctcaaagttacacagtaagttatcaatatctacataatattgaaatatgttttttccactttgagtttttttcttactaaaatgtaaattaattgggttgatcttagatttttggttagctggcctcgacttcttctatagttgtggaaaatgaatcaaatcaaaatcaaggtttatctaggacttttgttgaacattatgatttttcattgattgtgaaagctaaaattaatttttgtttatttcttaggatttggtactgattttattgttgttagtgttatttttgattgggtattccattttatcttaagttttaccaactttttctgggagaaaaatgtgttttatttggtataactttgatatgactgaaactcattatgcacattttttttaaaaatagtatgtaggatttgagaaggaaggaagaagaagttttgagatgtttcagagattatgttcttcaattccttacttttaaagatgttttgtttaattcaattttcattatgtatatatatttttttgggggtctatttggttagtagaaaaatttaatagagagagaaaatgaaattgattttgatattcctatatatttggtacttttagttgtgtacttagttttcatattgaacaaaatcaatagttgtgattttatgaagaacttcaacaaatttacctttttccttgaatgaaatcagatatttgataatcttgtaaattgatatgtgtgctaattacttaattactgcattagtctcgtgtatgttcaggccctatatatacatatatatatatatacattgtttttgaactaattatttcattttcactaattataaacttttggtttgacttttcactcttttgacaaaaaaactactgttatcatcaattttcaaatgctaaaaggaaaagtattaaagattataggcattgtaggaaatttaagatagtcttttactattctgcccctacaccaacaaaacaaacaaa

SEQ ID NO: 44839 - DNA, 1325 bp, Cannabis sativa
ggctccacaataccttaaaaagctggtctttaacttcacatttcaatataccattaactctcaaagcatggaacaaatccttaggagaaggagatgatgacccgagcatttcaataacagaacgacacgtggcgctctttatatcagccttcttatcaactccaagaatctcaaatgatcttaaagcttcatatgcctcttctaaactggtaagatttaacaccaaacatatattaatttttatatgattgacatttgagaaaacacagttctgtctggccaaactagttaaagggtacataaaaaaacaatacagttcacattaccaaagattaatttccgagtttcaacctaaagaaggtaccaaatagatccaaaaaaaaaacacacacacacatttactcactacaaaacaaaagcataacaatttatcagtaacagaggagaattagatgccaaattactaccctgaaacattcaaagcaaaaattgaactgaataaacttacaacttaagcccgtaaataaagaaagtctttttatttttgtttaattcaaattgaacgttcaaaattttccatttttacgaaacagtattaacagaccatagaaacaaaattaagattaaagagtgctgaaattgacctgggaaaggagccatcgacgggagtgaaaagctgagaagcagcagatcgatgagcgttggtgatcggttgaaagacagatgcagcttcacagatcgtaatcaccaaagccagtaccagaaatccagcaaggtttctggccgccattgctgtaaaaaacaagaaaacacaaatcaaaatcttcaaacctacatacaatatagatagatgtagaaaatgagagtagtgagattgagaaagagaaaccctagggttttgggattgattgagaaaagggttaagagatcagatcgtacgagaaatgtgagaatggaggtgaggaagagagggtgtaatgagttaagaggtgagttttgggagtggactcgactggtctgcgcgaccccaacttctcctcataacactgaagatgaagaagaagagcacgagtttgattgtgaaatacccaaaatacccttgctatcctacctcaattacaaataagagtattgttatttggaagtttaaaatgtcaatacattttggttagcgattcgatattaaaatacactaataataatatataacattttgtgactcttattgcttagtaacttaagtatctcttagcatttctttcatattatttattcatgtgtagaatcaggggtagacctacatagaagtaaggcaggacactcat

SEQ ID NO: 44840 - DNA, 1701 bp, Cannabis sativa
atatatataggttttgatatgaaacccataaaccattgtctatatatatcttcattaattacaaaacaaacctttcccattttttggacttatatatatagcttgttctgtataattagtcttaatagaattgttaataatatttaagaaaaggttcaatttgcacacacacacacatatataataattaagttatatatcgagcaatgagtcctcactacataatggccaatatatagtttttacaatgacttaattaattatagttacatataaatttataagtggcctcctttcaaacttttcctagaataacattttgtaatttcaaggcattaatatatatattaaggttaatatatatataaaaagatgaagccttcttgttgttgatatatataagacaaaagaagagaatatttataaataaaatgtttgtttatatatataaataggtataatgactatggtacataagcacgggagcacaaaaagcaagatagttatgaagtagatgttataatataattaaacaaaaataaatatgtgtttgtgggttccattttctttgcatgggaataaatgatcaccttttaaaaagaaaaagtgcttcatatatatttctctaaataatgaaatctatacaataaattaaacatttttcagttcttcccaacactctccttacgtcattacatggcatgctttcaatattctttttataataacattagtttattagtggagttttgtttttttaaaaaatattacttaaaattgaaaaaatatgtaatataaatatgaaatttagaaaaaagaattacgaaaatatgtaatagctagcataatcgtaaataagttcattttctgtaaattaaacagtttttttgtatggataattttacaattgtaaatattgtttatagactagatattttaatttacaagttattacaaattgttattctatattattatttttatcataagttatgaatatattttcttctacacaattgtgaaaaatatgtaatttatttcgctttcttaattttatgcccccttaagaaaaaagatctttttataaagttctattaattgacaaaacttgaaatttgattagatatgcattcataaaggtgtctatgtgccatgattaatttgaatgagtcgctctaactcattaaggcatatatacacatttctttcttttaaaaaaaattaacacatttcttaaaagttacatatcaataatgtagcattaggatgaagcgttattttataattggttaataataataataataatattattattatcatacaaatgatttcaataataatattatcatacaaataataatgacctatagacgctacaaaaatgagtagccaaaacaaattaatatgataaattaaactatatatgcaacatagaggttgcttacgtcagtagaattagaaagcatgctcttttcatgtaaccaaatcgaggtaattaagtttaaacaaagtgacatgctttgtccaattattaatttaattattatacttttaaccctatatatatatattaatctacattaagactcttcgtgcacactctatagtacagtttaagaatataatcattaccaattagggacacatatatgcaactccccaaaaaataaaaacgttttgattaattaattaattaat

SEQ ID NO: 44841 - DNA, 1484 bp, Cannabis sativa
atgcttgaataatatagcctaaaagtactataaaactaaacagcaatatgctcaactattctgtattaaaaaaaaaattgtgtacatctatatatgaaaagaaaggtctctatagtaatggctttaaagtattacaaagtctcatatggataaataccgtggcttatatacatttagatgaaagagacttaattattataagttatgaacaagtttatatatgtgtcttttggttggtagagataaatatagatcattagtattgcgtacgtatccaaaacacacactaaatattataatgatccaaagcaaagtagttatatcaatttattatgtatatctaattaatactattattattttgcgttgcatatatgaaagaacaaacatgtaaatagatagtacactatagatatcttattttagacaggtcggaaaaaaaaattctgaaagagataccttcatgtactggttttgttatagtcacaattgtaatctattataaagctagtggagtatcctttgaagactatagttgatgatttttatatatatatattgaaagacctatagggggagttgaaccctatatataaatatagtgaccaaattaagagccagtgaaagagatgggttagcacacgtacgcatatataaaaagaaggaaagaagattaatatataatattatatatattaattttacacattatatattcatattcataggacccttaactactgctggtaatattcgatcgaattctaaatctacgtagaaggctgctttgacccgagtgtacttaattaattataagtcctctttggatgggaaattattaaatgctaaagggcaagagctgaatgactgcatctttctcaatctttgtcctctactcttcatctttctatctctttcatttagttaagatgtcaatgaacaactttaataatgtcacttcatcatgaatgttatcatcacataaatgggcaaaatgagggttatataaacattgagaaatacagttgcgaaactccattagaataccaaaatgtttgggaggttttatgctgaaaatcacttcaggtgacatgtcttctagtgtcgagtgacatgttgcttgacattttcaacttacacaaaaatagaattttgtaacttctttcgacctctctttaattttcaacgtctcccactcattttaattacttaaatgagttttgtactaccctccaataactatataatgatatttttcaattctaaaaggaatataattatgtaacaacttttttaattacacattaaattgtaatcaactaaaggagttacaaatcatgctttagaatttcagaatatgaaattcaagaattgagagtaagataaaggaaagaaagagagaattcttagagatatataaaacataaaacttaaaaattaatttctttattgattcaactatgcttatatacacaagaagaata

SEQ ID NO: 44842 - DNA, 1019 bp, Cannabis sativa
agatttttccaaaactcacagattaagttctacaacttagtttaatatattcttatatcaaatcaggttgcagaacaacaattaaacatcattatcaagttatgcaaggtaatgaaatatccatattccatttattaagaaaaacgtaaacctaggaattcacttgcatcatccaagttgtaactactaggtctagcctttccagaattggatttagcttggaaaattgttactcatggaaaaataataacaattaataaatagtaggcttacttgaatgaacaaagaaaaaattgttaaaatcatgcactcaaattacttagttcaaatcatagggggttaatagccattcaagtctcaagaaccttagctcatgttcaaaccagtaattacaatccaaaataaaaaaatttcatccatggttgctacttagtctttaaaaaattatcaaactccaaatatataaagaaaggaagaaaacagaacaagaaaaatagaaagccaaactaatgaagcttgtgtcctcttccttctatcctccgttgatttcctctttaaggtacttgattttcaatacttttctttctacaatattttttctctctttttgtagctcatgtgtgtgtgtaatgaatgtcaatggaggctggtacttatttttcttctattcccttagtgtacaccttatttactctaattagaaagctcaacaactctctgtggcccacaggttctctttgtttcctattctcacatcgtcaactagtataaatttaagtgactaccacatgggtgatgatgtggatggattcaattctctttgtaacttgaccacgtcactgcttagaatgttgaattcttatagcaatatgttcatcaattcctcccagtttcaacttcaataacccttttaatcttgcatcattttcattcccttggcactttaactttcattcgtaacaaaaaacaatgtttaattaaataaacacaactaagcataactatattacaagcctcaa

SEQ ID NO: 44843 - DNA, 3135 bp, Cannabis sativa
ccacgaatatcttttgtttttatatgtgttttaaagagtgtttacaatattatttattaaatgaaccaacaatatcgatcactaaagctgcctaactttgccccttatataccctaagcaccttatctctcattgtgtactttaattatcttttaatttttctttcttttttcttttttctttttccctttttcgttttgtatttggcatattgtgtaaaatcttcatttctcctcaatttcaagtaagaagcattaaactttgctatataatgtataatctatacttcggggcctctttgctagaactttgttaattattttttcattgaaccttaggcatatatatgcatgcatgtcttgctaagtaattaaaccctaatacgtgtacgtacctaagttattagtgtggggtttattaggggcactatgcatgaaaaagtatggggaaaaaaaattaggcagtgaatgatgaacaattaagagaaaacggccggcttggaattaaataatgtgatttttgatatatttattaaaattaagtggctttgacaccaaaatagttaatttgagccttttgtgaaagagtaggaggatgttttgatccctaacttataacttaaaacttttttaagcttttttaaaaaaaataatttttaaaaattaatagggggcgttttgtcaaattttttacaaagttttttgaaaattgaattttaaaaaattaaaaaacaaaaagcactgtattgttgttttttattttcaaaaacaattttttttgtcaaacataatattttttttacatttttgcttacatactcggaccccagacccagacctagatactgatctccaaaaccggaccccgacccagacctagactcagaccccgacccaggactcggacccggaccttgaactcgagttcccaaagtgcaattgttggctagtccttagggatgagcttgtaacaaatagatcaaagaactcaaataacataattagcttaaagcttagtcatctcgggattcatatctaattgttctatcataaactaagtgatattgcattggaatagttataacagtaaattaggataattgttctatttgttaatatgtttcgttccgttgtaaatcctatacatccaatggaaagtttattttgcttaatgccttaaaaaagacataccacttatcaaaagtgtaataagccttattgttgattatcaagtcaatgtaattttattgtactgataaatcatgagactataaaatatttgaagcatataatcataattattttttactcgatcactataattatgaataactaatttaaatattaaatatattaacagggccagtcttaggcataggcgagctaggcccgtgcctagggcacacacctttcgggggcccaacataaaaaataaaaaaaattattaagcttttatttaagtaaaattaagtatatcgtaaacaacaattattcatagcttagttggttaaggtgtatggtatattatacaatgtcatgggttcaaatcccataatactttttttcaaaaaaaaaaaaaaattatatatattttagaggaccctaaaattaaatttgccttaggcccataaattctcagggccggccctgaatatataattatgtaaaataaacatgtaaaccaaacatttcactaagtcaagaaaaatttctatttcttttattgataaataataagattacacagaataggttttatttagaacacaaactctaccaagaagaacccaaggtcaaggcactatccatccacttcatcacctaaaatctcagccccccttcctgttgtcagcagacttagcaccaacactcggatgtctcccaagatggcgaagagaaaggagaagaacacgaaagcaaagaagaaagggaatttcttcgttgaagctagatatggactcgttgtctttttccattcttcctcgtcaactttggaagattagaaacgagtttccaattttttttttcttcttcttattgttctagtaggttggataaagtagattggggtagagtaaattgggaagaaaattgaagattttttttttttgaaataaatttcaatcacacacattgtatttatctaattaccaaaattatatcatagagttaaggcttggtagctatgtgtgtaatataaatataacttacttacacatgagcaatgtgagacaaaccatacatacacacacaagtttctatttttgataaacttcaaaatcacatatacatacatacacacaagtgtctgtttttgatatctatgtgtgtaatatatatctcacaaatcactcactagtttgaagaaatttgatgtgtatataagttatcaatttctaagttttaacatgtagagaagatgtttaaaatttttagtttttttttgtaaatttttatattttgtaattttaggatttattattcttgttagtttaagttatattacataattttttttaattatttaatacttaatttaattttgttggatttttaagatttgatctatttaatttatatataaattttataatattaatttaatttattactatttaattattaaatttaaatgtgattttttttagaatattaaattacatggtaatgactaaagagttatgtcagcactctggtagtaacatgggacgaaaattgacaaaaaactttattcgcaatactataaatagctcgataattaattgtaatgggttacaaattaggggacacaaatgtattttcatttttatcattttattttaagggaaagatcaaaacttcaatcaatagagaaatcaaaggacaaagtcaattacaatgcttatggataagtaaaagcaaattattctcgagggagagcaaacaacaaggccaataaactgacatatcgaggcacatacgtccgtagtcaagaccgttaaaaagtaccatatcaccgtaaatggtaggtaaggaaacaaaacaaggatacaaaccctcaagactctaacaagagaaaagcacgaaataaaaaacaacacaagccaaaataaaaccagtaaaaaatagagatataaaataaaataacaaaaaaaag

SEQ ID NO: 44844 - DNA, 2490 bp, Cannabis sativa
tgatctcagacagacatgagagcataattaaggctgatgctcatgtatttctagacataactcatggctactatgtataccacctattaagcaaccttaaagaagaatactagcaaactcgataaaccattcgttgcagcagcaaaagcacacacagagaagaaatttgaataccatatgagcgagtttgatggtttggacaagcgtgttagatcctatttacaataagttagatactgcaaatagtcaaggtaccacatcaaacacaacaggtatacaactatgacttctaacattgccgaatatctaaacttaacaaacttagcagctagagaactaccagtcactacactaatggatcattgagagctttgatacaataatggacatacacaaacaaaaaaaaagtacaaaatatcacaacaataatgacgcctattgcctaagaagttaatcaataattttgtggactcattgacaaaaaatgtaagagttcattaaacttaaagttgcataacagttgcgttgtagtttattttttatttttctaacattcaatacattgattattgttaccaaatctactggtgaaaccaataaacgacaacatatttgaggtagtacaacaaacaaggtcatggatggtcaatctaaaagaaaaaaaaaatgcagttgcaacagattctaacaagacgaatttccatgtatcatgctgctcttgctgtgatgaaaaaagagataaacttaaatgtttacaaaaactgttcacagtattacacaaccaaaacatggcttgaaacatatagtgggtcaatatatcctgtacacaatcacacaacatgggatgtacctcaaaacatcaaatatatcattgttctgccaccaaaccagaaagtgagatccgaaaaaccaaggaaaagaagatttataggtggatggaaaaaaaaaaatagaataggtgcagcaaatgtggccaaaaaagtcacaaccgaaagacatgccacaaccaaacaataaaatagagacatgatatttatttgaattctttaaatttttatgtgaactgatactgcatgtaaagttaccttgatagattgctattactttcccatacgaaaattgctttttttaatgttgcataacagttttaagacaattgtgtgccatgttaaaaatatattgctattaaaattccaaccatattagttttttaaaagttgcataataatttttttaagctgtattcaaatacaatatatttaaaacgttcatagtaagttcaaaacacttttggtgttaagattaagaagcttttccatattgaaataatttttttaacattgcatagtagttgctagatagatgtgtggcgtgttaaaaatacattgttattaagattccaaccatattggttttttaaagttgcataatagttttttaagttgtatggcaaatacaataaatttagaacgatcataataagttcaaaacacttttggtgttaagattaaaaagaattcctatactggaatagtttttttaacatagcataacagttgctacacaattgtgagctatgaaaaaaatacattgtcattaaaaaacttacactaacaacaaaagcatttagactctaattacaaaaaaaataaaaagaacaactattgtctaaaaaaagattatgatcagtcatacataaattaaactataatataaaagaagaaataaaaacaaaagcatccataaaaaaagatttatcatttaacatttaaaaatcaaactactttataaaattatttcccaacagaagaccctacttcttgtctttagcacccttagaagacttgttgagcttctcatccttactgtcaatatttttataatttttcctctgaccataggcaaacaagagggcagcaagccgagtgcgataaatttcaatgtcaaagtctttaggaacatctttgtcatggatgaaaaactcagcaaaagtagcaacaaaggcgtcacaatgactgtttgacaaaaaaaaaatacaacatttaatcaactattatgcaacacaaataacaactaaaaagaaacaacacaaaaataacaactcactttttctcctaaactggaagacttgcaatctccaccattcttagtggagctttacaatcagaacccaagtcaagacaatggacttatttttccacgaaccaagaagatcaaagaataaggggagcataatataatacactttcacggcgttctttgcaatagtgttcatcttggcagtcgtcaatgaattataagaaaataaaatacccttgttcaaatcaagacgaccaaaaatctaatggctttctttcctaagattgataataaacaaaatatggtcagcttcatgccaaggcttagaacaagagattctcaaactttttgatataatgggcaataggatgagcaacataaacatgagacatcttgatttttagagatttt

SEQ ID NO: 44845 - DNA, 1091 bp, Cannabis sativa
cactattttagtgaaatgactattcaccattctaatgtaacaaaagaaaaattttaataatttttttatcaatttttttttatacattttaaattttattacattccattcctatattgtcattccttcccaccaaataacactttaatattaatttaacacttaacaactaaatacttacaaaaattctaaaaatataaattagatataattgccgttaaaaaataacattaagtatttatctataaccgaaaattaaactagtaaatagaatatcaacaacaaagtttcatgatcagaaatgtatccctaatagtttatagtatttttaaaatcataataaaaataaataaatattgtcagcgtgtcaaaaattgaattaagagagtaaaagaaattttgcttaacactcgtgttatacttaagtgggcaagtatatatatataaacggcaaattaatcactatttaccaacattagaaatcaacaccaaatagggccaatccttctaaccatgccccaacatgcatcacatggcattagagttatggttaccacatgggccggtaccacacattcctgagtgcttaatttaaaaacaaagcaaaaaactattcagggtaaaggtaggccggccaagaatctgagaaccaagctgcaatttcaaatgagtggactacattccccaaattctccaccaagcaagatcaaacggacaaaaagaaaatcatacagtgagattctgtattcccttgagttaattacaggaacgataattaataaattggaatggaagaaaaaactagagaatcacaccacaaaccattggatattccaccaaagcaccaaaacccaaaacttagaatgcaatcaactgctaaagattttcttcaaataacctacttttgcaaccactgtctcaacctgcaacccaggattttcaattcaatggactcatcatcagcatgcatatttatgtctctatatgtacatcactgtaacctttatttctaagcagcacttagtcggaacttacttttgtttaccctgctaattttgggtcaactgttccagaagcattgccttccccgg

SEQ ID NO: 44846 - DNA, 892 bp, Cannabis sativa
  modified_base (28)..(35): a, c, t, g, unknown or other
cgaccaaaaaagttcagggggcatgatnnnnnnnntgtcaaagttcgggagaaaaattactaattagccttttagaaaacaggacttgcgatgtgcttcctagagtgctgacgtcatgttgcgcgtgacaattttaaatgctgctaattatttccctcattttttatgaagacgattcgatttttttatttgattttgatgtccttattaattgcagaatctcaaattggtgcttaagtattgtaactgtccttttaggtttgttcatctaacaattgttccccagttgttggattatggatttttcaatatcaaattgggaccgtcagatggttaacgatctgtgtcaccttggttgatctataaaaccccttattcttcttcttcaatatttttattctcatatttctcagaaccctaagccagccaaaattccagacagcttagattttcttctactttttctccaacattgccaagctcagttttaccgacttcttgcaccaaaacttgcaactgcccaaacttcttctttttgtaagtcaccaatcacaagcatttcttctaatcttgttttgttattgtagcaacttcatttgttaatatgttttcataaatgtgatgtttgcactatatttacgatttgggcattttctcccaaccatttttagtttccatctcaagcaagggtttccatgttaaggttcataggacttgctttctttttttttttcatcccttgcaccatcattctttatcgtggtgtaattagcactcgatgctcaaaatatgaaatttattatttctaaacatgctagcattcagagagagcatcttctcagcagttaggggattccatattgggttgtctgccctaaataaaatacatttc

SEQ ID NO: 44847 - DNA, 2206 bp, Cannabis sativa
aatacatataaaaagaggtatgtttcaattaaatataaaattagaggtaaatttaatcaattgattaataaaagtggtatttttaacctcaccccattttatttggggtaagttaaaaaatgcctcttttattaatcaattaactaaatttacctttaatttttttttaattgaaacatacctctttttatatgtattatacccaaaatgacctgatataagggagtcacatagagagtatcttgaagtgacaaggttgtcaaaagaaattgaattggctcagggtattattgtccatctgctacttactctgccagcgtccaaggttcttggattcagaatattcccctcatcctcacacgtcattttaccgttttcattgggatcctaaaatatctactttgtaacaaactttaaatgtggcagctgttgatttgtctttgttgattctgtaatgattgtatatttgatcataaaaggaaatacaatttcctcagctacgattgagctgagatttctccattttcattcattaccaaatttaacttggtatcagagcattaaaaggcttttgccatggccgatcctaatgcctcaactccaactcaacagtccgataatggtgggggaatgcccacattagaggcgtctcaacagagtccagccgcaccagctatatcagcagctgctacatctcaaacagcactaccaaactcatttgcgtctccttttagcagcacactaagccaacctttctctttgaggctcgacagaaacaactttccattgtggaagaccatggtgttcaccatcatcagaggacataggctggaaggtttcatcaatggacagagacaatgtccagaacagttcataactacaggtatacccaagtccactgaaactcaattttctgttaacccagattatgaaaattggcttgttcatgaccaaatattgatggggtggctttatggctccatgactgagggaatagcctcagaagtcatggggtgccaatctgcatctagtctctgggcttctcttgaagagctttatggaggcaatttgagagctcacatggatgagcttcgaactaaactacagactgtgaggaaagggtctgcaactatggcagactacttaaaacagaagagaatgtgggcagattctcttgcccttgcaggggaaccttaccctgaaaaacttttggtgtctaatgtgcttagtggtttggatgtagagtttcttttctatagttgtgcagattgaagccaaacctcagatatcgtggcaagagttacaaaataccctcatcggttttgatagcagacttgagagactcacgggtctctccaactcaaacaagatgaatggctctcttggaggaccctctgctaactatgcccagaaacctccacacaacactcctcggttctcaaactctcagcagcaaggtggcagaggaaactcttctcattcaggaacaagaggaagagggagttacagaggacgaggaagaggaggtcagtttggaggaggccctaaaccgacatgccaggtgtgtggaaagtacggccattcagcagccatctgctacaatcggtacgatgaaatttcatgggacagcagcctcctgcaccagctgaccagggtcatgacaaacagtttaatgctctcatagccataccacagaccttgaatgatgagagttggtacgctgacagtggtgccagcaaccatctcacaccagatgaagggcaaatgagttccaaaacagcctatggtggtaaggaaaagatcactgtaggtgatggtaatcaacttgacatctctcatgttggtactggcctattaaatactgatgtgtccaaacctcttgttctaaaagacatgctgcttgttccatcaatttctaaaaatcttatcagtgtgtcaaagcttacaacggataataatgtgtcaattgaatttttccctactgtttgttgtgtgaaggatcaggtgacaaagaaggtggttcttcattaaagatggcttgtaccaactaaacacttcaaatgttcccaaaaccaaccgtgcaagaagcaaaaccagtcactgtccactgtactccttttctgctacttctaatgtcgagtccaataaaaccagtaagcctacttcaatgtcagatctctggcatagaagacttggccacccctct

SEQ ID NO: 44848 - DNA, 1079 bp, Cannabis sativa
ttacttttacatgtcaattaatattcaatccgcacaagtgtagattttaaattttttaatccaattcaaaattttgaatcgactattttataaacacattcctccgagttaatttatcataatcttcatgtctaagcatcattaatttgaatattgttattagagcactatttaaaagacttttgaataataaacagatcacgtctctcatatatgagcttgtacaaagcagctatccattagatacagcaccgatcgagtactgtagctcgtaattaaaatttaagaagtggaatactaggttaatttgatttggaagtatccaaatattgtctcgtccttcagaggtcatgcttggagttacaacttaccacatcatgcacagtaccgttgtacatgatcaaagaactttaataagggacggtttcagaaaaaaataaaaaagaaaagaaaaactttaataagggatggtgttggtttggtgtggtggtccagcaaatattacctgcaaaatcgtggagagcggacaattgttgtacattaccgttggcgagtagcaggtttcaattaatacacatctttttttggttgctagttgcaacttcgaactgcatgcatctgttcaatttcaaatcaaaataagtaaattgcattcaatccaaaccaaccattccacattagcattcgtacattttgtgtatgggatatgaaattactcgtgttttcttttagatagagcattagtatatattttctgaaataattagttttttaataaatactctaatcaatgtagaagtgacaatgaataagaagaatagatggtacaacgactttggtaaacctaatagtccttcggcttttgagcgaatggccatcaacaatggtgtaaaacttggtaagacgaatggctgggaaagtgcaccatagctaatgttacgtaggcccaagagacaggcacatgaaagctaggatgaatgaggaggcccaagaccaagctgtgacttcagttcgtggaacccaacagaggaacccatggatcgtcaccatagggagcgagccaagccgcgctggctcgg

SEQ ID NO: 44849 - DNA, 3000 bp, Cannabis sativa
ttgactaaaaataagattttttttttgtagtacaatctacttaagaataaattattttgtttgtaaccatgatttgtatttgttctaagtttcttaaatgattgttcctttttttttactaaaaaattctttttaaagttcataataaataaataataataattctcaaaataatagtttcatcaatcaatatcaatattatattgtttcaaaatatcaatattgcatcttaaaaatattaggtgcatattaatttggtagttttatttgatttgaactttggcttgaaatcctagataccattaacccctagttttagtgcatattttgtccatgtatcatcactcataattttttatatagataagatgactctacagtccacttaattagcacctattattttttattttgaatctcaatcctattctaggaaaggactttctgctaatatatgatatatttgtgtccctattatttttccaagcttatttgaattaaattgagaatgagtcatatattcactgttaagtcttcatgctttgatctagtttcattggaatagccaaaaacaatcacacatttgtataagatgaacacaaaaacatataactcaaatgtagatttttctttcacagaaaatatatatgaataagtaatatatttattgaagtgaagtgatatatgatccaatgcctatttataagcttatgttcggtgttagaaaaataacagataaatcggccaatcaatgatgactgtctctaagtaattaactaactctgtcagagtgaccaagtaactagattagcaattaactaacaatttctcaacctaattgctaatctaggcattatagaatagtaaaaaaatatagtcatgtttaagaaaaatttgctgaaacatgtagtaaagctaaacaatttctaaatttcgatgagggaagcactttggtgagcatatccatttggaattcttcagttgcgatcttagcaagtttcacgtactttaccttctgtgataacatctcgaataaaatgaagccttatatctatatgcttagtcctttcatgaaagacctaatttttgttcaagtatagtgcacttagattatcatagtgcactattacacttctttttctactcgcagctcccttggtaatcatttaaagaaaatagcttcttttatagcttcactgcaggccatatactctgcctcagtggtttaaagtgccatagtagcttgcaaattagcttttcaacttatagtgcaccctcgaaggtgaaaaacataacctgtctaggaccttctggtgtctaatcaccagcataatctaaatttacaaagccctccacctctgtagagctgttgtttggtccatacaccaatcctattctgcttgtgcctttcaagtacttcaaaagtcacaccatgatttaaatctagtcttgtgtatctcattagatacattaggcttcttaccaagcttgcataaggaactttagacatgtagctttcttcttaactgttggttggggcttgagtgtgggagagtttaaattgatgtcaaattagtgtgtaactagttttacatctgtcattgagaatttctttaaaatcttagagatgtaaccttcttgagacatgtttataatcctctcttctctatttttaatgatttcaatccctaagattttatttgcagatctaagatctttcatctcaaattctctatttagcacagttttcactttcctaatttcctccttgtctttcctggctatcaatatgtcatcgacatacaagagttggtaaactattgctttagaatttgtcatatacacaaaaatttcatatgcacttctcttaaagcttgatttgatcacaaactcatcaaaccgtttgtgtcactgtcttggtgactattttagcccatatagagatctcttcaaaaggcacacttcatattctatccctttctcttcaaaccctgtggctgtctcattaggatgttctcttctaaatctccatgtagaaaatcaagttgctttagttctagctctaggtcctcagtagctactaaacttagtaacattctaaatgaggtatgttttaaaatagaggagaaatatcccattatagtcaatgccttgcctctatgtaaagcatctagctactaatctagttgtgtaccttaccttctctacccttagaatcacatccttatgcttgaacacccatttatagctgataaccttattttccattggtttcttgaccaatattcaggtcctgtttttcttcagtgagattacttcttcacccattgcattattccttttctccctatcaattgaccacattgcctcctcataagatgtaggctattccctatttatgccagctatgttcagtgcataatgccttacatcatcatagcccaatcttttaggagctttgataggcctttttttccgtatcccttattagctgatagtcattttcttccttaacttgtttagtttcatcttcagactgattagacaagtttgtcacaccaatggcttatggtgttgatactacttggacctgagaatgatcatttatgatctccacctcagtctgagatatcatgttgctgttgttagatacctcatagtcatctcttgcctttcctttgagtatgtctctatatagctcactttcattgaagatcatatccatgctgatgaagaacttctggtggtttccagcttctatactcatcaacttatacccctttacacgattatgataaccaaggaagatacacatccttgcccttggttctaacttatcccatctcacatgggcataagcaacacacccaaagattttgagattttcataggctgcaggccttcctggctagatttcaatgggagtcttgaattctattgttgaggaaggacatccttcagttaaatatgttgttttcaccactgcctctccctaaaaac

SEQ ID NO: 44850 - DNA, 2837 bp, Cannabis sativa
  modified_base (2308)..(2311): a, c, t, g, unknown or other
  modified_base (2615)..(2638): a, c, t, g, unknown or other
gcttctaattaatgttttacttctgatgaattccatcaataaattcgatgcagatcaaacaggcctttgacaattccaaaagaaccaagcttaagctttcagaagatgagcaataataagtgttccagctcagtatttcccagtagtgaatactctctaattttcaacagagccgtcagactttgatcaaaacaccatatctatatatatatatatatatatatgtgcactctcggatcgttacaactaaagtctgaagctgtttggctgctgggaaaatataacctttcttaatcgatggtcaaccttcaatttcttaattagttaatgtacaatgctccattttccactggtcttgttagaatagaagaatgtaaacattaatcccacatgcatgtcgttttagtagtcgttgtcatcatttagttaaaagcccttttaaaggatagttagtaagcatgacctttaatgcgtttttatcatatagtcaaaccctatttggaggggaagagctgctatagtgacctcttgggcctattattatataaataaagttacatgtacttgattcaattttatttttcttttgcaatcaaagccaaaggtgataacgtttcaaattttagcgttgcaacacattaattatcttctctactgataatgaagtaactaaataaaattttggaaatttcttgtttggtactcttgctaggattcctgtccattttgcagtccagccaactaaaagagtccagccaactaaaagagtccataactctaactttatttttaactattcattcccttaacaagcattgttatgaggaactttaatgtgtccaacacaatattttgatgttgttgatgtgattttttgtcaacctaaccttagaaggtcgttaaaagaaagggactggattgagactagtggttatcaaaaataaaccgtaaaataaataagagaaaataattttacccaaaccttagaccatgacaaatatgtaatattcataacttgagtagtcaaagattacattttgagctttgttggaaaagagcacttataaatgatcctttgatttatataacaaaattacatatttaaaattaaaggaacaactcttataattatatagaaaatattagtaactaaaaccaagaccacttatcatattaaaagaacaatgatatcgccacagttatgtagtcaccaaataaatagatttaataagtcaataaacaacaaaataatttctcgcatccatcattcctcaatcctaaccagtacatagctacttaagtcatccaggccatctaatattcaagtttaattacaaaataagttttcaatgaaaatttaataattagaataagactcaactaataacggtattctttctcaacggtacaatcctcatccactagcattaaattgagttcttaaaatgggagaaaataaggggtgagcttataaagtacagtaggaaaataactaatatcaaaggacccttaatttaataaaacccctgcttggatagattttgaaaataaaaaagtatctcataattattgtcacgtataaacaaaaagagggtaagaccataataatcacataatcaaactttaaatgcatatcacaccatctactggacccctagctctaaatttgagtcatacaaaatgacatacaaaatgacatcaatttatggattggagggattgggagatggaaattataagggcacaacaagcagtcattgatgatcattctaggcaggccaccgtgctgaccagaagagcctactaggttaccagtcaacaaccagcaactgaaactagtatccctctgagtgggtcagaagggtatgaatttggacatactacatatactcgtagtggtcagtcgtccaatccaaggctacaagttcaaactgttggccaaacggtagacggccagatcctgccagaccgccccttgggaggagttacacattcaaacgactatactcatatggaggtttcaggccaacctctctaccaaacaggttcaacgccaagaccatctggtgctttggcgtttgattggctaagcactacgcacgacctaataactagtttaaatagcaaaaggagactggacgaacaaaacattccaccgactatccagacagatacctgcgcctaagatccagttcaaagatatcccaatgtgacacaaatcggtcaacaggctgaacaagttcttccacttgtgcaagcataaatagatcaacttaaaatctgttgggaatattttaccaggatttannnntactaacaagtatgttgattaaaatcctaaacattaatatctttaaaacaatgaaaataaacacataagggtttgagagaaccttacattgattgcagcagaatataatgactccttccgctcaagatctctagcccttgattcctttttgtagcaaagcattatcaagatctaaacttggatctctttctctcctttgggtttggttaccaccatattacgcactatgatagagtacttgacttgctatgtgtgggcacgacactctttcactatgggttcgaatgtgaagaacaatgaaggnnnnnnnnnnnnnnnnnnnnnnnntctctcatctaggttggttgaatattcaggctgacattagttggatgagtgagagtatcatgttcctttaatagtgtttcaactagggcttatggttaaattatatcgataaaaaaagaattaatattgggcaaaattcacttcttggccgtacacttaataagaccaatctctagctacaattttgccactttatttc

SEQ ID NO: 44851 - DNA, 1892 bp, Cannabis sativa
caaccatagaacctgtatccaagatcccttcacccttagttgaaccaaaaaaatcgccacccgccactgcctgaaaattggcttcacccgcaccatttttcccccgatgcaccccacgagccttattcttaatggagagccgtcgccgttgattaccaccactacccgaagagctatgtgccttatcgaccttacctcgagcaaagccatctcccgctgcaacaacatcaacctcgtgcaccacttcctttcctttcgaagatgaacgcaatcccccaaagccatctaactcgcgagactgtaaagaactctcatatccaccacacttcctctttttttgatcaaagactccatcaatagtctcacaataggcctcacctatattcgaacaccctttcctggttttttgattgatatccactgaagaagaagaccttgggcatgattcacttaagtgaatattattagaatgcccaccatcaaccaattgtggcccaactccttttacaagtcccactccctccccttcaatagttttgcccaacttacattctctccaattgggcctgtccagaggctcattccttgccacctcatcacccccttcaatcccattaccccgattaacactacccacgactccttcaacatcgctcaatggaaaactacccatcccctgctccaccatcatcggagctccgccattagcgccaccctccactggcctgaaaacatcaactgggcattgcgtttcaactccgtgggccgtttctacactgtccctccgatttacatcgacattggtctcaacagcaccgtcctccacaacatttctgagatcgaaagctctaaaaccattggccatagaatcctcttctttaagccaagaaccatacttaggaactaaccttccatctacatctaattccatgaccgtctcctgagcacaatcaacttgttcatggccccaaatgccacactataaacagagtaacggtagtttttcaaatttaatttggacccaagctttgctaccattagaaggatgaaactccccacaaagatgctatgtaacaatggaaacccgattctaactcgcacataattatttagaaaaacttgttgagtattgctccatttaatatccgccacttcgcccgccatagaactgaatcttttaacattgttaagagtaaataccttcaacgggaatcctcagatccgaacccaagagaacactttgtccaatttggcatcctgccaattaccggaccttggccattcttcaaggatcaaaaactctccattaaaacccaaggttgtttatccaacacccattgagcatcctgttttgattgaaaagaaattccaaccaaattagcatctgttgagccttccagcaccttcactttccagttcgagacattccgccaaattctgttgaacatactttggaagagatttccagatatccctctcttagccacaattcttcccataagtgatcgttcaccaaagtccgtccgctgcttcttcatttacctcccagtcgtcttcttgatcgactaccaatttgttagtcaggttgaccaaatcatctacactattggagcaatccaccccagccatcaatccaagcaaaaagaaaattccaatcttcatcgtcaaaccagagtcccagagacaaagcattcgcagggtcctttagaccatgccaattttataatcttgtattcatatagctttacatcaagatatttaattggtaaaatattttgaatcaaattaatttaggttatgttcattattttatttttttacttttattatttagatttaatttattggaattgtttttttccttagctaaatttatttacttaatagctgac

SEQ ID NO: 44852 - DNA, 1806 bp, Cannabis sativa
ttctatgtaatcaagagtgaaattacacgaatttatatagagtagaatcatgaaggaattaataaaatagagaatttactcagtaaattctaaaactacttactgggaacttgattactaactagttgagataatattgtcttgtagatttaattaattaattttaatcaatcaatttgaattcttcagactatatcttgtttttgaattttcactaagcaatggcttatttgagaaaaaaaaaaaagatttaggatttatttattaattaagagattttataaaatctaattaataaataagttcaataaaaattatttgataaataattatcactacaagaaaattatcctatctcgacagttaagaacccacgagatagacctgtctcagcggttattgacggccaagaatctgagtatccacataaatatgatgaccaatctcgacggttgggaaccactgaaataggataccctctcgtcggttcaaaatataactgttaagtgcgccacatatactcacatatgtgcaatctcgacgcttggtagtgccgagatagggtagcaatctcgacggttcaaaaggaactgtcaagattactaccctatctctatggttaagaacccacgagataggttaaaaaggatagttttttaacaactgccataattgattctagttgaaaaaaaaaaaattaatttttcttttcaataaatctagctaagattatatagtattgtatacttatttttgtcctcattataagtaaagttgcaatatccaccacagttacattatattgcctgcaagtggcttcaaggaagtccgtcacaagcgagaaatccacaataatgggacgccctgtacattaagaaggtgctaatcaaattctacatgagattattcaaaagacaagaacactgtgaagccaaaagtgaaaagttaaactaaccagcataaaatctttcagtgaggttcctaagtgcatttgcagcgtgctcttcctctctaaattgaccataaacattacccacctgccaaaacagaataccaacatgtgactaatctatttcagaaataaactgacttgactttccttatttgatgagaagggtaatatgccactttttcatggtacagaacttgaagaaggcacaaatattccaggattaaatctaattgaagagcaaaatgtgtatagtgctgccaagtatagttcttttcaaactgaaacaaattagttggtttagcaccattcggtgaggagatagctattcgtgaatatgttgaaacatcagaacaaaacttagatgctggggacttgactctttcaccaaggcctttgaaagatgacaaagatgatggttctgtacttccatgtgaagcttggtggaaaagaggagctgccaacaagaaaagttcaaaatcatcacataatggagatatgaaaagaaattatgtgcccaagaaagtaggtttttaaatggccatcaatgaggacccaataacttgtgcctaaaaattaccaaaaatcacatctcaaaactccacagaaggaatttcatgcttcttctaaaattaaccaaggtaccgatttccatttcccaatgaccaatatacgtagacagtacaagcaaccgtcgatataaacttgcaaataaaaatgattaaaaatatctgaacttgcaaatagattggcatcacatgtgatagaactataaattaaatccattacaaattggaagaaaaagtcaattaagaaacctgtcctatatagagctatttgttcaactaactctaata

SEQ ID NO: 44853 - DNA, 1977 bp, Cannabis sativa
ttctatactaatatgaatgagtggacaatgtgtatgtaaataaataaataatttatttgaatataaatttcaatgttttttttttatcaataaatataacatcaataaatataacttcaataaatataacttttttttttatatatatattttttaattttaacttgccttcattaaacacaaaaacgataagaaaataaaacacaaacagagtcaagtgtcaaccataaagggggctgactccctaaccaaaagagtttggcaaacacaattcactctggcatgggaagccaggtgatcagccaaggagttcaactcaccagaaataaacttgaaagaaacaacatgaaactatgtaacaaacatcaggcattttctaaaaactggaaaagatccccaggcaagaggtaactcccccaacaccagggcctcaaccgccactttcaaatctaattcaattaggactgagccacaacgatcatcccaagcccgttccaaaactataagaattgcaaccaattccgcttcaataaatataactttttttttatatagatcaataaatataacttatttacataattaaaaaattgttataaaattgtaaatttaacacaaattaatgtagttttttattctatgaaaatgaagaaaaattagattttacatcttttttatattatctttttttatttttaccctttattttgagtctattatttttactttttttttaaacactttactaattttttccctatcatttcaatatactcttcatctgactcccttatatcaggatgttttgagtacattacatataaaaagaggcatgttcaattaaatataaattagagataggtttagttaattaataaatgatagaggtatttttcaattttaattaagaaaataaaataaaatatttaaatagtgattaaaatataagaaatatttaactagacaaaactaataaatattttcttaaaataaaataattaaagaaaacaaacggatacttaaaataaaaaagcaaattacttttttgcattttcaaaatagtgataattattattatttgcctaacaattccaaagttgtgtagttgatatgaaataaataaaatagacaaatgtcaagttgttattgttgggacaggtgatttttattggagtcgagattagtcaaaacatcctcaatgaaacatccaaaagactcgtaggaagatccaccttccaacacagcatccctgcacttctcactcatctcctccactctcttcctcactaacccaccttcaccaccatccatcaagcatttaagggctctctctatctcctccgaacttattacagtatcttcatcgccccatttaaaatccaatgttagctcaacacccaactccaaatccctcgccaactgaaacgcattcatttgttgctcagcgtacattggccatgtcacaatcggcactccaaaccaaaagctctccagtacggagttccaaccacagtgggacacgaaacctccggtggccgggtgtcgtaggacctccacttgtggggcccaaccacatatccttcccacttccttggtcctcctcaagaatccttctggtagagcttcatcgaaattttcgaaatctgttgttgaaccgagattatcttggtggcgtttccgtacagaccacaagaacctttggccgctgcgctcgagcccagtggcgatctctttcagctgagttgtattgaatgacccgtagttgccaaagcagaggaacaccacagacttcggcggctgattgtcaagccactgcaggatctcgtcatgatctgacgactgtcgattgttgattttaccttttacgtccaaaagggggccgagggtgtaaactggtggatttacaccgtccaaaagtgagctaatcgcatgggattccaactcgagtactgtgttgatgattatacctttggtctt

SEQ ID NO: 44854 - DNA, 1172 bp, Cannabis sativa
  modified_base (1119)..(1128): a, c, t, g, unknown or other
tgtacacaaattaaatttataaagcttactgaaaatagtaaatttagatcacatatatcattttttaactcacattttaggcaaaatatcaaatcccttagcattattattagttctccagaaatatttacacacaaaatatactttattaatgaatacgtctcatcttagttaaatgtggttggttgaaaaatattattacttaataaagtataatattttggtgcatatattattactcattattattcatttttaattttccatccaaatcactattgggctatgccatagttttacatcatggtgtattttatagcacctagatcatattttttaatttattctttaaaatatctcattaaattttttttccctttattttacccttttttttgacaaaactaaataattttattccaaactgagcaatatagaataacaaactatagcaaacgctacaactcacaacctcacttgccttttacaacatctaaaaaatatttatcaccaattttagaattcctacaagtaacacccatcacccatcacacatcacactgtacttaaccattttcctaatctccctactgatgtaatcaatagagtaacaagctaactcaaacgaacaccaattcctataatttcagataaagtacaatattgcaatatgaactacattcaaaatttaatgtttcagatcaaataatatttgtgatcacaattatagaagaaatttgtgtttaggcactattaaagaattccaaataactttgtgataattgatctgatttttgaccatactgttattatataaccagttagtcttaaaccggccagttgtacttgctttaagaatcttagttctcaaaaatttcttcctcaaatgacataatttgcgccaataccaactagaatctggtttaagatcataagtctagaagctcactgatttcagatagatgttatctattcatttaacctagagaaggtcttgctttgttgaaatcgcccaaatatacttagcaagaatagactggttccacttgactccatttttaaagccaaggcctttgtaagccttcagaaggcaaattgaaacaccctaactaacatagnnnnnnnnnntgatttttaaacatgctgtgcagcccgttgctaatcaacgaggt

SEQ ID NO: 44855 - DNA, 3431 bp, Cannabis sativa
  modified_base (2322)..(2323): a, c, t, g, unknown or other
aattttgtgtgaatgagtgaggacacaagtgcgccgttcaaccagaccgagttggttggtgtgatgtgacactttattttttcacgaaaaatttatataatgcgattgaattaacaactccccacgattcagaacaaacatgtaattcttcttgttatgttttttcagtctatcttttactaccatttactaacgtgtaaggaaaaacaacatcaagtaggactacaagtgaagtttggtaattctctcatagctttcatcagttctagtagatagtgtgggccaaaatgcaacttgctcacatacaaaaagaaaagaattaagaagaaattaagtagcacattaattaacaatcatttaatatatattattataggatataacatattataatacagtctctatgttaatttctgaccctattaataattttccaactactctcacgctttaatttaagtataataactaataataatattaagtcgtccaatattaaagaaggttgttattttatttagtacttattttatgtttattatcctttcttttctatcttgataaaaataaagtaggtgggtgtacacccaaatgcaacttcctctagcagtgattatagtatagtttaggcgatcgattccataagaaggtgattactgtaatacttcttttaagtagtgtaggatttttaccaatttaacctacaccaacaaaatgtcaattatcagtattcaaggtcagttttgacctttccttagtctaagtgtaattagaccaaaacagcagggttttgattccacacgataacaatactagtgtcgttttaacacacgactaaagacttttcaagaaaagtctagatgccttaaacaatcaaacacaacacacaatcaacacgaaactagaaaccctagcaaagcaagttcgcacgaacccagaatcctactcacacacacacagattagtttaagcaaatgaaaaacaagagataaagggagagacacaccaagaaatatttcagagttcaccccaaattagggctacgtttctgtcaagctcatctcagagatctagcttgatatccactatcaacaatggtgatttacaatgctttggagcttcctgtcacaagatcgactaggtaagactcgattttatgtattttacagctctgtttttctttctctcttcaatagttgaatctgactttgtttttttctttgtgcatgtacttctcctcctccaatattcctcagcacgagagttttactctctgtttggacctgcactctctggatcttggaaatggagctttaaactagggtttacacttctactctttctttttttatgttctgtattttgtttgcctttgatttactgcttttatactgtgttggagtcggttgatcagatctgggtgatcttgtagaggcaaagccacctaagattgagtctttgtttttctgttaattgttgttgttgttgtatgcagatgtggataggtgtataaagactggttataagtagaatttattcaacaagtagtatattatagacttaccctctaattttatattaaagtaagcaaatgatattgttataatatgaaaaagcttgagtttgattctaactctcaacgtttgacacttatatacaaattaaatatataggataaatttttgggctatactaatttttggtatgcaaacacttatatatataggatgtacattatataagtgctaaaaatttaagatgaggcagttgccccttcttgattagattccttaaaattcatttaagaatctcttttctaataccgacctcttttaatggctctgactccaaggcaaaaaaagagaagaatttttctcaatcaaattaattattcttttctttttatatatatatatatatatttcttattaaagtttatatatatatatatatatttcttattaaagttttgactaattagtaatttttttttctgaactttgacatagactaaatcatattatttgaatttttttggccgttaaaaattccccttgaattattgagattgttaaatttaaggatttttatctaatttcattcaattgattgttatgtactaaaatatgctctccagactttgatatttaccaaattatgcccttcaaactttgatatgtactaaatcatgcccctgaacttttatccatgttagaatttttttactaaaattagataaaaattcttaaatttaataattttaataatttaggggaaatttttaacagtcaaaaaaattcagggagcatgatttagtacatnncaaagttcggagggaaaaattaatgattagcctaaagttttcattatacattacctatatatctatatatatattatattatatcaatgtatcatttcagccataaccactaatacgtacccaaaaatatttaaactttcttcactttaatccatattatacatatatggtcattgatgttagttaagtaccatatttctgatctgggaattcattgttttgtattgaaatccaaaaaaagatgaagtttgagaaagaatttgcatctcaaatggtaccagaatggcaggaagcatatacggactacaagtttctgaaagaagtcctcaaacagattttgaggtttagacaaagaacctcaacagttgtaactgcaacaactcctgaaggtagtttgagtagaaatgtttctctatacagagaatttagtggtctcacaaacaggtacaggagcaatacattgaagttagatgaagatcaggtgattttagtgaacccagttcatcaacaacaacaacaacaacaagggtctgagtctgagtttgaggagttggagttggagtatcagaccatgtttatgatgtcaacagatgatgggggagagtatgaggttgtgttctttaagaggcttgatgatgagtttaataaagttgtcaacttttataggaaaaaggttaaacaagttttggaagaggctgatgagttaactagacagatgaatgttttgattgctttaaggattaaggtagagaatcctgtgtttaaatttggtgaagatgatgtaatgaatattgcttcaaaaggggtttctttgtctgatcatcctcaacctttaaatgaccaaaaaccaggtaacaatcacaaatgcccactttttttattgttcttgtgagtgttttgtaaaaatattctgtatgaaaaatttaattagcaaaataatcatgtatggtcgcggtttggaaccatagatttacactgtgtaatggttgagtaaattgagtaagttttactatttcacattgttagtttgacaaatttaactcggtaattttgacatgacatttccttttgaattgaagaacgacagcatatggatgctattcaagaa

SEQ ID NO: 44856 - DNA, 2386 bp, Cannabis sativa
tatatgatatatggacttggagatgaattcgttgactaacattactttaatttggatgaattatatttctacatcatgtaatatcttatgaaggaagttaggttcaatattttgggacagttatatttatagtttttaatattaataagaataaatattttaattattgtaagatctaaagctgcttattgtttgattttatcgtaaaaagaagaaatcttaaatttaaatttctttatccaatatcaaaaaataaagctacttattatttatttacattttatatatatattttaaaaaatatataggtcaactgattattcgagtattatagattaattttgtgtctaattttaagctattataaaactaattaaagagaaacctctaacccactcttttttgtactttttttttctaaattaagtggcacgtctaatctaattaataaagaattaaaatatcctacattttttttagagaatccacattgttatacacagtcgacaagtaatgctaatgctattgggtaatgaggaattaaattttgagaccctaaaaaatatataaaaaaaaatattaaaagaagagtattatgagattttaacccatgaccttgaacacattccaactaactaaattatgaatatttattacttatagtatatttaattttatttaaataaaagtctaataatttttttttaattttttttttattttgtaactcgaaaagtgtggacactaggcacggacctagcccgtctatacctagagctggccctgcaagcatgacacctagaagccctaggaggctaacccttaccaattaaaatatattactcataaattcacttaatttgtttctttaataaggttatatgaagtattatggtgatatttgactcatcatgttcccatatcaaacattgaccaattacaagtatttgaatctaatcaatttgaattgtcacctgagaggttttccaaaattaacaatcgccctaatattaacaatatttttgttgactatggtagtcaaagtctaaattaagctcgatcgtgctattctcacctacataattaagtttgctaacctttactatttatagagtatttggaacctaatcaattaacctctacttctaataataaacaatgttttatcacaatctctgcacaacaaatttgatgtgctagtgtaaacctcatcacatatagtaaacattttgcattcgaattggattatattatgtgcgatatttgcacaaaaatagtgttttgttttatagttacattggagaagacttgattacctttgcaaaagatttgactacttataatttgccccttaacccatctccaacccatatagaatctcatattgttaatatatagaaaaattaaaatatatataaaagttatgaattactcatcctattatcaattggttttgagataaaaccttaatacatcctacaatttttataagcttacattattttaatgttttcatctccaactcaatctcttaaaacatgtagctagtatttgaacacatcactccaccctgtatattaattaggttgttataatcacataatttaatgtttacaaacataaattaaacatcatgagctgtttattttaggtgacttagacataagttataataactatatatattgacttgtattgtagtacctacaaattaagtcgtagggcttgactgaggtgaagtttcttaaggtcccaaaacaataatgtggaaaacaatatcaaaggtttatttatggtccaataagcattaattaattcaatacttttgtcgatcagagggaatttatttcttccagatggatagagacgagagtgggagagttaacacacattgattatttgacaaggcataaataaatgagtgttcttcaatcttccttacgatcgaggttatcaaattttacaattataatatggagacagtagagaccttattctttgacttatacaaggagaaactctttttacaatcaggacatatattcataaagtaaagaaagaaagaaagaaaaaagaaaaagtgatcttgaaaaagatcatgcatgttaggtggttcagtcttaaactaaattttcctttagattatctttttcgttatatgtttatatgactaaatatatcatgcctcgattcttgtctagtcatttctcccctagctcttttttaatttttatatttttatctgtcaataattcactacaacaattaacgttattagaggcggatgagtccgctggtaaaaatccttaaatccgccggtattgggctttagcggcggggtccgccagtaataccccgtcgctattaatgattaatagcggcggac

SEQ ID NO: 44857 - DNA, 1720 bp, Cannabis sativa
ggtggaatcccaaaaacacatagtgaggacacgtacgatcccataagatacgtgtcattagtggaattggaaaatagacaactccgacaatgatttgcataatcaaattagaggaatgctgagttagaatgcgaggctatggctgcatgggctgcacgcggcgatgcacctccgaacaaaccaaacacatccactaggaaaccttgggagagacctaaaggcttaagaaccaagagacatgggaaaactcctagaggcgataaccacgcaaatcccacgaatccccatgatgacctaccacggaatacaagggatattctagttgacgaaggaggcccccaatgtcagggaaacaccggcaatagagaaactctacccaatgaactaggaacctcctgcagaaacacaactcgtgggaatgtgcaacctgacaacccagagtcgtctcgcatgaacgcagatgccaagcaaacacgacctaagaactaggggttcactcaacatgatgtgaggggtatgggaggatgacgcatgtcaggccgtctgccaagacactcatagagaccgaaccaaaatgatagagatagcacgtatacctactttagtaggggacgtgtgtcaaatctcttttgaagacgtaggcctatgcgaaaggaaccccaagaaataagatcaagtactggtcccaatgggttgaggtcaaggactcgtggtcagagtagatcgaccagaactcatgcacatgaaagacaaacacggagtggggaagatacaagtggccattatcacgatgaacaggagagcataagcgattctcagagttattaatctaaaagttactctacaataaggtcaatttgtaattacgaccaaatgattaaaaggcgacgcgaccctgatcttcgtgaacaattaattaaactttagacagcctgacttacatgagcatctgaactgtaatgttccagatctctaagattggctaaaccagaatacatctcgtgcagcaacaagtcgtgcacccaaccttggagcaaattaaactgagagtaattcagttggaagataagttcaagcgacgccaagatggggaatatgggaaattgaaaaggtatgatttagatgaggagacaaaaccttttcaccctaatatactcaattcccaattccctcaaggattcaagaatccacatgtcatgcaatatgatggaacaacctacatagttgcacatctaaagaatttcaacaatataatgcgagcaagcaatgtttccaacaacttgtgttgcatattatcccaaccacctcttactggggcagcgagcatctagtttgataaatttaccaatacctctattacctcatgggagcagttatccaatgaatttaagaaggaattccatgttgcgatttacaaaagattagaagcatcctcgttgacgaatataagcaacaactaggggagttgttaaaggcttatctaagtcatttcagtacaacaacagcaaaagtaagaaacttgaatgatagtatatttaattaacaactctccaggcgaattgagggatgatcttcagggtcgcctagttagaacaatcaatgaattaaatgacagagcattaggcttcgtgtgagaggaagaagcatagaactagataaaaacgcttatatcgggctcgggagataaacctagctcgattacaactactgtaagtactgt

SEQ ID NO: 44858 - DNA, 5344 bp, Cannabis sativa
aaaaaaaaaaaattttttcttttttttttttttttttttttaaatagaaggtgaacttcattaacttataatagtcaaattagctattatagaagaatgtacaacactaagaacgttgctgacattaaaagtgcaatcagtccaataacaagaaccgcaagcaagacaatggacggttttgttagcagatcgcgagacaaaagagacaaacacactaataaaacagtttaacaaatgtttacactcagaaattaacatactaaacactgaaggcatagaaacgaactagaaatagcttgaactgacacaagagaatcagttccaatattataccaatttttagccttgatccaactcaaagctccttaattccaaaagcttcaacagtggccgattgaacattaccagttttcagagcagtaaaagcttctaacaactgaccgtcactatctcgagccattactccaatgccataagaaccatatgttaaaacttgcaccattcacgttcaccttaattttattgacttctggtttggaccattgctcctccttgttttgcttggcaccgggcaccaacaagggatcaaatcgatgagattgagcgtaactccattgatcaaggactgagcgtgcactaataacaacttctgcagcagtacgtatttttctattccatagcaacttgtttctagcttttcaaatggaccaagctaccattgaaccttcctaaatcatgcatggccgtcctcgatgcaaaaaactctcaaaccagagggagaaatcaaagccaacaacaacagcactgatgttcacccctgttcgattccagcagctttgggcatactgacattcaagcagaacatggctgatcgattctacatgtatgtggcaaaaaacacacgaacctgggatattgacatgttttgattggagttgcaatcttgtaggcaaacaatgagtaagtgccttccacataaagtgcaaaactttagtagggaccttaattttctataatttttttccacacttcttcctccatatcagcactctaatttcatttgttgaattgtaaatatttgtaagtactttttaccgtatagaagcctgaattctcatgtttccaataatagttatcacctctccccgaattgataggagtgttcaaaataatggaaacatctctgctattgaacaaatctgtcaccaactcttcatcccaatcttctccatttaacagtattagttgcctcactttacattagtcaagagctggatgtgtacaagttacaaagggcttatcatcataagcaagccatggtgaattcaacacatccacatcacccaaaccaattctaatttttgcaccagcaagcagtaaagtctgagcttcatggatgcttctccatatgtagctcgggttggctccaagagaggcatttaacattcagcaattggggaagtatcttgccatgtacacacggcctactagagaatcctccccctgcagcaaatgccacacttgcttacctagcaatgataagttgtagtctttgaggttacggaagccaagacccccactacttttgtatcgacttaaacgactccatttgatccatgtaattcctcgagatcgttgggaggaagtcccccaccaatacttggacatcaatctttcaagcaaagtacaagtttcaataggtagaagaaaaacagacatatcataagacggtatggcttgaacaactgttttaagtaaaatctcacgaccagctttagatagaaatctgccctcccaacttaagattctttttccatcttctcttgaaggaaattttgaatagcttttttccttctacccaaaatacacggcagccccaaatagacactttgatcacttgcaggaaccattcccatccttgcacaaagtctgtcaagaaggtcaaatggtgtattagcactaaagaaaatggatgatttggccctattaacttgttgacctgatgccatctcaaacatatgtaacaaccgaagcacattatcagcttcattctccgttgcctgacaataaacgtaactatcattggcaaaaagcatgtgagaaatagttggcacaccattagcaaccttacaccctctaatgtgaccacttctttcaaacctctttatcaatgaagatagtccttccacaaaaataagaaacaagtaggggataaagagtccccttgccgaattcccctacttggaatgattggaccaatctcatgcccaccatgaatgaccatgtactggactgtagaaacagtagtaagaatcaagtcaataaaccggttatgaaaacccattgttctcatcatagccctcaaaaaacccctctcaatacgatcataggctttactaagatcgagtttcaaagccatatagccagtcttccctttccgttttcttttgaaatagtgtacgacttcataggaaaccatgatattatccgagattaattggctcagaataaaagccaattgattttcagaaagatttgggggagcatagtcttcaatctgttagccaacactttagaaataatcttatacaaaacattacataaagatattggcctcaaatcgcccatgatactaacatttttcttctttggaataagaataatattagtgcaatttagattgtcaggtaacacacctgaatcaaagaagttcttgacttgtaacaccacatcatgaccaaccacatcccaacatttttggtagaacctggtgtcattccatcaggccctcgagacttatctgggtgcatttggaacaatgcactttttatctcctcttcaagaaccggactcaacaagtccctattttgagaattagaaatcgaaggagagataccagcaacaacgacatcagtaagagaactagttgaagtgaataattcagagaaataagaaaggatggcatcttctaatccttaattccaatccacccagttacccaagtgattccgaagccttgtaatagcattgtttttcttacgcgatgtagccttggcgtggaacaacttactattcgaatctcttacacgaagccaaagttgtttcgatcgttgtttccaaaacacctcacgttgagtaagaacctcagccaatcttttttctgcaattttaaattctgccatagaagcatcatctcttaatctcttcaaccgcttaatatcacttttgcacctcttaatacggtctttgatgttccctgtgaattcatttccccaacttgtaagactatccccgcatcttttaatcttctttgtaattgaacctccagcattggcatcccatgaatcttgaatcacttgcacacacagacgctcctgaagccaagcgttctcgaatctaaactgacgaggagctgtagttacattctgattcaccaaatcgagcaacagaggacagtgatctgaacttgttatttctacattgataagctgggcagagttaaaaagattaatccaagaaggagtggccatagcacgatcaagacgaatttcgacccaattttcagacccacgaccccgttcccaagtaaaggatatccatgtagttctaaatcaacaggatggcaatcagagagagctttttggaacccttcaattaagccattaggataccagttacccccttttttatctgaatgatagacaatgttattcatatccccaattacacaccaaggaagtgaagattcatccgcaagcgtgcgaagcaaattccaggtcttatatctttgagaatggttaggttcactatacattcctgttaacctccatgtcttcttatctgcagtcgtaattctcacatcaatatgatagatagaataccccaacacttctaaatcattttggtttctccaaaggagactaacaccaccactatgacccctagcatccactgtaaacacaccttcaaaaccaagcatcacacgaattctttcaagagattcctttagacttattgtctcacaaaggaaaataaagttgggtttctttaaaaaattatttctatttgttatacactattttatcatattttatagaaaatgtatggtgtgttgctcctatacaattatccgactccagctaaatatatatatatatattcacactgatcaatatatatgactcacgtaaataccatgtcacaagatattacatatataatgtaagatctcggtttgatcgagtcaaaatcaaaagaaatatatatgtaaaaaaaaagcaaatagtcagacccttttccatcactcactcgccttcttcttcactcactctattttctctctcttcaaaacacaaaagaaaaacatacaaaccccatcaccgacagactccggcgacccatctccggccatcgcccagccccacgcaccggacaaaacaaaactccaggtgtcggtgacctaaccccctaagcggcgccactccttttgccgctgctagctcgggatcgcaagtcgaagtttggttgttcaaactttgaacagatttttcggtcacctccggtgtccgtttgatgggccgtcttcaccactaaactcagctcgacgaggagaacaaccaacactaaactatttcacctagctcgctagtttttctagtgatatttttgtagctctgcccctttctggcgacatcgtgtactgttttgacaaacggtcggcatgggtgtgatctactcgtcgaggtgattgttttgatatacactacccctattttcggcgatatttctggtacaccaatttttaccgccaccgatagttaatgtacaccgcttaggtgaggctttggaattccaaattttaaatatagtcaaattatatgttgttagactcggttttgaatgtagaatgcgatgataataattatttaaccatttagtggtataggtgagagtaatatctaagattggactaaacaattggagctcgggacttgagagcttaagatcgtcttttggacaaattttaacgacttgggagagaggtagggactcaacttgattattggacttcatttttagatgtgatgtataatattagacatattctaaatatttatgatttgcaaattatttaaaaaattgaaacttaatctgcatattttaatctagactgttctagggcactgagtgccaaatatatttttgtacaaatatttatggaggttataatttttgggttaattcaaaatacagccgttatgctgccgaattatctaaaaaataaaaaagaatatgttcttttgttattcttattaattgtctgctctggttatactgatgagag

SEQ ID NO: 44859 - DNA, 997 bp, Cannabis sativa
atgaacagcaccaagaaatcaaccttcactccatcatcatcatattcttctggactttccttcttttgtaaattgccagtcgccacagaaatagggtaaggctttggcagggacctaggaccgttaccatattgtggctgcaaaaataaaagaaaaaaagaagcctaagtaaatggatgacaaataactgaaaaataataaatacattcaaattgcaggaaacaattcaactaatctccagtgtgtagagccccaaagcctaagtttaaacgatgcagaaaagaataaattgttgaaagactgactttcagctacattgtccaaactttctttatgaacgcagttgaagccagaatagttattgaagaaatcataaaagtataattagaattttaaataaaatgcaacaacaaggtctttaaactagtatttccaccttagggcacccaccctcaccactaagctagtggctttaatagaagggaaggctgtcaaacacccatgtgaccatcctaattagctgaagttgactcaaaacaatcctctagcaagccacaacgaaatgaggaacaagccattaatcaagctataatcacacatttcatttactaggatatggttttatatctcctaataagtataggacacaagaggtgaggttcaagtccctcatgggtacctacacagcaattgctacagtttcttggtcctcaaatattgtagggctaactgctaagtggttatcctagtttcaacaaaacagaagtataggacacaagaagtactagccctatagaacaaaacctcttcaaggtggtttttatgcggtaactttagaatttattaaacatgttttttctttaaaaggattgtcaacagaaatatttcccaagttttacacacacattctagtcattaattaaaaagattgcaatcaagtcattatttttaaaaacaagtttagttaccttttaatactgattttcctttgtttgtc

SEQ ID NO: 44860 - DNA, 1541 bp, Cannabis sativa
ctctcaaacatatgccccaattgccaagttcaatactctcaaaaaaattttagctcttgctgcaatgtacaactggaatgtacaccagttagacatcaacaatgccttccttcatagagatctccatgaagaggtgtacatgaaaattcctccaggttataaggctcctcccaacactgtgtgcaaactaaacaagagcacttatggccttaaacatgcctctaagcaatggtttagtaaactaagtcacactctcatatcagatagtttttctcaattcctatctgacaattctatgttcatcaaaaaaactaataccatattcctagccatccttatatatgtggatggcataattgttgctagtattaatgatactgccatctctcatttcaaaacatacttacatgaaaaatttaaactcaaggaccttgggtccattcgtttctttcttggtcttgaagttggtcaaactaaacaaggtatttcgatttcccaaagacccaaacccttcacaattcaattacttaaagaaacagggtacataggagccaagcttgcttctactcctatggaaaccaatctaaagttaaggaaagataaagggaaccccctcccagaccccacagtttttagaagcctcattggcaaactaatatacttaacaataacaagacttgacatctcctacgctgtcaaccatttaagctaattcttaacttgtcatcgagttccacatctccatgctgctcatcacatcttacagtatttgaaaacaacccctggacaaaacctttacttcccatccaacaccactcctacaatatcagcctatgctaaaacaagtctatccccatcaaatgttcatatttccttttttttttatgctgattgggggacttaacactagaagatcgatctctggttacttccttttcctcggtaggtcccttgtgtcctggaaatcaaaaaaacattagacaatgtctcgatccgctactgaagcagattatcgagctatggcaaatgccacctctgagctcacttggatccttgctctcctcaaagactttagcgtcactcattctactctagccctgttttactgtgataacaccgcaactttcacattagtgagaatctagtctaccatgaacgcactaagcacgtagagattgactgccacttcatccaagagaaggtccaacaaggctccatcaaacttcttcacgtgtcttcacaaaacaaccttgctgacatattcaccaaagtattactgcctaatcattttttcaaaattgtatccaagatgagtttgattaacatctacactccaccttgaggggggctcttagatttcactttggttaagttagttaggactattttgttagttaaaacttttctgatatagttggttatttccaatcaactttttttgatgaaccgagtagctatataaactcagttctctcattgtaataatcacctgagtcataacaagagcttttactctgttactcattctctctctctctctc

SEQ ID NO: 44861 - DNA, 1687 bp, Cannabis sativa
catgcatatcaaacaattataaacaaaatataatatcttttctatattttctttccaccataccaaatatagtgtaaatttgtcatgattctcatttactcggatcaccttaaagaaatttccaaacaataaaagaaaataaaattaaaaatacaaacttgatttttttgtttttaatgtgaaataagtgtcaattcaatgtatggtattgtttcaataaatatcatgtgagtggattttgtgcttgaagccatttctagagcatcaattattgaatatcaaaagccccacactagaacaatggtattaattactaatactccattattattcaaattgaaaagaaaaagaaaagagaaaaatccaaagtggtgtgacatgtcacatatcccaatatgaatataatatgggaaatatactatcataaaatttatattgctaaagagtaatttaatattaaaatttatttattttgagatgaaatatcaacttcgttgaataatttagcattctgaatacaaaagatgtaagagttcaccagaaatagaaatataaaaaatgttacgatcagatgaaaatttatttattttactttaataaagattacatattttttttgagccccaaggtacaattaaaatagaaaaaaattatggtacacctttaaaaaattattttaatagatcatctatctgtttcaacattcaagaagatttttttatctaattttcaatgataatatatattataattcaaataattatttaccatacgtataaaaaaaaatagttacatatgcaataaaatatttaaactttatatttgatattataaactattcgaaatgttctaaaaatttatatgtaactctaaataattattacatacacaattataaagtatactatacactttatcatttataaatcactaccttataatattctagtactatagacttacccagtactgtattgggtaccataatacatatcattgttattgggcaccagtggtgcctagcaccttctagacgtgtcatattgcaattggttagcgatactctctaaaagctattatattaaattatatgaaactcaatatttaattacaccaataataatattgacacataaaatattaggcactactagtaccttctaacatttctccataatacataatacaatccttataaagagtattgctattagacactaatagtgcctagcacctttagacatgttaccttgtaattgattagtaatattccttaagttgacatttggttggaggtaacgaaatagatagaatgaaaaagaaataattttcattcaattcttttatttgattgcattttaaagtattagaatatcatcccaatagaatgatctttctatcattttagtaaaatgactattctattttaaaatagaagtaaagattattctaatgtaagatttaaaaaaatttaacaattttttttatgcattttaaattttattccattctattttattttctattctcattcctatttctatattttcatttctgtcaaccaaacgccgcttaaaattaattatattaaactataggagacttaatacttacttagatcaacatcaatattaacatataaaaatatacaacacaccacttatacacagggccggccctaggcata

SEQ ID NO: 44862 - DNA, 1305 bp, Cannabis sativa
agtcatcacctcaccttctctggcccgagaagttttgaaagacaacgacgtcgttttcgccaaccgcgacgtcccagtcgccggtcgtatcatcacctatggcggatacgacataacatggaccccgtacggtcccgaatggcgtatgctcagaaaagtctgcgttctcaagatgctcagcaacactaccttggactccgtctacgagctccggcgtcgggaggttcggaagacagtcgggtacttttacagtcgggtcgggtctccagtcggagttggggaacagatgtttctgaccattctgaatgtgattacgaatatgctttggggtgggtctgtggagggagaggagagagataagttgggttcggagtttcggcagattatttctgagataactgagcttctgggtaagcctaatgtgtctgatttttatccgggtctggctcggtttgatctgcaaggggtcggaaagcaaatgactaagctggctcttagatttgatatgatgttcgagaacttgattgctcaacggttgaaaggggttagtgagaggagagatttcttgcagtatctgttggagttgaaagaagaagttgattctaaaactccattgacaattatccaaatcaaagccttgcttacggtacacgacattacattgctatttttttgagactatgctcttttttaaaggaactaaattctcaagacttaaatgatcaaatttagaaactagttttcgaacaaaattatttttgctaatttactactttttttccctttcacgttgtcactttttcattttttgtagtgactcttgaataactttacaccaaaacaatctcaaaattcaaaatgacccaaacagtctcattctttgattttttttttttattatttttttttttacgtggtgaattgagtcacacatgattaactacgatcgacagcgcaacttcttcgaatcagaataacttattgtctaaccaaatgacatgttttaccacatcacgagctacagaaattttatcgcaagccacatgtgataaaactgttcctaaaaatttagacaataaagctatcatgtccttcctttctctaatttatttatgtgtatgatataaaatagtttgtatctgttctaaaaataattaaaaaataaataaataaattgacatctttattgtttatgagctgatgataatggctaaagaaaagagattttataagaaataaaatttgctagtttttcatgaatttaatatgttaagttagcagcttccatgacttttgtgaacagga

SEQ ID NO: 44863 - DNA, 5634 bp, Cannabis sativa
aatactcgaaagagtcaaggacagaaaaagaaattacatatttcttttaaaaaaaaaataacataccggttcatgtgacagctctgagatgtgcagaaggccttgttggccaccattgaactcaacaaatgcaccatattccttgatcgaagttacaacaccattataattcccgccaatttcaatctcacgcccgagtataaagtcaatctgggagaccatatgagttagcaaagacatgaaaaacaatggagagctaacacatcttcattattaccaaaggcattgcaacagtaaaagccaggcatactagacatcatattcaatgcttgcaaaaagcataccaaaatcatattgcaacatttgccaaaattgttagtttgcaatttctaaggaaacctattctttattatttactttttgaaaacaaatatattttcacagtgaataatttttttcaagctttgccattttgtaatacgtaataggttagggtaaatttttcttttgttctagttagtatatggtgcaatttcatataaaattctcaatttcagaaagcaaagtctcttctttcctgtcttgagagcactatcagaaaattaatttgtattcagttggtttagcaaacaagtccacagcccataagatgggatgagacagccataaatacattattttgcttggtcactctattacaacaagacaacaaagaaaaatataaataccttttctagtactttatccattatggtttgattcttagctacaacagtgagtgttccgtcacttacagcgatgcgtccacctaataaacatacaacaaaagtaatgatgtcaaataatgaaacagttattttttccatgttttaataaacaattaacagggaaaaactaacattagatatattatttttaaaaaaaaatagacattttaattcattaagcatttttcatcattataagctgtacgtcagacttttaatttgcagaacagctaaatgctacaatagtatttgatggcagatgaaaataaagaatatatggcaacatagtgtatcagtttgttgtcccccatatatagctgtagtcatggagaaaacattacataattaccgaagacaaacagcatcaagcatagaaaaagccccacaccatttctcatctgctagggccctacaactaccagaacagtattaaggcatactcatgattaaatcaaacctgtttcctcttcaatttttctctttaaagcaccaagaggtccaaccaagcgacgaagtgagtcattgccatacttcaaggtagctgcacaaaccatttaaaacaaagatcagcgataatattcactgaaacaatgtacgtagaagcacagcataagttcaaaagtcaacctaattgaggagaatttctatcttgggcacgaggtgcattgatctccctctccatatgatcaaggatttgaatacggcctttaagagcgtactctaagctctcacaaataatatccagtggaattccagcaggttttatatccaactgaattgctgtaactccttttcgggagccagcaactttgaagtccatgtctcccaagtgatcttctagaccctagacaaagtaagaaaataaaaaatgtgaaataacaaatataaaaatcacaacaaaaaccttattattatccttacaagaaaaataaaaatatcgactttgacaaaaccaaaagtcagcttagagggagagagggtgacagaggaacaaagtcaactgtagtcataaagcagaggaagacaatggaatgaaatttctaatggcttcagtaatctaaaacactcaatgcttgagagacatatagaccatattcagccaccatgtaacaagcatacacagacacaacaaaaaaaaatctcaccagaatgtcagtcactatacgataatcttttattgtgccagttgatggatcaacttcactaataaggcccacagagacaccagccacatgttcacgcagtgatatgccagcatccatcaaagccatactgcctaagcaaaagcacaaagttatgcattataaaataacaatgttctgatattgacacataacctcaagtcatcaagtaatgtgaatttaggttgaatgagttaatgatagccccatgcatatgtataaaacaaaccagaagccaaaaagtaccgatcatgaaaactcccctactcattttctgaatagggaagaagaaacaacaaagcaaccgaaaaaatagaaaattacttaattaagcacaagacagaatatgaaccaacagatactggcatactgcaacagaaaaatgaacataatacctccacatacagtggccattgatgttgaaccatcagatgccatgacttcagaattgatacgaacggtgtaagggaaatcctcttcaggaggcaagacagcaagtagagccttctccgcaagagttcctatgagcaaaaagaaaaaagaaaacaaccagaatcatcaattctacatgttaacaatcacaaaatgataaatctattcagaacgtaaatttaatatactgggtacaacttaatgaataataaagtaactatacacaaatgtcattagaaccaacatcattaatatgttagctggaacctcgtattagtaatccaaacaaagctgtttatgtggccatggatgtataaagtagcaacctgtttatgtggttcctactttccgtcaggaattgaaaacattacttcctgtactagatgtgtaaaaaaaaatattttgaaagatccacatctagattctttttgcttaaaatgtttcatacgtctaaaaattcatatagtctcaataattactaaattaaggttcataagaacaaaaatccaaaggcaatgtaagtctcaatgattaccatgaccaacttcacgcctgttcaagccacctcgtttaccaacttcattgatgcagaatggtggaaaactatagtgaagcatgaagcgctttgttgaaggaccaacaacagactccaagcgttgggcgtcagcaggtgcaccaagtgtgacagtgcaaagaacctatcaagcacgaaatatgaatgtaattagggtaaagaaaatcaaaccagaaacttcaagagccccagaaggatgtaaacctgagtatctccacgattgaaaagtgatgatccatgcaactgtggcaaattaccagcttcacaatacacaggcctaacctcatcaagatgtctcccatcaacccttcgcccatcgttaatgatccttttacgaacaatctgacatttttacagagcaaaaggttttaccaaccttcaagaattataaactcagctaaatattagttgtagaatataatctaaatacagaataacaagtgagtcagtcaatagcccccaagataaaaccataagcaatagcagttactaatgacatcgttcagcattggagttcccaaaagcataaggaaaaataaacatgggttaccagattctaatcttcagcttaccttcttccttactgtgtctactgtctttgataaaccttttaaactttcttcatcaccttcttcttcaagaactcttttaacatcttgtgtaatgttttctaaggcctctccacgttcaaactggatgaaagtccaccacaacataaacgtaaaaagaaagaaagaaaagaaatatcattcaagtctctacaaaagccccacaatgaattaattgatctactagaaagaaaaaaagaagaaagaagaagaaggagctctacaatagatgaatgttagaccttgtacaaaactatagacaatatgcacctttccatatgaaggatctgtaaatacagcttctataggagcttctgccaactcacggactctctccagcgttctatctgacagcattgacagtttatattccttcttatgtttacctgctttagcaacaagtctgacttgtggtccaagatatttaactgcctgcatgagcagatatcttagaagtttgattaataaaaaaagactgcatgatggtcaaatgtttctcgactaacctcaaggtgggcaaatcttaacccagcttctagatctttctcggatatctcacgagcttgcacatcaatcattaatgttttgtcctttgtacaggcataaactaagttgagatcacttaagcaaagctgcacatatcacataatttacaattagatgctacagaaagagcaaccaacttgtacaaaaacattcattcacacatgacatcaatgtttcaagcttaaaaaatggttgggagattttatgaacatggttaagcaatggccaacttttctaacaagcctaatgaaccacaatgatggtaaactgatcagatcccaaaaatagttcatcatgtacaaagttcaccaaagacaaggaaatatttgtattatgcacacctcatccattgttggattaacaattaactgtccttcaattcttcctactcgaatcattccaatgggaccaccccaggggatatctgacaacataagagcggcagacgttgcattggccgccatcacatcaggatcttgtttaccatcagaagacagaacacttgccataacctacaaaatcggtatcacaaaatttcaaaaaataaaaaaatcagggggagaaaacaattacacagaaagagaacttccagcagatattacgcatcaacaacattaacatacctgaacttcgtggtaaaatcctgacggaaacagaggacgtatcggtcgatcaatgagacgaccacataacaattcgcgttctttaggagcaccctcccttcgcatgaatgtgttaggaatcacaccttgagcgaattgtttctcttgataatcaaccttataacatatgaagcaaaaattgaccccaaaatgaaaacattctagataaaaataagccctgtaacaatgtcatgaacttgggacttgaaaagagtactaatgaattgactttttaaattttagagtaatataacgatgaagaaacaaacgattgaattgttcgaaaaaaaaatgactgaaaaccaagtaaacccactggcgcaatcaaccagaatgaattcacaaacaaattgaaaaggaagtcaatgaataatggattaccgtaagaggtaagaaatcacgaacatcatcgcctttggaggacgttacggttgataagactttagtctcttccacgcctaaaacgacggcaccattagcgaaacgagcaatctttcccgtctctaacataaataagcgtgatcctacttcgaattcttctttaaatgtctccagaaccttgactccggcgacggagggttcggtgttgatctgctccgattgggacgcgaagcctaggcggccgctgcaaattgtacggaacccaagcgttctccatgtgaggaaatgggggacgattttgaggagcgggttggcccgggttgctacggacgccatagctggaaggaaagagtgagaaggaggtttggaaaagggtttagggtttaagcgccagaaaaccagagagaaaaatgtggttttgcatagcaaaacgacatgacgtttttacttcatttttttaagtagaatttttttttttttttt

SEQ ID NO: 44864 - DNA, 900 bp, Cannabis sativa
aatttagtagatatcaaagttcagaaagtacaatttagtatatagacaatcatcgcattagtaaaatttaataaaattaaacaaaagtcttttaatctaattatttcaataatgtgaggagaatttttaaaagcttgaaaagttcgaaaatacataatttagtccatatcataatttacagaataaaaattctaattatcttaaaaaaaaaatataatctctattttgcttaatgggaatatataatctcaataaatctaattataaataaataaataatttgtaatatattgtttctgattttatataataaagtgctaacgacaaaattgatgaggaaaacgacaacaactataaaattgcacacgaaaaaaaaacaacaaaggtcagaaaaaagataaaatatttatttatgtttgaaaacgacattttctgaataaacgacaaattttaagtgaaacgacattgtatgaaaacgacaaaatcataggaaaacggcatcaagtataacacaacaaaatattgggaaaacgataaaatcacagagaacaatattttgtggatgttgtaatactaatgagttagatcaataaattgtgattaaaagtttaagttagatataaaacattgtgatttaaaaatgaataacatacacttccaagtcaaaaattaacaaattacttaaattattgggtttgttttcattaatttttcaacataaatacttaaattattaaatttgttattagagcaagtttaatggacgttatccttaaaataactgtcagaaaaaattcaaaattaatctaatgtgaaagaaagaaaaatctatcatatctattcattttagtcagtatggctactatccaaccacgatactcttttttttttttttttttt

SEQ ID NO: 44865 - DNA, 1787 bp, Cannabis sativa
aaaagatatttaaataatggcaaaattgaaacttgtgggctccacttatatggtcggccacttaagtcaattttaagctattatttgatcttttttaattccatacaatttaaatcctaaccgtagaaagaatcctataaatagataatgatagcctcttaatttaataacatacatcagactattctgccagataactgaaaataaagagcctctctcttggatttcgaattcctctctccttcttccatagaattttgagccctatagtgaagagtaccttccctacacaatttaagtcaattctcaatcatagtgtggaagattgtgaaaaatttcatcatctaaggagatccaggttcagatcttcgtaatactttgtgatagaaagaacaagggttagagatctgaatggaaggagtcataatattccgctgacaccaatgtaagagcatcaacaatggagagctataaatgtggtgtattgccattttttagaacattttgctaaaagttaactccaatggtgatgtaaaatttgtgtcaaatttggcctaagctaaaaattctgccaaatttagcataaaagatgcatgtgccaaattttaacccacaataaatgtcacatttttaattacctatttgccactaattaatactattcattaataagaaaacatttttatatttataaattattaaaataatataaataaagttaattgtttgtatattttcaatgagtattaatggtattattgacttttatagctaatttgcaccttgtgcattggagcacaaatacaaaaattgggccaaatataattttgtggtatatttgggaccaaatttaacctaaaatatacaccatccattggagatggtctagagttttctacaactttatatgtatttaatttcttgttttaggaaattcatgtttgagatgttagattatatattataatcaaacatacggttagtatatctggatcttggtaaaacaagttccaacacatagaagcaaaccagcgaggatgattgagagcagttttaagagacttaggttcagttggtaaaagagattcaagcaacttatgtcgagtagctaagtaagccttaggtttgtatatgcctctttaagatcttgtgaccatggaatgagcccttaaaggcactagtgaaataggagagacatcaccaggtgaagaactgggttcaccaactactgtggagtgatgttgattagatgttgaagcaccgatggtaggaacagagggagattcttaaacttcaggcacaagataaggtaaaggagaaccttttagtgacgtaaaaagactagaacttgagctatcaaaatcactatggatcacagaagtaggtgcaagcacaacattaggtgttgatgaagatgcagttgctggtgctagtgcagaactaggagctagcacagtagcaactgctggtgctggagcaatgtgctcaggtaaagtggttggtaaaacacaaggatgcacaggattagtagctgcagcattattagttgtagaaaattgaacagtaggaggaagataggattcaagaattacctgagatgaggttttgacttgagtggtagggttgacatgctcattaaacaccacattttgagctataaaatcctgccagcaaagttttcacacagatagcccttatgtttgggagaatagcccaagaatatacactcttcatatctgtacttagtttataatgattgtaaggtctcaaatgaggaaagcatacac

SEQ ID NO: 44866 - DNA, 2317 bp, Cannabis sativa
ccctcaaattcatgggattgtcactcccaaaccttgaattttaatttttaccctaatttaattatttttttctaattaaacaaaattaaaaaaaatccaaataaatatattgttgaccttatttttggtcaacgacacagagttaataaagtgacaatttaagtttttgaataattataataataataataatattgaagaacaataaatgacaatgacactgagatttatagagctttggtcccagatttggtaatgactaatgatctactctccttttattagtatttatttgagaaatcaagatcacaagaacaaggtcaagtgagctttttgacatctcttatgtaaggattacaagtaattttagtagagcaatgactcttgaaattaaaattcagaccctgaatagtgaaaataacccactatttatagggatgaatgtgtgagataattacatttaattacagaataaataattaaagattgattgagttaattcaacaatttcctcaactctccttgactctctcaatcccactcttttaggcatccaaattgacatattcttcaaggattgggcattgagaggaatcaggagctcatcttcgccatatcactagtcggtccatccgttcaagatgtcaccttatgagattacaatgacgtatcttcctgattcaagctagtcgaacgtctttggccgaatgagactattcgatcgattaacaactctgataggatgatttggattttctctaactgattcaacaattctaacatagtacgttgtacttctttatcttccatttaattcgttcaactcttaggtcgttatactccgactaactatataaatgaacgccacgtgtcactctccctaatttcacatcacttggaaaattttagggataacttttacctccaagtctgtgtaggaacgtcgggatgtacgaggacttctcagctttagtcgttgcacaactaatcaagatgtggaggctcccatgtggtttgccttacagagtatcatacctacctaaagcaaatcctcctcatgtcctttcaaatctcatgccataatgaattttactccgaaaaccgtgcattgggagaaatgatgaggcttttggacttttttgggaaaaaaataatcatatctaatttatttctccaaatactcttctcatactactataaatactccaaaatgtcttcttttcaaaattggcacttttaaatttctagagtaaaagagagaaacgttctacaagttcttgaagatttttcttggatcatacatagatttttcttagatcattcattgcatggaccaaatttttgaagttttcttcttcctaatgccaacccaaacaatgagtaagtctcttttctctcttttacatgatttttttacaaatttctatatttgtgctctgtgggaatcttttttggaatgaatgttcctcattctcgtttgtctgaaatcttgatttattatgttgattgatcataatttagtcaatgtcatctgttaaaagttgattccgtttgaattctttgcatgctttgcatttttaatcactctgttccaatttggggtatttttagcttttccaaaacctaaaaaaatcccttttcctcaaaaatttcaccaaaaagatgaaactttttgagccaaattcatgtttcctctctggtaggagtattgagagtgtttttcttggaaagacatttttcaagctattgggtgtttcacctttctatccttcctcttttgtagatgaacccaactaaattctggggaggttcttcagataaacaacgacatgctcgattttctctttgaggatcattcaacactctgagtagctagctcatccttatcttcgagtgagcctttgatttcctctgaatcttctgaggacgaatttattgggattttatgccctaaataaaactcatttcaatataatcttatcaatagaagattagaaatcatttagatttatatgtagtttttatgattctggttttaatatacaaattctattgaatcctaaacatattgtcgttcatgattatagtgttgtctacacagtataaaataatcatgactatatgtttcaaaccatttagtctcataatttatcagtgtattgtatttacattgacgtgataatcaatgataaagattacttatagagtgatatgtgggatgttttttctaagatattagcaaagtatactagtgtcagatgtattggctatacatcagactagaccgatattgacagtggaaaaaatatcataaact

SEQ ID NO: 44867 - DNA, 2534 bp, Cannabis sativa
  modified_base (78)..(80): a, c, t, g, unknown or other
  modified_base (948)..(953): a, c, t, g, unknown or other
agtttgagttctttcgtgtaatttatttttattcattataacattgttatagaatcggttctattttaattataactnnnttgagttattttatgttatttatatttattttttatgataaccggttatatttcaattataaccgatttgagttattagtttttattcatataactggttatatatgagacatttactttggtgacttttccaacgacgttgactattatgttgactttttcggcgacgttaacttttccgttgactttccagcgacttttccagtgaccatgatttttccggtgacgacgactttccagtgccgacgaattttccggcaaaacttattattgttttacaaatatgagatttttatgttttttttacaaaaatatgacataaaaaaacccacaaaatgtaaaaaataataaaaaaaaaatccataactctataatgtaatttttttatgccataaaaaagtaaactataccctcaattcctatatttatataaaaattcctttaataataataataataattaaagtgaagtaggtaataaaaacacttagtttgattagtgcaaggaacacataaatggcgaaaaaagcgtcgcaaatggaaaaagccaagtgacccatcatcatatatatccctagtgtaaatatatagtagctaattagggtagggatgttcgtctaattcaatatgtattattttatttatagtgtatttcatttacaccaagtacaaatttatattttgaatttaaattaatctgtagaataatttaaatccaattcagtcaaatctgtaaaagtgcagattgaatcggttactttttaatattaagtaatttaatattttttttttttttacataactaacaacaaaacaaaacaaattattattgttttatgtctctgacaacaaattaaaataaataaannnnnnaattcaaaagaagaaaaaaaaatgtatgtaaaaaaatatgtaattgtgttttaaattatattattcctatatataataataaaatataaatttaatctattaaatataattttttaaatgtatatataaatatgtaaattagattgcataagttacttttacacattaatgaacattcagtctgcacaagtgtaaattttaaattttttaatctaattcaatttataagagtgcaaatattcacactccacaaattaaattgaattaaatcgtacaaattgaattgaatcaaatattttataaacactcttagattagagcacacataattaaggtagtcgatctaagaaaaactgtatagtggtggaagagataatatccataatatatgactttgtttttatttttttaatatatatatgttcatctcatgaagtcgttatcaaaactatatttttacttcaacttacattaatttcgtgatcaccaaacaaattgaacaatttgtcggcattaagttataatgttggaaagggcaatcttattcttatatacataacccctatatacatattattaattattaaaccatttagccacatggccaaatgaattgccccttgataattatttactaataatattataattaagtggttattttactgaaaatattataagtgattgttcaaaaaaaaaagaacatataaattataattaagtaatattttttttatcttattaagaaaagaactattttacgtttaaatattatattatagaaaaatgctaaaatatatagtgatactttcacttttttattgtgatatcatatatggcattaagtattgagtctcatattatttaatataataattttttaaaaaattactaactaattacaatgcgctacctctagaaagtgttaggcaccactaatactaataacggtgctttatattatatatgtaattatcattactatatttttgcagaaatatatcgtaattactatcattaccatagataataggagtgttcaccaaaccacctataccacacaaactgtccccaccacactacattgtacaaaaatacaatttaaaatcttttgcggtgtggttggagtttgtgcttttgccaaatcgggcggtgcggtaggatttgtagttttgaatttaataatcgcgattcaaccgtaccgcattatatattacaaaaatacaaatttttacattaggatttctcttttcatatatgagcaactcatatacttacaaagtcctagccatataattaaaattaaagaacatccatataagttattcttatttttttttattttttctaacttcttattgttaacatattatcattgatatatatatatatgttgcctcagatttttcccaaaatacgtggccgcagttgcatgtggcacgtggatgtcaagagcacctcatccgcgaaattagctaagttatatatagacaagcaaagcaccttcagggagtgagcccccggagaagagcataaagcccgcctttattctccgggagctagagatacaacaaagcatct

SEQ ID NO: 44868 - DNA, 2164 bp, Cannabis sativa
gtttgatgaacacccctaataacatatatacatatcagaaaatttaaaaataccatcatttttctagatgaaaataaactcacaaaaattaaaaatcctaaattaaatttatatgaaacaactatagtgtccttatatatttctttatctttatatttatctttatatctttatattatatctattctatataaaatttgcctatataacaaaatttgaaaaattgttgggtgacttttcttgttaacgttttctattccgaataataataaataaaaattctatagtaactatttatagaataacaaggaaatcgtttggttgtatcagagcactatttacgaaattgtttgattgtatttaaaaaaacttattgaaggaaatcgatcattgataaatattgagttgaaaaaaaatcaaaggaaatcaactaaatgtggcgctatgactatccaaattgaagaacgattgtcgcttttcttgcaacaataatggtgaaactcagaggaaagaagaaattgaagccgcctagaacgagagcaattgtgaaactgaagctacccgaaaagataactgaccgaaagtggaagattttacaaatcagattgacaatccccaatccccactcaggtaagaaacaaaaaatgatataagaaatgccaaagcggtcatctgcggcaatccatgcttgatttgtcatgtggaccgaattttagggttgaaaattgatgtacccaaaacaaacgaggttcagaattttacaactcgatggagaccccaatttcaacgtgaaagtcccaccattgttaactatcctttggtgactttaggactttgggcataccgaggaagaagaagagattgactccgagcacgagtccaacccccaacccaattacatctctataattttttctgcctgaagtatattttttcagaacttttttattagtaggtgcttggtatgtaatattacaagtggatgcataacgatatatgttataaacattgagtttattaatttgtttgttttaaaattgatcatatctatcttgcattttaacgtatagctctgattatatgaatatcccactaagctctttgagtgagggtttgtttttgcaataaaactatatatgctcttggccgggtttaccgtgtttaagtttaataatgaaattttagaaactcgtatgttaattgttattttgtgggaattgggttggatatttatttactatctcaccttcggttgtgttgtgaaattcaactcttaaattattcagctatgtactttaaatctatatatatatcattcaaatttggatttgaacttttaatgtgtaattttattaacttggctttgttcttaagcaaacaaggatgaaaaaactttacttcgaaggttgctcttctacacagtaggcattttgacatccctttggaggtggtggtaaaagagccagttaaggatgatgatagagctgttctgctggaggaaggaaagctccaagcagcctctcctagagctcggatattgtcttcgtcatcttctattgtgaggtgtgttgagggaatttgtttttgaaaatcttgagtgtgtgaagtggttttcacattctgttatcttatgttgtttgtaaaaatttgcattaaacatcacattactttggtttttctttgcttgtttttcactccctcttattcatacataaagttgatttccatcttaccacagtaaaaaatttcttgaaattttatctttatgaagcgaactgcagccgtaatggtataagtaaaaaatactcttctttcccctaatggtcaagaatattgaaaagtaattcaagatagatgataaatatttacttactgaaagtaaagttctaatcattttattttaaaaattcttaatttcatactttcctctatttacttttggccattataaattataaatttggtatcacaataattgaacttagtaataacaccatggtttcgtacttgaagtgcattctacttctattgttaattatgcatacattatttttgctggatagtttatgaaagccattcatttacaattttataaatttctgcaatatacaaggtttgatattgttgtcaacttttagaaccattactttaatcaatgacaaaa

SEQ ID NO: 44869 - DNA, 3586 bp, Cannabis sativa
gttaccatatgagtgactcatttattctaagggaaatagttccatacctttcgaggttttaagaattttttctctagctaatcctttcgtcaaaggatcgactaagttttcatcaatgcgtacatgatccactcttactgctccattagagagaaactctccaacagtactatgtttacgatgtatctatcgtctcttactgttataataacgattctaaacttttacaataatcgtggtactatcacagtggatcaacacagctggtatcggtctttctcataaagggatctcagctaacaggcttctcaaccaacctacttcttcactagtgctatcatttcagagtccatggtggactatgctaaaatagtgctatcattgccaattagttttgagatggaaccccattcaccttatcccaaatcctaacatttttaatttttgtaagagtccaacattatttacaaactatctgcgtattatacttattaactctaaaaaatgtttaatttaaatatgtatgaataaaaaattaaattttgctataaatgaatgaaaatctattttatcataatatctaactcaattaaaaagaatttacattttcaattgcttttaattattacaaataactttatccgatgcgtccttacttttattatattatgattaatatttgtgctaatcacaaataaaagaaagattttgcataaatatattatataattttaaattattcataaaaaaaaagtttaaaaaggtattagacttgaaatttcattcgtaactaatttttttaaaaaaataaaatttataaaaaatatgaaaatcgcacgaagcgtagatctatttcttaatatatatatgtatatatatataaaggaaagcacaaagaaaatgaggtgacatctcatgtgaatttgcttttttttttcctcatttgtcacatttttttaatattttttatgcttttagtaatatgagagctattttcaaaaagtccaaaaaatcccacatggtttaaaaattattgtgggtgatatacttttacattatatatatcactattttttttgttttggtttgttctaaagttagtatttacaatcaagtatataaaatcctatagtgaaaccatacaaccaagtaaaatcctgtagtaaattaaaacagtcaaatggcaagagtttaaagaaaacttattcaactgcttcctgaaacaccatcagcattttttcaaattcagcttcttccaagttctccaattcctctctttattaaatgaattcggctataatagaaaaaagtagttagtataatatagattaacataattaaagatattgaaaagataaagaaaatggtacctaatgttgtagttttgtccagatggtagatgcacaagttctgagctaccatgaaactgtgaaagtaaaagagaagagtctatgtagctggcgtattcgaaagtaggacgacgtttgggagtttccactactatggccatcttagatgtgattgaatacatacaaacttttcatcatgaaaaatttgaatgggatcatgttatttccattcagagatttgtccttgtgtattatgggttataccaaacctgatttttaaaccgtttagagtttcatacactaaccccaaatactctaaatctactagcttgacccgggacccaataatcagagttttcattgttaagccaggagggaggggagttgtcattgttgagaataccttattctcaaaatcaaagacaatcaattgttgagtgggtgagagccaatacaaaaagcctttctcaaaaataggtggttggttaatgaattctatatttggaacaggggagatgactctccaaataactgatcctaaggtcagaatattagagaggttgtttgaatgatatcgttgaagtagaacaagtttgaaattctaattacctgattgcccgccaacacccaatttgaaggacaatttagattctcatgatgatggtgaggttgttggcagctctctaaggaaaagtactacccctttcaatggattgattatcaacgcccatagcaaagaagtccctaacagtaagaatttaagacaatcgattcttttcttttcatttcatcaagtgaattgatcagacgaaaaataaatacaccgccttcctcattcatccaatatatctcctcttcagatttacattttaaattttttagaagaaattttgaaacaagaaattctttgctaacttcgtcttcctccataatgaaattatgaaaaacaaaaacactttaagacaaccgattatttctttttcatttcatcaagtgaattgagacaaaaaatagatacatcatcttcctcgttcatcaagtatatctcctctttacatttatattttaaatttttttggaagaaattttgaaacaagaaattcattactagcttcgtcttcctccataatgaaattgtgaaaaacagaaagactttaagacaaccgattttttcttttttcatttcatcaagtgaattgaggcaaaaaataaatatgttgtcttcctcgtttatctagtatatctcctcttcacatttacacttcaaattttttagaagaaagtttgaaacattgctagcttcgtcttcctctataatgaatttatgaaaaacagaaagactttacgacaactgatttttttttttcatttcatcaaatgaattgagatgaaaaataaatacgtcgccttcctcattcatccaatttatctactcttcagattaaatttttaaattttttagaagaaattttgaaacaagaaattcattgttagcttcatctttctccataatgaaattatgaaaaacagttgactttaagacaaccgattctttttttttcatttcatcaagagaattgagactaaaaaataggtatgtcgcctttctcgtccatctagtatatctcctctttacagttatatttcaaattttttggaaaaaatttagaaacaagaaattcattgctagcttcgtttttctctataataacattataaaaaacagaaagattttacgacaacagatttttttttttcatttgatcaagtgattcgagacgaaaaatagatatgtcgccttcctcgttcatccagtatattttcttttcagatttacatttttaattgtttagaagaaattttgaaacaagaaattcatggctagcttcgtcttcttccataatgaaattatgaaaaacagaaagactttaagataacctattctgtttttttttttttcatttcatcaagtgaattgagacgaaaaaatagatacgtctcatttctcgttcatccagtatatctcctcttcacatttacattttaaattttttggtagaaattttgaaacaagaaattcattactagcttcgtcttcctccgtaatgaaattatgaaaaacagaaagactttaagataaccgattcttttatttttcatttcatcaagtgaatttagacaaaaaatagatacgtcgtattcctcgttcatccagtatatctcctcttcacatttac

SEQ ID NO: 44870 - DNA, 1962 bp, Cannabis sativa
agctagtgattttttgtctattctccgttcggtgattcctcgacaagatagacttatttggaactttccaaataacgagatttattcagtgaagagtggttattagagcacagttttgagtttggggtagggtcaatttgcaggatctacagggatgtctctcgttggtagaagattctttggcgtcttaaccttcagccaaagacaaaaaaattatttggaagacaagtttgaattttctaccagtttatgctaatttgatttgccatggtatgaaagtgtctaagatttgtccaatttgtttccaagataatgaaactactattcatgctctttgactttgtcattcgcttaagtgtatccagtaatgttggaccctgaaagggcttgactccttaaagaatgcttcttctttttatgaataattgttgggttgtgtagatattttgaataaaaaagaattggaggagttcattacccttagttggcaaatttacacagacgtaatatttttgttcatgaccacaaacttcttgctgacgatcatatggtcagtttttgggcaattaattacctttggagatatcagaacgtgggtggctttcatcccatgatactctttctgtgtaagggacgacaggtgtgtgcactgaaacaaatttagttttaggtgaggtgaacttatttgtggatatgttgagattcgtattgatgattgcaaaatggggatggggattgtggcgtctagtcctaatgggcatgttttcttcttggtgtattttcgagtgtggggtctcttgagcctcacgtgacggaggccaaggctttgctccacggtctctccttttgcctgcagctaggttatacgtctttcactgctttctcggattgcttgcgtttagttcttacggttaatagtcatgacactcattttaatgagtttggtattatacttaatgatattgtttatatttggaagtttttttactagtaattttatatcttattgtaaaaggtaatttttaagaattttattgcttatcttttagttaagaggactcttggtctagatcaatcatgtacctggacctttttatagatttagttgttaattttttctcttgtacttgactcttttctagttttgtatcttggaattatttcattaacaaaaaaaaaaagttttttttattttatttttctcccttcaaaaatattgacatatttttatgttattatgtgatgaccataatattaacatatttttatgttattatatgatgaccataatattaacatttattctatgataagattttatttattacatttgatacccccattgtctttttctctttatgttttttgtgacacaaattaattgtttgtttcctgagaaaaacctacccctgaagatctatatgttggcctcttaatattattcaactacatacagactaaaatatgatatatttcattacatatatattatatttgatgtaggcatgaaatgaagcactacaagtaaacaaaactttatatatatatatatgtgtgtgaaagatgaatattaaactataggcatatatatgtgtgaacaatgatatatgaatgggaaataaatagatattgaacatataaatagtgtagagaggatcgaatatctcatttttatgcatgcaaattctcattatatgcaaaataaaagaaaaatgaattagtgggttatggatcttctaagctctcactaaggatgcacatggaggaaggaattagtgaagagtgtttattttgtccttattctcattaagaattttaatcctcgtcttcgtttattctttatcgggaatgagacaggccaagaaatctcttaatggaagcgagaacagggcgaaaaatttcctaataaaaaataaaatttataataaaaatttaaacatataaaaatattaaactacataa

SEQ ID NO: 44871 - DNA, 826 bp, Cannabis sativa
tatattagcttaaatttgagaaaatctgtcaataatttatgaagtaaaaccattataacaaaaatatgtagtgcctacttcagcaactgtagaccataggataacaccagtgggtccacactcttagagcaataatattaggaagctcaacctcctcaaacacagagaagcagtttatacatggctgacaaattacatttcacaagcatcccgagtttcagtgttcctcctttttatttaagtgaaacataaaccaacttcattaacttactgattcagctgaacttccaaacttagtttcaatatcccccacggctaaattatccaaaattatttgcatgacattgaaaagcctacatcagaagaaattctacttaaaaattatttgacagttttcagaaagaaacatttacttcacaccaggcaggggaaatagttcagcgattcggcagttagagcattagcattatactatccctttttctccttttttttttttttgccatttgtattattaattatagccacaaaggtactaccttagatttagaggactcgataagcattggaaaaacccactgccttcttctgccttcactgcaagatatcaataatgcaacagttgaggagtctgaaagataattattgaatagcattgtttctgttaatggtcaaaaactgaatattttacaacagaaagatggcaaactacaaaattcacaagctaaagaaaagcatctaagaaacaaattaaatacatagaacaaacatttcttatttttggtaactaacatttcttaattgactgaactgatggaatcttagt

SEQ ID NO: 44872 - DNA, 1635 bp, Cannabis sativa
aaaatcaaaataatatttgccctaatataatattttgtttttttggcatttctcttttatattggtgttaattagttagttttgttgtctctaattatgaagagttttagcacttgctttctctaatggtgtatttggtaattggtagtgtggagagttttttttaaaaaaaaaacaaaaaaatattacatgttagatacacataacacataacatatcaatgaacaacttgaatatatttaaattccaaaccccacatcataggtaacaaatttttggttagagagtcatattaataatgtgtagaaaattttaaaatgaatgagttattttactcattgttaattaattttaaaatgaaatttcatacattttaccataatctcattctactttctcaattttattatctaattcaaatttaattattgagccaaaaaaaaaaatcacttataattcaaaattaatacatacaaaataacttaacttatgatgagaccgttcaaaattatcttttatttatttaatttgctactataaaataaactatattttgtaatcttatacttttgatcttttaattcataagttgataaaatgtccctttttctttttcaaagtgttttgttcaaaaagtgaaagattttattggcgttttgttttcattcttattaagacatttgggttgaaaataatgttctaaatgcagtcttaagtcttaattttgacataaaaagtaaaaagttaaaagttaaaaaaaaaaaaaaaacaaacatttttttttaatttttattttttaagtttattattattatttgttaggtgtcttaaattgacctggtattttggaaatggaccaccaaaaacctaatttatgttatataaacaaaaacaacattaaaattaaaataagatagacaccaaacaaacagccccactttcttttattattattattattattatttaataataataacttatttataaattttttataatgagttaaagagatcggaaatgatgcaaaggtcttccctttttcttttgtagaataatgagtttttttttttctttccctttttagtttttttttccctctctttttgttcttggcatgatggttaatgatataatgaacaactttggactctttggagctattaacttggacaaccatggctttggcataattattattattaatcttattttgccaaaattatgcacttaaatagtaaattagtataattttactgtattgtaggagtgaattttatcctgtaaaaaattgtattttgtttatctttatataattgttggatcataattagtttgatttaaccgttattaattattgaaaaataaaatttattaattttatgaatcactctactaataaattttaatcacgctactagggtttctctcacgtttctattcttttccctagtcgtcattgcatgggtgtcttccatttttccgaccaaggcttgtcgccccttcttagggcttaggtgtggctctagtcggagttgatgattctacatagatgggtattatgaatcactctactaataaattttaatcacgctactaggatttctctcccgtttctattcttttccctagtcg

SEQ ID NO: 44873 - DNA, 2569 bp, Cannabis sativa
tatttttataatgtgtggtgcagtgcgatttgaaccgcgtattaataattcaaaaccgtaaactgcaccgcaccacgcggtttaggaatattcaaactgcaaccgcaccgcgcggtttaggaaaaattcaaactgcgtccgcatcgtaaagaattcaaaactatattttttttgcagtgcggacgatttaagcggattaataaacaccctttctacacatatactttattaatttagaattttagagatggtgagtcaaaaagaaccaaataacactattatcttgagagaatgtaagaaaataagcaccacattaattgtgtatgaaaacttaattgataccattatttttcaattctaaagtcttatatatagggcgatattcattattaatattagaaaacagaaaaatatcaaaatattatttttatttttaatattaacttttttagtctaacatagtaataatttttacaattttacttacataatcgaatcgggacccagactcttactttggactcgaacataaacccatcccaccttagattggactcttgacccatcccacctctaatcgaactgtggccctagacccagatccaaactcagaagcaagttcgagtctgagtttgggttagaggtctgggtctaagtctggatccgaggtctgaatttgaattttagttcggccttccaagtccgatatgaaataagatgaattcatgtcatagtatgatgtaaaatattaatttttttaataaaaaaatttgaaaatatttttaaaaaactagagctacattattaaattattaaaatggctcgtattctattctcacttttaaaaatataattatgaaaattaaaaaacgggaacacatcccaccaccatacttcaaagttttttatttttttttataagaattgttattgggcactagtagtgcctagcactttctaaatgtattcttgcaattggctagtgatactttctaaaaattattaaattaaattatatgagactcaatacttaattgaaccaataacgatattaacacataaaaaattactaaataccaatattttgatatttctcttttcttatttaggataaattaatagtcaaaatattacaatagaacgatcaatgcttttattggagctaggtggtcagctttttcacactttgacgctgtgattttctctcacttattttcagattatattattattaggtattagtatattcaatatttttgatgggacacgattttatttcgtgatgtattttacgaaatatattttatgatatattagatgggtctcagattacattagatgggtctcagggtacgttaccattttttaactctaattactcctaaatcaactccagttctcagatcaaataaatctcaaatctaacagctgtcgtacatcacagaatacattccgtgaaagtatatcacgtcatatacctactatttatatgtattttagtaatatttttcaaaagcacttttttaagatatataagacttaatatttaattttacaacaacgataactgttcactagtccactcctaactctctcttatttgaatgcaaggtcacaaataaagaagatagaaaaacgtggatattataatcagtaaaaatatcttctagaaaagagatatatatatggctatccagcatataacactttcccatatttcaaagaaactattccatctaccgaccacgtacactatgatttcaaggtttttattttttttttaagaccatccattactcttttggaaacactataacaaaaaagttctattaatttgattttttcggtaatttttcggcaactatgccaattccgataagtaattccggcaactttctaagtgccaacaactactttactttagtgacttttcaggcatcgccagcaaactccggcaccagtaataacgccgataatcactgtaattttatttatttaatttttaaaaaatatatatatagaagaaattttaatattttttacagtaaataaatctcatatgttaaatttttattttaaataccatattttttctattaagtttctattcatatttatctaaactaattttattttttttcatatttacataaatatcatttttttttaacatcagatatgatatggaaccgagcccaaatttgagatattcaaccagaataaacaaaatatttttgggtaacgacccaaatatgagatttggttatgccaaaaagaaaaacaaatctcatgtgagagccacatcaccacgagtgatgatccgtttgaatctactaaaaaaaatagagtgagatggagagatagatgagagaaaaaaaatcatgaaaaagattaagaacatgataatgtgtttaggattcatttgtaaaaattacatttccaaattcatgggcttcaacccatttctcatttattatttttggttttcccgcgaactttgacatgtactaaatcatgctccctgaatttttttagtcgttaaaaattcccctgaactattaagattgtt

SEQ ID NO: 44874 - DNA, 1262 bp, Cannabis sativa
cgtaaccagtaactcataatattgggtaattagttgttaaaataaataattcaaaaagaacctggagtggaaagctataaattaagaattctaacaaaaattcataaatgtagtttttcttttccttaaattcccatattttttataacaaaaaaattgaaaaaaaaaaaaaagaaagaaactacaaatatatataattaatgtgtaatttcctctaatattagtcataagaattaaaatgtgttgtaagagaatacttttttaattagtctcattaaatcttatcactatatattataggttttaaataatactacattaataactacttgtgacaaattgattattagtcataataaaattttagttatatatttaaaaaagttgtgactaaagaaagaattgattatgtatttgaatgtttgatagatatatattcatagtatatataagctaattaatatgaatgtatgttgtaaagttaagttatatatatgccgacattcattcattcattcaaataatatctagcttacaaaatataataatatctcatcccactatatatactagctagtttattatatacttttaactttaattaattttatgatctcatccatcgatcacttttttgaaaaccttttgaaaaagttcataatatgttttcatgagcagttaagttgttttcatattgtactttgtggtaagagtcaataattatagttttttttccatgtaaattaattatttatatatatatatatgctcttttctcaaatcttttatattctcaccatatatgtattattatgtatatatagatatatccattttatttgtgtggtgatggtgctctttttcatgatcaatattcaattctaccgactttacgtccatgtgatatgtactttattattaatacatatatatctctccaagaatgaatctgaaaacttgctaatagtttagtgtggtttggcaaatttaaccactaaaagaaattaaaatgggattagttgttataatgactaagctggcatatttaattaaaaataataaaatagaatagaatacaaataaaataatttttattttatttttttatttaattgtatttaaaaatattagaatgttatttaaatagaagactatgactattctattttaaaatggaatgaatgaccttctccaatttccaatacaatataaaaaaaaaaaaaaaattaataattttttcgtcaatttttttgcattttaaa

SEQ ID NO: 44875 - DNA, 1752 bp, Cannabis sativa
aaaataaactaaaaatttcctttaaattccaaaataaataagaatttaccaaaataccttctatatcatatagtccaaaagaatggtatttatatcaaaaaattattactctaaagtcaagttctctttgactcatttgatcaagacctaatcagcggcaaaggtgccacgccatgtggggtgctgtggctattttatatattaaaaaataatataattatttcactcttttcaaaattttaattttattttctttttaaaataatgtaaaaaatattttttttcgttggtgaacaatgaacacattatatattttagaacatcatctataatgaaaaaataaaataaataaaattataagaataaaaattagaataagaatagaatggaattaaatttaaaatatatataaaaaaattaaaattgatagaaaattattaatattttttctttttcattagaatcattactccatctatttcaaaattaaagtcattttactaaaataataaaaaagttattttattagaatgatattttaacattttaaaatataacaaaacaaattagtagaataaaaattatttcctttctattattttatttcattattttcaattaaatgctatctaaaatcctaagagataggaaaataatattgataaagtacttgaaaggttccctatgcagaattccatgaaaagatagttgtcgatcagacatggaattactctttgcagagatcaatgtcctaagacatctcaagagcaagaggacataagaaagtatccatatacatctgttgtagtgagtttaatgtatgctatattatgtacaagacctgacatatgttatgcagtaggcattatcagttgttctcggtcaaatctaagttcggaacactagattacggtgaaacacattctcaagtatcttaggagaataaatgactatatgctagtatattcatatagcgaccttgaacctactggatacgctaattctgattttcaatcacacaaaaagatagtagaaaatctacttttggaacaatgttcactcttagtagtggtgtagttgtctagaggagcatcaagcaatccaacatagctcattcaactatggaagttggatatatatcaactttttgtgaagcagctaaagaagcagtttggttgaaaaaattctacacatatctagaagtagttccaaacataaagaaaccacttgttctttactatgacaacattggagcagtgactaattcaaaaaaaaccaagaagccacgaatggggaaagtaaatagagcgcaaatactatatggtcagagaaatcgtacatcaaggagatgtgtccattatgaaaatcacatcagagcacaactttgcagatccgtttacaaagacgcttctagcaaagcaatttgagggacatgtatgcaatatgggattgagaaaaatgcctcacttgctttaagtataagtaggagattgttagaagtgtgtcctaaaagcaagtaaagatatttattattttaatttgaataaaaaaatataatggtttattatttttatatttgaattgtttttttttttttttgagaagtatatttgaatggttaattattgattaaataatttatgtaaatatcaaaaaattacatattcattactgagaatgtgatcttgtattagtacaagagaattaaaatcacatgaatgaataaaataatcaacaactaattaaactttt

SEQ ID NO: 44876 - DNA, 1644 bp, Cannabis sativa
gttggttccaaattattatcttttttctcaggatcaactagtttatgagatgtcaaggtgcaattgccagattgcatgttgatcctgaaattgagaagacttgcagacaatacagaagaaggaaaagattggaaaaggtcggaatagatattgaacatgaagtagatatggctgacaataacaataatggcaacaatggtaacaatggaggtgctatagaagaccaggctagtggctgcaataacaatgaccgtagcctgagggactatttgctaccgaattgacaggggccagatcctgtataagaccacctaccattcatgctaacaactttgagattaagtcagccatactacagatggtccaatcttcagtcgagtttggggggctaccaatagaagactcaaacatgcatattgctaacttcgaagaactctgtcagacatttaaggtgaatggagttagtgacaacgccattagactgagtctattcccattctcattaagggacggagccaagagttggttggtgtcttcgctacccaattctatccaaacttaggaggaattggccctcaaattccttttcgatttccttcctcctgtgaatattgtaagttgagagctgaaatcaacaatttcacccaacatgacaacaaatctctttctgaagcctaggagagattcaaggactaattgaggaagtgccctagccatgggattgaaaagttgttgcaagtgcacaacttttaaaatggattagttagcaacacctaaatacttattgacgccgcagctggtggaacttttatgaagaaaagtgcgaatgaggccttcgaactacttgaagagatggaaatgactaaccaacaatggttaatagaaagaggccaatctataaaggttgcgggtatgcatgaagttgatagccgaagtggaggccttgagtaagttgatgattgctcatgcaaagcaagctcaagttacttgtgagatatgtgggggacctcacacttatgatacttgtccggtggctgtgaagaattttccaatggagcaagcccaagccattggaaactatcagaacaacaataatagtttcaaccaagggggtcatcgataaaatttccaatagtagtttccaaaccagcaacaacaagggttctcccaacaaagaaatcagtctcagcagagccaacagaatcaacaacaacaaggatctagtggagggtctaattctcagatagacacgctactacaattaatggcagagattaaatcttccattaaagtcttggaaactcagatggggcagttggctactcaaaatactaacaggactcaaggtaacttgcgtaggattactgaagttaatccaaaagagaactgtaatgcaattaccttgagaagttgtaagaactatgatgggccaagccaagacaagtcagaggatgaatacaatgatcaataagaactagtaccaacacaagagaagaagactattgacggtcttcaacaaaaagaaacttcatctcctatcagcattaatgataatatcaaaattccctatccccaaatacttcacaagaataagctggataagcaattttcaaaattccttgaaatattcaagaaactacatat

SEQ ID NO: 44877 - DNA, 1792 bp, Cannabis sativa
attagaaagctcaccatgcagagataaggtctaaaatcacgatgatcctccttaaccagagtttgaaattccttcaaaccttcttccaatgccccctgatgagacaaaaattttgtaacacaaattaacagttgctcaagcaactagaactacttaaacctgacataatctttcatatgagtaaacaacataccattaccatcaattcaagttaaagaatagaaagatcacaagtctttccaatccgaactcacccttacaacatgcatttgtgcaatcagaattctgatgtttctctcctcggtaacctttttttcacgccgagctaattctaaagccttattcagcatctcaaacactgctggaccttcatgatttttgtgcatcactaatgctagaccctgttgaacacaattattaagtttttcagcaatgacaatttggttggatagaacaactattttgctatcagcccaaaaccatcaatgacactttaagtaacaagagtaaattttatacatataggcaacaacaaagtatatagtaattgcaacttcactaatccattaacaatcagcaagctcatttcatcaacaaagactgaatttttaaagtggcaaactatatgtacaatcaactttatatacaatccaaatacataagagcaacatttataacttttaactagagagttgcaaccaataatgaaatcataaaagagagagaaaagaccaagaatcgtacatgcaaagctctaagcaagagaggcctctgtttcaagatttccttgagcaatcgttttgctgtactcaatttccccattgtctcataagaaagtgccagcaaaagcttccattcaacttcctgtggttccaactcaaccaacctctccacatatttaacagcctcctttgtgtcccctctcctcattttctcatacaaaaccaccattaaagcttcagtattattcggctccttcttcaaaacctcctggtaaaactcttccttttcaatttcttcactttgggtactactagagctggtcgtttgagcaggtaataaagccaaagctggtctcatactaaaaaacccaataaagaaagccgccccaactacaaaccccacaattttttccaggagaaatcgatgaaaattatccttgggtgggagaaaacagctcaagtctgacccatttgagaaatgggtcttgactcttgatgggtttgtagaaattcggagtataaatggtttttgtatgtggggtttagggaaggagggtttaagagacttgaaatcaagcttaggattagaaaagagcttgggactagaaaagatggtagtgtgagagcaaagagataaagcagtggaaaaccccataatggatttcaattttcaattcaattattattcagtgttcacccatttgagaagtaaaagctaaggctttgccggttttatgacgaaggagacgaagaacagaagagcaacggcgactatggtaggcacactgtgagaggaaattcgcctttaatttttacaccatcttttaaaatctaattatgtttacttaaattttatttataatttaaatttttttaaaaataccttattttaataatttttattttatatccttcaaaaaataatttttattttatataaaatttataattttaattatattaagtttttttagtatttttattttagttcatattcttaaaaaaatatacctatcaagtaaaattaaattatatttaaaatattatgactaaaaaattaaaataaaaaa

SEQ ID NO: 44878 - DNA, 3147 bp, Cannabis sativa
tatgggtttgagttcgggtatcggttttgggtttaatttttggttcgagtgtgggttcgggttttgtcctggtaaggcttcgtgtctcggttcctgacctcgtttgggtccgaggtaggtttcgggtcccgatctacgtgtgacttcggattcctgggtccaggatagaacctggttcgggtttgagtcccggatttagatctagatctgtgttccagagctttggtcccttgtctagatcccccatccaagtctgattcctaggtcctggtctgggtccaggttcgggttcgggtcctgagtcttggtattagtccaggtcccggtctaggtttgggtctaggtctcggtcccaatcttagtccgagttaaggtttgggtccttgtcagggtctagatccttgtctcgctcgcgggtcttaggtctcggcgagggtttaggatcaggtcccagttcgggtctcggtcaaggttcgggtcctaggtgtcaggtccctgtcctagtcaagctctcggcccaggttctggtcctagtgttagttatggtttgggttcagttcttgtttgaagtccaggtcctagtcacagttctaattcttattctgggtctgggtttggttccgggtcccgttatgggtccaggttggtgtcggggtccaattcttagtccgagtctgggtacgggttttttggatcccggtttggatctaagtttgagtctgggtccgggtccaggttcaggtcttgggtctgggtcttaggttcgggtctgggtttgcgtctgggtccgggtctaggtcctgtgtttcgatcccagtcttggtctgggtcttggtcgcaattcggtccaggtctgggttcgtgtccatgtttaggttcgaatcccagtttatgtcaggggctttgtgtgggtccgggatcgagtctcaagtttgggtttgggttcaagttcgagtctcaatcctagtcttggtgcgggaccgggtctaggactgggtccgagccctagttccggggctgtgttctggtctagttctatgtcccggcccaggtccaggtccaggtcgtggtcacgatcccaatcctgttctagggtcctagtcacgttatgtttcattttttggtttcaggtcccaggtctaggtctgggtctaggtcctggtctagcttttggtccttcttcgagttccagatcaagacactaactatgggtcttgtccaagccccagttctgggatcccaggtctcaatcttgggtccaggtttgagtctccaatccttgtccttgtcttgggtccgagtcagggtccaagtccttgtctgggtttgggttcgtgtcctaagtcccgatcagagtattgatttgggtctgcatcctagattccagttcctagacttaaacccagactcagactcggacccaggtctgggttacggatttgggtctgggtcagggtctaggtctgagtccgagtcttggtttgagagtccgggtatggatcccagatcctaacactaactacgggtcaggtccaagccctgggtcaaaatctggttcacggtctcgggtccctgtctagttgcacttcgggtcccaagacccagtttggatcctaggtcaaggtctaggtcaaggacccagtcggggttcaagtccttattcgagttcgggtttgggttcacatatcagtctgggtccaaatctgggttcgagtctaggtcgagtccaagtcccgagttccgatttggctctgggttctgaggcccaattccaggtccctcatctaggtctgagtctaaggtcccagtctgggtccatgttcaggtttgggtccaagtcccagtttgtattttgattcagtgttggggttcgagtttgggtctgggtctgggttagggtctgattcctggtctgagtctagactcgggtctgggtccaggtctggatctcggtctggttcttggtttgggtctaggtctgagtttgggtatcgggtctgggtttgagtcctagtctgagtttggttcgggtctagatctcggtctaggtccagattaggctctgggtgtgggttagggtcatgagtctgggtccaggttggggtctaagtccgaggttttgatcgtgatgtgagtccgtgtttagttctgggtctaagtcttgggtttcgatcccgatctgggttcgagttcgggtccagtgcaggtccatgtttgggtttgattctgggtctggttcttattttgggtcccaagttcgggtttggtcctaacatgggttcgagtccaggttcatgtcgtggttcgggtccggggcaggtttcgggtccgggtttgggtccgacttcggattcccaggtcaaggtcaagtctaggttcagttttgagtcttggatttagatctgggtttgggtttcagcgcctaggtctttggtctaggtcccccatccaagtttagttcgtaggtcctggtctggatccaggttcgggttcgagtcccgagtcttggtttagtctaggtcccggtccgtgttgaagtctaggtctatatcccagtcttcgtctgggttgaggttcgggtccttgtcagggtttggatcctggtctgggttgctggtctcaggactcggtgagggtttaagaccaggtcaggtctaggtcgcggtccaggttcaggtcctaggtctcaggtctcagtgctagtcaaggtctcggtctaggttctagtctgagtttgggttatggtttgggtttggttctggtcttaggtccgggtcctagtaacagttcaagttctaattcccggttcgggtttggttcagggtctgggtttgggaccaggttggggtcggggtccgattcttattccaagtctaggtgcgggcttttcagatctcaatctgggtccaggtcttagtcaaggcccaagtttgggtcctgggtctgggtctgagttagggttcgggtcctgatttgggtccggggcgatgtttaggtttgggtttcggtctcaggtagggtttgtggttgggtccgattccaggtttgggtccgggtgcacatctcgatccctttcaaagatctcagtctggttcaagttcaagtttcggttttggttcctaattgtggttttgggtctttgtatgt

SEQ ID NO: 44879 - DNA, 1252 bp, Cannabis sativa
  modified_base (94)..(95): a, c, t, g, unknown or other
ccgaaattgagaaattataactctaatatttatttctaaatatttgggtccacgaataattaatgcataaataattataaaataacagaaattnntgctaattgccttttctaatccaatttactaaagcggtcattacaattcatgaggtcacttgtccaagccaatgaagagggtcactcgaccatgcttggtcctactcactcggccatgataattcaagaggtcacttggtcaagatgaccttgaagtcagccaatgaaaacggtcactcaaccatgcttagccttaggtcactcggccatgaccattgaacagtccctcggccaagccaatgaagaggctcactcggccatgcatggccctaagtcacttggtcatgaccattcaagaggttactcgaccaagatgaccttgaagtcactcggctatgcttggccctaagtcactcaaccaagctaagggagaatgtcacttgaccatgaggataacatgcaccactagaccatgagagtggtgaggccactcgaccaagagaatgacaaggccactcagccatgaaaaggccaaggtgtaacgtcttaacccatagggatgccatatgtgtgttattataattagtttataataataaactaattaaaaaaatgtgatttaattaaaatttaatttaattattcgaaatataaaatcagttcttgccactatacaataattagggtcggagatcccctttaaaatgtttacaaagattccattaaaatttatacaaccaaataatcattcctttcagagttaccataaccagaaccctgactactcaatcctgtccattggataagctgatatgtacatttgtcgaaaaagacctctaactcatgactgacctagctcaatccttttcttacctgcaccacaaagcacccgtgagtcacaaagactcaacaaaaaaagcaaaagcatacacaatacataacaactgttgacctcttttttagttagcgacagtgagtcaattaataagcaattagaaatgtaattaagatagagcaaaaattagtaagcaataaagaacacaatattttagagaggttcgacctctttagtttggtaatagcctactcgccttagaatgtattgacttgagaacaatgaacacaatgtttcctctctttaagctctcacaataaaatctctgagtactttctcttagatctctctctaaagcaattcttttgtttcttatcacagt

SEQ ID NO: 44880 - DNA, 1316 bp, Cannabis sativa
tctcatttaataaagtatttctaaaatatttatcatctaaatttataatatagtttggcccccctaatttttcatcctggctccgctcctgattgcacgtaacatcaacctatgtatctttttcaatacgttttattaaaaatatatatatttctttttgatagaaatatatatttatatatatatgtatatgtatatgcataattataaaatactgtgtatttctttttagactgaacatttaaaatattactatacttgagcaaacaacatatatatatatattaaaaaatacgtttttataaagaatgatagaatatttttgatccaagaattaattatttacaaatatatatatataaataattaacttaacaaaataattatattgtcttaatcactttttatatccacacttaactttttttttctatggcgtaatagtcaattgtgaatctattttttattttaacaaataaaaggaaagaaattaaaaattcacatcaagctcacttatgcaaagcaagtcaacacacctaccggtactagtaccaccaaactgtataatgtatatttaagcttcgcaggaaggatcataattatttttataaaacataatgcaaaataattcccttaaaaaaagaaaaaaaaaatagaataacctaaatacacagaacctaataatatgcatgtggttccacaaatgataaatactcaccgacgcgcttatttttctgttctctatatctagctatagcttggaataaccattcataccttacataataacaaaattttaatagttatttcaacctccaaacccataattaaccaaaccccaataataaaaaaataaaataaaaaaaaacccaacacgtattattgcaaatcgaaccattctttcaattctatctccacaataccacacatcccaatccctggcctcctccaaatatagttatcactaataatcttccgagaaaatgcgtgcacgtaaagttgatcaactcaatcaactcagggccatattcacaaggtttgacatggacgccgacggcagcctaaccatcctcgagcttgccgctctgctccgatcccttggcctaaagccctccggcgatcaaatacacacgcttctctccaatgtggactccaacggaaatggagccattgagtttgaggagttggtcagcgctataatgcccgatgatgatcatctcagcgacgagattttggtcaaccaggaccaactcatggaggtttttcggtcgtttgatcgagacggtaacggatacataacggcggctgaactggct

SEQ ID NO: 44881 - DNA, 2469 bp, Cannabis sativa
tactacaagaaaagccaaataaagagatactattttagtttctcacccaataactatgagaatcgttcataaatgatttaataaaattgtcataataagtcatctatttgtcacactcttgttagtcgttttttgtttaaaaaaatcccaatcaaataaagaaagatctatatgtgtgagtgtgacaatgtacaaaacaaaagcatgtgtagtgttattttactaatggaatgtgtagatttatatgttgaataatttatttagattgttaattagatactttgtacatattcacatgtatttcgattcaatttttttatagacacaaacaactcttctcttatctttggctgtccaggacccagacaaagtctactcaaggccaagtttgaccttcttacaattacccatttgtcgggctccactaacaaggtttccctattctattcattcattaataatacaaatctataatttaaggaatagaagatttcactatatttttattttttaccacttgagttataaaattcacagaagattaaattcatatagaagctactcaaaccagagtccacaaaagtaggtaagaaaatatgatatcttttgtactaaggcattgctattgctattagctaaggatgcatatttttcttatgggatagcccgcgaagaccagcccttaatagagttgagaaaattaataaaatacaaaaagaaatttaaaagagaaaattatagattttatggaattttatgctatttgtaaaaaaaatattttataaaaaaaaaatgtaatcaatggataatcatgtacctctagagtaaccaactagttatcttatattgtttttctcgtatttttttaatatttttataaaaaaatttcataaaataacttatttaattttttataataaattatatttttacaaacttatactttaaaacccataaaaataaaaatatatagatatatcaagataaaacttaaaatattattttcatatgattgaaaaaaaattaagggagagcacatgactatttcctttacttcacactatatagaggtgtttggtactagatatttaaaataatttgattaaatgaaataataaaataaaaaatatgattattttgaaacttatactgagtgtttggttatgcataggaatatttactatttagttaaattattattaattgaattattttattgggttgaacgcaataatctgatacattgtttaaaaaaaaatacgtaaaatattaatatgttaaatccatagtattaagattaaaggtaatgtttggaatccacttttttttcttaaaaagatttaagattatcctataagagaggttaatcttgttggagattttattacaataaaagaaaatcaagatacattataactttgttgtaaagtaatacaatgcttaaaataagagattgattaaaaatatattacaacacacatatatacactatatatattgcatatatatatatgaaaggtagaagaagaagattacaacacatataatataatacatatatatatataataagagaagaatatatatatgtatatacactcactcagtgtacattagtggagatcatcatgacttgaacaaggtattacacctttgtcataaagcttattttccctatctctaagcaagctttgagaattatcaagccttaggattttctagcaatgtgcttttttgatagaaaatttctcatccaaataagcatattagacctctttatatagtgtttaaaatatcacaatttgaaattcaaactcataaccctcatagctgttatggactcaaatataaatcatgcatacaccataactcctatagctttaataatttcaaattaagatgtgtaatatctttttacacacttaatattaatgataatggtagagattactcgtagtaacaagtaactcccccaaatgttacaaaaagataacaactaatatatattgtcatatgttacatattattagtttattacacatatttaatatatatattattattataaataacataacaatcccccactagattaaatattatctctttagtaacaaatttataacttttgtaacatttatttaatcaataaaaaatattatatcaaaatataacattcccccactttgattgactaaatgcacactttcaaagaagtcttgcttatgtgcattaagtaaaatgaatttcgacttgaattttaccttagtgtaattaccacaaagttaatgaaattttggctgtcgtagcaatgaaccactattcctttagtacaaactggtgataacacacacactcttgctaatactcacttgagattgcatgtctagctcttgcaccattaatggctgtgaaaaattctaattcatggactttctagagaatactcccaattcttataagaggcgg

SEQ ID NO: 44882 - DNA, 2908 bp, Cannabis sativa
atcttgaatagtctgactccatcatttctgccatatacatcaaattatgtcatgaataaaaaggacatagacttgcatgtgtttgccaactttcgtacgtgttggctagcctttgtacgaatttccttacaaatggcaagcttccttggtcgaacaggcccacttgagtctgaaaatcacctttttggacgggcagcttatgctcaaatcctggccgtccatacatgctcctcctggctagccaatttacaacctttggccagctagacatggttgcgcaactccttgaaggcttgattaactcctctctcttgttgcttaacgatttgttatgccttgtaaggagactttgtcctgctaatgataaggttgtattctacgtgtccccactcttggcttacgtggacctaccatgtcaggtggacaaaatttgagataacaatacacaacaagatcaacaaaatttagaagttctacttgaaattaataccatagattgattagaaatccaatctcgagcaaaactcctcaattttccacagttttcatgcattttttagttgaaatctccatcagacctgatcggcctaataccgagtcgcccacctacctattaacccagttcaaggttgaagataccctttcccaccaaagcccacttccggtggtggcgcgtgggggtgtgtgcagctcctcctggcgtcatttttcaacgaattttttttagcatccttagaatttaatttataatttttctatgatttttaattaattttttttaactttgtttaacagtaattattattaatttaatgataattaggaagttaaaaaaattattaaaaataatttttgatgattttttgaaatctgtaaatcatagaaaagtttttggtttcttctcattctctttggcatagtcactctcttattttgatttatcttcactatgtattctccaccaatattcttactttcacatctttccattagtttttgttctaaacttgtaaagcttgattgtttgatgaaaaaaataatatgttattgtggatattttatttttgattatcaatctattacaagcaattaatatatgtctttttgaaattcggctgaaaattattaaattttcaatgattattttatcactaaatttcatatgtggtagaaaatattatttcttttagttaatattttcttcccaagtccctttttgtatgtcttgtcgaatagggactttccatctatcatcttgcttgtagtagcctctatcgagcagccttgtccagccaagtattggctttttgcattgcattcttttggatctttgatcttctctctccatatatgtctcatcttcttctttgaatatgctattgataagtttcaagctttttaagcttttaaaaactttttaatgctcacattagattgtagtcttttgggtatttttatctgcgtgatagttttaaaatgcataatgtgtgattttttgatgacaaagatggccttaattgtgattcttgattgtttgagtcatgaagaacatgaagaacacattcgaggtttgagaaacacattttgatccaatactaacctagctcgccctaggggtcttatctgagacttggccagccctaggatttaatcatgggagttcgctagttccaagtgggttcatgcctgtgcttggtgaccttggtcggttcttggttgggtcgtggcaccctggccgaccatcttaaaccttgggaaacctggccggcctaggccttggttataagtagatggccaattttctatcctcttttaacctcagcaagaatcctgtcatggccttgaaggcatatacaaccttagtctcatacgtggtttccttaaaaactctatatgaaacttaatggtttgtctattatagctgaatgctcaacttaagacccaatatttgtccaagttgttacacatgagactatacctcttgatacccagccttgtacaatgatattatctggaaagtacccttaggtacggttgcgtagaattttatcttgctggaacctgcaaggaactctaccatttggcttggaacctgccaggaactctgtcttgctttagagatttatcccgatacgtggttcttataggaaatttgtctggttcttctctggttgtatggttctcgttgggcctcaacctttttcttttgaactgaatttttattcatatttggcgttgaggctttcatgtggttgcttttgccctttaggaactctattttcgaacactactattgattagtcttaaagccttttacttatgaatatatgactattcaggctatcttcttattgccttgacatgtaagtattcatatttacttttctttatgccaagttgaagtatgtctacaattgacttagaggcaagtttagtagcttatactaagcgttaaaaacactctgcataagttctctatgctaatttgatgcattgtacggtatgggtgccccccaagtgaccacacagacttacagtctcttggttacttacaattcaccaagtttcatagaccttggtacgaaatttttttgggggtgctactgtgtgtttgcatatggaactgaaagagaataactttaagaaattaatcttgtgagcatgttgtttagatacaattggtcttacatgtaacaaaagcttataacttaatgtctgcttttgaaatcaaattttggctaccctgcctaagatgtcaagcaaaggccatcgttgaagggtgataggatgccatgctaaaaagcaataggtactaactcttttatatttggctacctctgcatggcttaatgggtaaaggccatcactaaagagtgatgagaggccatcgccaaagggctgtaatgac

SEQ ID NO: 44883 - DNA, 1648 bp, Cannabis sativa
aaaaaaacaaaataaaaatgtcatttttatgggtgccatcggacccctatcgggtctccatccgaccccatcagattcggtcaaaaaactaagaaagtcaacctctacggggtgccatcggacccccatcggatttgaccaaaaaccgaaaaaaaaacaacctccacgtgggtgcatcggacccccatcggggtcccatcagaccccatcagacccgggccaaaaaacttaaaaaaaaaaaaaaaaaagaattttaggggtgccatcggacccctatctggtccccatcggacttggccccaaaaaaacccaaaaaatcacaattttcagtcaccatcggaccccatcgggtcttcactcctgccaacaatttttcccttacatcgggcccccatcgggccagcatcggaccccatcgagcccgacaaaaaaaaaaatgcagaaaactaaaaaatccagttttcacaggcaacaaacgtaacaacagcaaaataacagcaacaatccacagatcaagcatcaaaacaacattctaaactaaatataataacaacaaacaagattacactaacaaaaaaaatttacctattgcttgcatatgtgtgtccgtgtatgatgctccctccaaatttttgttgtagtgtagtagattatattgtaatgaagttaaaaaaatgagtagagaatgagtgaggagaaaaaaaaatgggataggctcgtgaagaagagagaagaagagagatgggaggggtaatgtaaatgggggtaaaattgggttttaggaaatttatcccattttacaaattatgtatagtattaagttagggaaccaattttgatatttattaagtatagaatttcaaatttccctttccctatttgttactaagtagggggcttgagtcccatacattcccctacacgtgcattgggtccacacattcaatcctatataatccctaacatatatcattttgactagctacacacactcataaacttgtattgataattacgtaactgcttacgatttttatatattcattcttctaatataattgttgtttaagtagtggaaatataaataatggttttccagtgattaattctaatatttgtaacttattacgtaattgcttacgacttatatatacatgtatattttatcttccaaaaaaatattcttaattatttatagtcactaaaatgttcttcaaaaagttgactatacaaaagcagctattgtaattaacgtgtgcgtttgattttaatgtcaatgttttgaatttaaaaatgaaagaaaaaaaaaaagtgaattgattaagttttctttctcaacaataaatttatttttcagtcaatgcaaaatttaggatacaatattatttttgggataatttcaaaaaaatacaaaaacagcaaaaaaaaaaaattataaaaatactgtctacacagaatttttaacatttttatggttttttaaattttatttatataaaatacaattttttagtgtattcttctgatgtacttctattattttattgttaatttttgtattatttataaattttttatattattttgatgttgttttcttgatactttcatgttatttttttgtaaaatattgtaaaaaaaaaaaaaa

SEQ ID NO: 44884 - DNA, 2388 bp, Cannabis sativa
aatcccaaattaaattgtacacttattttacttttatttttatattcttttaagatatactagtgatgtttttattatactctttaagttaatgtaagttatgtgctaaatttaagtggaagataaaaatatattaggcaatctatttacaaaagtgagtacattttaataaaatataacataagaatatttttgattaatggatataaaaaagaagtattcctcaacataacttaaaatttaaacattttatttttataagcatattttttttagtaataatgaaacttcattaattcaattctattaaaatcaaggaagcaattacagtaggtaaagaaacactactaaagatacgataagtctccacaagagaagattgtgccaaagcatgcgcaaccttattagcagaccatttgataaaattaaaagaaatattaccaacatctgcaaacaaatccttccaatctgaaataatatggccataccaagaagctataattttattattttgtaaattcgaaataactcttagacaatccgactccacaaccatgctcgtccacccattagttttgatccaactcaaagcctctttcaccccaatggcttcaacctcatgaggctaaaaaacacctatcttcttcgaagtcttggcttgaataaccatgctagctgcggaacaagcgaccaacccaataccaaggagacttgagtgaggcccaaggattgttcgtacaagtagggaccatttgaggatgttagttgttatgcacaactatgtttgtaccgagaatgtcaaagaatatggtgttggacaaaaaggtaatcttcttttggtagcactcgcactccgctggtttgatgtaggggataaactctgacactctggggctgcgtgtctattcggttttgggctaggtgatgttcaagggccatcgaagcgactcttcgattacccacttctgggtcacctcttgaaggtatccagattggtcttggcagactcatcgtttttaggctgaatggcctcttttggaccaggataatctggccttgccaagttggtgagctggactcgcgtctagatctggaaccgtagcatgactttaccaatggactagattgatatcttgattgggcccaagtctaggcctgccttggttgttgttaggctcatcactcaaaaaatatagattatactagagaaaattagatggtatacctcttttaagttgttgtgtttaatttttaccctctctttctatattttttaattctacccttttttcaacaactctaccaattatgcccctatcatctaacgatattctgactcttcattcaactctaacttgtgtagctgtgaggttatagtcggtaatacaattataaaagtgggcacatttcaatcgaatttaaaataaaactatttttagttaactaatgaaaaaaaacaagtatatttcaacttaccccattatactattatatattaacgaaccaattcataacaatagcttcaatagggcctaagaaaatcagcccatcaaacaatatcggtacacattcttagagcaaatctaacaactatgtatcgttgagttaatatcttgaaccaaatcatgaaatttaccataatactcccgatcattgttgacgttttgtgagacagttaaagcatcaatctcaatataataaatcagtgtaaacataatgaaacatcttttgcttctattttctagaatttttaagcataacaaatcaaatttccccataaaaacgtgctggtcgcatatgttttgaaagatgttagtcctcatcatcatcattatttaatttaaaagggccataattattattttttccacaaataaaggaccataattaattgataaaactaagttgataatccaattatcattttcgaaaaaaaaaaaaaaggttacggagagacacgatcttgtttttttatttcaaaagatagcacgatcttacatgttagtcacattttttattttatttattgttttttatagaagtcacttatataataataaatattatatttttatatttattactatttaattttagttacatgtttttttttcattaaatgatttgtattattattaatttttttatttactttcacattattattattttatattttttaattaattattaagtgagtagatatattaatttttgcatcaaaatttacaatgatacaataaaacacaataataaaagtcaggagtgaccttgagttgaaatgagtcataggcaattttctttttaaaaccttactataaaaataaatagtattttttaaaaattattaaaaaaatatgtatattttttatttggacctctaaaatg

SEQ ID NO: 44885 - DNA, 2925 bp, Cannabis sativa
tgccaattccgacgaatttttcagcgccgacagcaacttcgacgacttttctggcaccaactgctactccggtgacttttccggcaccgacagcaacttccggtaacttttttgacttcattgaaaaatgaaacttcctaagcaaataaaaagacttaaatatgggatttgaaaacctaattacatatgtatgacatattaaatactataaaaagacttaaaaataaaaaaataccatataaattggtcaaacttaaatgtgtcatatttattataagaacttttaaaatacctaagtgtaatttctcttttttgtttttttactataacctttgtagagtttgttctatttattttttcaaagaaaaaaaaaacactataactataggcaccattgcaaatgttatgcgtcccttcgattgcattacgttcatattttttttagagtttacgagtactaaagattgaagtggtgctaatctaacccaattcaagagtagttaatgtacaaaattatatattattagatgtagttggataagtaaattagaattatactatttgttgtaatgattttatatgaaaaatgatttaagctggaaataagtaatttaatttaatcttgttttaaatttcatatttggaggacgaattgataaaagtttgaaaaatggagaaagttgacaaaattcaaaggtcaaatataacaataggcccaagcccaactctcacacgtgttttatacatgtgcatttacatagcatgtttttcttttctgcaatcaaatacgtggcatattgtttaggagctttttatccaacttcaagcaccttttaattgatctattttacataaataatgtgatccatttatcttcaaattctattgatatataattttggaataaaatgcatttatggattaaaattaaatagagttagactttatggtgatgatatatgatgttatctggtatagaaaaaaactattatatcagtaacatatttttggtaaaaacccacttagtcaaattatagatcgcaaaattataatattttgaaataaacaaaaatttacaacttaacaaatgattagagagacttttacattgagtcacatagttaccaatatcccaactggaataggttccttttagcgtcttgataattgtctcaaagtcactctctatcatcacaaaaaggtgatttaatgaaattgttgtctccatagctaacagacaggttgtaacttctacaacaagagtatcacaaaaattgagcatgttggtagctacccacaaaacagactctgtatggtccctagccaaagtcaccacgcacattgaactccaaccaattttaacatcacagttgattttgacccaatcatcaggaagaggggaccaagcagagactcaatagccttcgacgaatcaaacaaacaagaaccgtaatctgcgtaacaaatagagatagagtcaatacaatgtttaaggttacttaaaaaatcattttgtaccttattcttgcatgcttctcagattttatccaccacaacgaagcataaaggaacaattcatgaacatcgtccactcctttagacttcatactccatagaaattgaactcaatcccaaacacgggctctagaatccataaccggcattactccctagggggatgacctccactggtgaaaggaaaaattgcaatatagtaacacatgctcaattgtttcctctccctccccacaaagaggacatgaaacttcctcaatatgtaatcttctagagaggagaaagcggatagggagagcatttgagagaatatccaccaaaggaccttgtgacgctccaaaattttagaattccaaaatttattccacatagcaggagcagcattgcacaatggggcacgatttaaatcttgaatcaagtatgcaaatttagtagagaataaatcatttagctctttagtccatatccacttatccctatcctggccacagggtctaccacttttgatcatattattggtttgtttctgtgtcaaaaaaaagcatgctatttggagatgtcccaattcccattgtttgaaagtaaattcgcaactttctccaaaccctcaggtcgattattattagattgacaatagaaatttttgtaatgtataacccacagatcatcctagatatttgtttctttcccattcaaaaaaagtttacaggtcccttgtttaaaaatttctttagatttcacaacattcttccaaaaccatgaatcagatttcttaaaggaacaattcaagaaaggcataccttttagatacttggcacttaaaatcttacaacacagagattgatcctcattaatgagagctcaaccccacttagccagtaaagcctaattcatttccaaaatctttcagaagcctagtcctccttgggattttgggacacaactgatcctaagccttttatatagataacatgattgccttgttcacaaacccaccaaaagtccctgaccataccataaattctagaggctagttttttcgacaactttgtggtctgcatggagtaaactggtaaaataaggtcaaccgagttgatcaaagtagcatgaccaacttttgacaaggatttcaacttccatccgtgaagcttcgagataaggttatcaagaatgaagttgaaatttccatccttattgcgagttctaaacaacaaaatccctaggtaattaatgttgccaatggcattgtcgagcccaagttcttattttataccacgttttatcctattattactgaagaaaatagatagttttagcttatttattctctgaccagaccaatcataaaatttctccagatgccaaacgcccttggcttccctcatggtggccctacccacaaggattaga

SEQ ID NO: 44886 - DNA, 1753 bp, Cannabis sativa
attagttaaaaaagaaatagtgtataatatttgagtacataaaccatactctcttagcaaaatggctgaattgttatcctttcttttcaatgtagcaaaattttcatatattagtatgattaaattcataacaaaattctatgatatatctatgatatatctatatttatatctataatatctatatatatatataaatattaaagaagaagtcctatattaagccacttgtatcaacagctcaatctggccctttgattgagtacattatacaaacaacacatgtttggctgacatcaaatagattggagggaccccaacacaatgcaacagctagatatgcatgtatatatatatataaatatatgtttatatatatgcatgtatatactttttcaattaaaagtcttttgtaagtatttgactatggtacatacactaacctagtgaaaaaaaagaaagaaagataagagtactatttgtagatattattcttaggatagatagatagaagttaagaattgtctaatgtggttttttttttaataaaatatgtgaaaaaaattaatatttaaagttgttaaacatatgatcttaataaaaaaagtgataacaaaagtatcgtatcttacaattttgttgcaatcgtacccttttaactgtttagtgccaactaagtccgttatgtactaactcagaaatacaaggcgacatactatttaagagaaaaataattttttttttatttaatacgtggtctaataatatgtcgctatgtgattttgagaaaggacacggctacaataaaattataagataaggtatttttgtcgttattttttttattagagttatatttataataattgcaaatatccataaaaataaaaataaaaaactaaaagatgtgtcaaaatcaaaagttatgaattgaagagttaggaagaggaccacttaggtaataaaagaacccatttcattaaaaaaaaatagtaataaaatgaaattgttaaatgggtttttaataaattaaatagggataattagataaaacacaatttttttttataaattttatatttaaagatattttttaaaatctataaaaataacaagaaaattatataaaaataacaggaaaataacattaaaataataacaaaaaataacatataaatagctaaaaatcaataacaaactaacaagagtaaaatatgaaaatacatttaaaaaccgtatttttataaataaaattataaaaattgtaaaaatatttaaaatttgtacaattatatattaataatttttgttgtgtatttataaaataatctcaataaaatatgggtttggaattgggtcccttgaaagatacccaaagagagggacaactacctttctactttctaggctttaatgaaaggtttacagttaacagtttgtttatatgaccacaaatgtccaaaaacgatgacgttttaccgacaactccatcagattgataaatataggcttctaaatcatatagtgcaaaagagtaataatacaaaatataaaggaaaatgcaaaggtctaaaaaaaagttataagtaatagtaaattattattattattattattttttttttggaataaatttagtaactttattaactcgcaatcgttaataataaaataacgcacttcgttggaacaattctctaattcaagcacacgacctggatataaacaagaatgctggctaaaacatgagcca

SEQ ID NO: 44887 - DNA, 1625 bp, Cannabis sativa
ttttttttacatttttataaaattttacatagaaatttctattgcaactaatagaacaagctaaatcgtaaccaaaatttgtatagcaacctacggagtcactctaaaaactcaaacagtaaattaaaaaaaaaaattaaaaaataatatataaagtaatagataattaaaaataattacgtgttacatatgtatatatatatatatacatatgtcaccataaaaaatgaagtccgataagaatctataatacagtgagagatcactatccataataaatgactaattaggtagatgagtatagttaaatgttactatatgtcattaattaaccaactaattacaatattaattaatttggaattaattaatgaaattaattgtctattatttcactatgaaaatttaaaataatgcattgtccactctaatccttttggcgaagtggaggccctactgcgctagcgcttcaaacggtaactgagtggaagtaccgttttattattatcgagagtaattcggtaattattattaaagttttgattgagaatttttttaattggcgtactaataattttatttttatttataataaatttttagtgtaattttttgaattgtaattttgtttttagtttgaaattatgttaggtaaatttttttttaagaatcttagacgcatggttgatatgtcaactattcgtgaaaatattatatgcttctaatttccatctttaatgaacatcctattttcaacaaaaaaaaaaaaaaattacgtatataatcacgatgatgtgatgtcatatatgacacaatacacatatagttatcgacatttattggtctacaacctaacatgatcagcctaattattttagatttgttattttatatactaatatagcacattttccagtgtgaaaattacaattcatttatttagttgcaaaggacttatcaactttatgtatagcttttgaaaattcaatattcgatttaaagtatagaattatcaactatacaaatttactttttaattttttcttttacagaaattaaccaaatgtggtactagctgctgatcagaagacttatttatatatccaaataaatggtttcttatttcaaattgacctaatgaagaaaaattaattcacttaattaacaatggaggaattattcggccgctaatgatagttggagttggcgacttgagacttgtgggaattattcggttaaaagtgcatataaattcttgcaagaatctaaaggtgcttggtgccgagatgccaatactgatttttggaagcggctttggtcattaaaaattcatcctaagatcagtaattttttatggcgagttgcttcgggtgtgcttccaacttgttctcaactccaaaagcgccatgttcctgtcaatgccgacgactgccctttgtgcaattctagtactgaaactattcaacatgcgttggtggaatgctcgtttgcaaaggctgcttggcatcgcagcatagtggatgtcgagactaggactgtaacattcagtagctggttgttgggaattttcaccaggggacacgaagttgaaatggaggaagtggcgatggtgagttgggctattt

SEQ ID NO: 44888 - DNA, 824 bp, Cannabis sativa
caaaagagcaaaatagaaggatgcaagagatagtgatcgccatgcaaacaacgatggaagttgtaggcattcacgttcatttgaatgtgggacctcttggataagacaagatgagagaaggatctttgcagccattggggaatcaaaggcacaagaattgggagctaagccctatctgatatccttccgaatgtcccccgaaggaaaaccctacagccattctagaaaggaataaaaaagctcaagatccacgtaatgtttgctccaatctccctaagtaaaaggtccacagagggacagattttcgaagggaaagattagtcctcaagaccgggcagatcggaagagcatatccttgcatcaagagttggaggagagaaaggaaaatagcaaaatggaccctccagtcaatttaaggcaaaaagtcaacgccaaacacggtgatcttaaggatcgcttagagaaaaaaaaaaaaaaaaaaaaagaaaaccataccagtctcagataacaccctaaataaaggaatcatggccgaacttactattctctaaaaggacatatctaaattctcccgaagacaaaggggagatgattcagaatctaacttgaaggattggggaccttgtgctagaaacatacttgaagcagagctcccaaagaattttaaaatgcttgaaatgaccctgtacaccaaagacacagatcctagtgatcacatgtcaaaagcttctctgcaatggaaaggccacaaacaaatgggcaagcagaagccgtcaataaaatcctcaaggtcaccctaaagaaaaagctgttggcctgcaaaa

SEQ ID NO: 44889 - DNA, 1293 bp, Cannabis sativa
aaaatacctaaaaaatttgaaaaaaatatttcagcatgtaatatcggacgtggaaattgactaaaaggttgtaataagaggtttaattagcattactcaaatttttattatgtttgatttaaatatcatttaaattattttaaattagtaatgtttaattttctttagacattgattgacccgtggagatcaattaattatttggattgatacctatatatgtttagtgaattaaactttttgaaaaaaaaataataataatcaagtttataaataaaattaagcaaatatgcattaaatggtgctattagtatataatataaagaagctagcgtcttagtctatctttgcataagaacttttgagaaaagaggaaagtgtcaaatgctaatctcttgtaggatagttagatcatcacacaagctagcttttctcattaatattagatgtttctccacaaatgaaaaataaataataataaaatttattcattcagttaatgctgacatcatcatatagaaattttgtgagattaattaaaacatgatttgtaggatctttgaaattaatacacaatcaatactaatcgctaactcgagctattataaattgatggcgacatgcctggatgtggcacattgatataccaaatcagtttttctaaggaaaatttcattttccacttaaaaaacaccccctactaatatttacatcctaacatatttttttatcaattaatgctagtattttttcaatctatccaaattaccatttacatttaattatcctctctctgcctttctttcttctccattggttctctccccaccgaacccaaactgtcgacccccaaacggctacaaacccaaccattttcgtcggtttcattctctctcttgctctcactttcaatatctatttgtcgctcttgctttcaatctctttgcctctctctcgctccaaaaaccccatttagaggcagtttttaaaccctttcagcgtaagttttggtaaaatttgctaccgacgctgatcaaagcgacgctaaatggttttgaaaaaccaacaccatatatacctctatggcgtcagttatatgggtatatatggcgtcggttcctagataataaccgacactatagggggcgtaggaaccgacgcctaaaatgagcaattttcagtttttttaatttgatataatttattttaatcatatatttattaatttatatattattttatttaatttaaattacatatttattttttaaaatgtaaattaaatattattta

SEQ ID NO: 44890 - DNA, 1481 bp, Cannabis sativa
ggaaaaggaaactaccttgaaaaggacatgcaatacaaatccacttgttcacatactttgcaaatacctaccgacgaattgatttaggaaaaaaaaaacaggttaagaatcttccaacatgaagaacttacacttagcagtagaaagttagatgtttcaagaacttttccttttgtgagtttcaagttagagaaaacatacgcacatcgttatggagagagaggaagcatgagacaagcaatccacccatcgagtgtgaaattatattaacttttcttccccctgaagccttgtaagcagtttctaacttcaccttaaggccttccatcaacttatcaattctgggaacatataaacatgtcacataggattagcaaaatagtacactcaaacaaacacctgaagaagtcatttcaacgaaatgaattaccgattgctttgtctgaaatcataaccatatccaaacaatgtggttcccttcttgtacccaaattttataagcatttcaatcatattatgaaaatagtagacatctgtgacatgtaagcattttataacctgaaaaaaagaaaagatctagtttcatacaacctagaagctaacgtaaacaaatgttttggcaacaaacattccaagaaccaaaaataaagatgcacttgttcataatacagctaagagtagccaatggagcaacaattcaggactatgtaacatcaatttacattatcagacgttaagtccttactttctgaaagaaggtgtgagaattatggaaatgatcaaattttaggacacattaaccactaaaaaggtgagaatttttggggaagaaatataaataaataccggagatggatctagaatgtcaattgcatataggccatagtcatcttcaggtaccagcagttgggtatctttatctaatgattcagtataacctgaaataaaacaccaacaacagaaaaataaataaatagaagaaaataaaataaaatctcaacgagccaattttgacatacccaattcattagagagccaagttttaaaatgtacaacttaaaagaagtcctatgcttccccaaattccctaaacaaataaagataaaatattgtaccttctaacaattcaaaagaatacatcaaaattcaaaactagtttttttttttgctaagagaatacatttactgaggcaatactctctctttttccttttctttctcagcaaccaaatggtccaaaccccgcaacaaaggaatatatacaaataaattcaaaccaaaaagaacctgtttggggattatagatagaccaaactttcttcttgaactccaagtccgccaataggatccgtacccaaacccgagtctcaagtccaagttttttccccttggagtggagaatagagcctccaatgccggagatgaggagaaccgggtccagttgaggtgggtcatcatcgaagctcccgttaccgaaacat

SEQ ID NO: 44891 - DNA, 4187 bp, Cannabis sativa
  modified_base (262)..(279): a, c, t, g, unknown or other
aatatataatcatgattatttttcatgattattttccactgtgtagtgattattttccactgtgtagacttattttccactgtgtagacaatattttccactgtgtagacaacattccactgtgtagacaacactataatcatgaataactatatgttcaggatttaattgaatgtatgcattaaacataaaatcatgaaagtaatcatgtgaaccatgcaacataaaataatttcttattttttattaattagtaaatctnnnnnnnnnnnnnnnnnntttatttagggcataaaattcaaacaaactctcacttgcactaatttaaaactaaaactgtatttcaattaatcttaatatcttaatgtccagatcaagtgtagtatgtagtattatctttgtaatagaatctgacaggttgtattcaatacaaactttttccaccattacatctccttaagtcacaaaattcttgatattgtgaaattccttttgatatgtttactcatcttagggtattggattctttactgtttggaaactatatatgtgtcttaacactagtagttaatccatgaatggaataacgttaaaaattgcatagaacttttcataggctaaataattatctagtagccttctatgccactttaacattcagtctcaatggtagagttagagactccagattggtttttacacttttctaaaattactactctacccccaaagtaatcaccatctcattagtagactttctagcattaacccaagtctagcaacatgatttggtgcagtctagtctagtggtattaaaatacaatccttattgactaacacatagttcctttgttgatcttaagatttatttgattgtcttctaatattcctttcttagattaaactgatactattgttcaaatttctgcaatacatgacacgtggaacccaatgaagaaaaacacattaattctctgctgattagagccttctgccgtagcttctataaaagggcttccctgaaaggtacatccttcacaaaagtaagggcacgtggaagctcaattgcacctgcctcctcttcctcctggatgcgaaagaaagggtgttccttccagactcaaaaaagactcgtggaaaggtcctcctcatttatgtccatagaagtagcaaaaagactcaaaatgggtttcactcccatgcagtttcacagacaatcatttcctacacttgtcagaccactaaagtgaggataatgctttttctagtacaacgtcactttttgtcccccacgttaggccatagtacgatgcatgcgcgttgtacctgtcttttgcccaacagccattcaagagggtaattcttaaaggcaagacctttgggtgtcatgtattgtgagtccacatggtactaatcataacctctatacacagcacggtggagcagccacctaccacacagatggtcggatttcctgtagtagggtttgccctgaaggcatgttgtttaagaaacctcctataaatacccctacttgtacaaggggaaagaggaaaaaaaatttaacctagagaacctctatcaaaattcctacaagcttcactatgtaatttcccatgtaatgcattgtaagtagaagggaaatcattcctcatgcattaagcccctataaatagtgacgtagcctcactatggaggagatcaaaagaattgcttcatagagagagaatttgtagagagaaaatagtgatctaagagagttgctcaaagatcagttgtaagagctttcaaaggggaagaacactttgttccttctcttaagtcaataggggagtaggctattagcacactcacggccccgaacctctttaaaatatggtgttcattttactttattatttttattctcttttaactattttattcaatcgcttaattatttgactcattgtcgttggctaaaagcgatgtcaacacgttcagaattgattcatattcctttcgttggacacatgtcaacttctagagtgaagccaaatttcgggtataacacatatataagagtatattttttagatttagacaaaacatgataaaaagtgtttaatttaaagaatttagtatagcacataccaaaaatcattttgtttaatggaaagatgatgtaaataattcttccaatttataataattagtttcatatctatcataaattaataaattatttttatattaatatagatcatagattagtggttaaatataattataagctacactattattaattattaataatagatgtggatgtgagttactctattgataataataatagatttttagctaatattattgttgaaaaaataaataatgacaaaaattagaaaaaaaataaaaaatatgatagaatacacatatagattgccactttaattttttaatgctttcctttatatatataatgtatttcttaagtgagagcactacttttgttctgacaagtaaggacatttttatagtctttgatcttgaattaagtggtggtggtggtttctttacttataatagggtatctggtattggattatttcttgcatttataattttcatcctatgtggcagctatacgttaaaatagtttttcaaacttaatgcaataaattttagcaaaaaaaaaaaaataagaacttaatgcaataaatatgattatattatatgtgtgatttacatgttactataatttaactctacttcttttcaattgtaattgtaaaatctcactaaaattctatctccttctaacataaattatatataaaactaaaatcaaagtaattttctctataatattactttctgtgtctaaaatgactaatcatcgagagaaagtttattctacaaaatctctttctaccctggctgttgaaaaaccttgaagttttttacattctttttcttgtatatatttttctgagaattgtgttgctatgattttgatgtgtgtcggcttctttgctaaagatgtggatgggatatttatgaggaaaaagagtacagagcactcgagaagaaaagaaaaataacaggtgaatattgctctgtattattcttattattatgttttatggatacaaagagagctatatatagtagtagaattaatccaaataagactaacagaatcaagaacggtaacagaatcaagagaccaaataaacaggttataacagactataaccgactcaattaattgaactaacatactaatcttaatagcccccttcaagatggagtgtagatgttggagacactcatcttggacataatgttggtaaggctttggtgaagatgtcagccaagttttgttgagattgaacatgaagtaacttgagaaacccttgttggattttttcccgaataaagtggcaatcaatttcgacgtgctttgtgcgctcatgatagactagatttttgcttatgtgaattgctacggtattgtcacagtatagagacgcaggccgattgagaagggtgatgatccaagttacttcagatgtggcattttccatagcacgatactcggcttcagctgaggagcgagaaacaacttattgttttttttttatttccaagagacaagagctttgccaaggaacacgcaatagctagatatggatcgacgtgtgtcttggcatgtcccccagtctgcatctgtgaagaatgataattgaacatttgatggtgataagttggtttcagcaaatgctgaaacatgtggagtggtatttgatggaaagaataggccttgtcctggagtacgtttgaggtattgaagcacacgatgagtggcttgtaggtgaggtactcttggacatgtgagggattggcttagatgattcacggcatacgagatgtctggcctggttatggtgaggtaaatgagtttaccgattaggcttctataagtggtaggatcaggaagtggttttcctttgtccttactaagcttaagattaggttccattggagttgaagctggttttactccaaggttacctgtgtcagcaagtagttgcaaagtgaaaggtctttgggagatggatatgccttgttttgttctgccaatttctaggccaaggaagaatcgaagggagcctatatctttaagtgtgaatttcttgtcc

SEQ ID NO: 44892 - DNA, 2467 bp, Cannabis sativa
  modified_base (36)..(40): a, c, t, g, unknown or other
  modified_base (68)..(72): a, c, t, g, unknown or other
  modified_base (98)..(102): a, c, t, g, unknown or other
aaattctattttaccagtgtaataccaacttttgcnnnnncagtgtaataccaacttttgccagcacnnnnnccaacttttgccagcacaaaaatgtnnnnncaaaagtgacatttcttgtagagtttgtgactttggaatcaaaaatggaagaaaaaacagaaacaatttgtttattattgatctgattacagttgatcaggtaatacaagttgtcaaaatttctacctatcccaatcaccttggtcttcaaagtgtcctggatgacacaattttcaaaagaaaataagaaagtgcatgcaattagttatagttgttagagaattaacagataacaaattgcactggaaactaagaacataaacgacatttttaagtcaaggtcaggtgtcaaacaattgttccaagacaagatatatctgtatgcaaaccattaggtaagagagtttttagattagattcagtataaatatttttgaggtctattagcaaacctggtccatgaagcttgtgaccagaaggatatccattgagtttgtaccatctttcaattgagtgtccattcatgccacagtgagtacatgttgtactttgacagaaaaggttgaacaactccaacaaacattactcgatgaagagatgtctaagtcagatgaattgttaaatccactaatcaatcctttttgcctctcttcttgaaccacatcagcataggccttattcacacttggaagaggatcacgcatcaagatttaagatctgacaaaactgtaagaatcgttcaatatccaaacaagaattctagcaatctatcttcctcctggtattcttgaataactttcattgcaccacaaatacatacatgttagccaagatatgtttccaaaaggggggtgaataggaaatttaaactaatttcggtaaattaaaatttttaacacaaaattaagcaattagccacttaatcagataaaaacaagtaatatggcaagcaatatattataacaaataatcaaatttataaagtaaagagtttaagggttaggcaagcaatatatttttatttcttacattattatctgctactgacacatctactatgatccactccaactatggtgtgttatttgctcttctttatccgttctttgtccttttctttcgagataaaatgtgtgccatgattgagttaagagctttaatggggtgttaattatatcttttataacatactttcaggctcatgtgagaggacatcaagttagaaaacagtataagaaggttgtctggttctgtcagtatattggaaaagttaatacttcgttggaggcgaaaaggttctagtttgcggggatttcgggtggaaaacacaactgaagatgcatcaagagatacaaaaaaaagtgatgattatgaatatcttgtaattgggagaaaacagaaatgtaatgctatagacaaagctcttgcaacagtaaagtcaatggtacgccatcctgaagcacgtgagcaatatatgaggcttgttactaattttgagaagtttgaggtaattttgtttaataatttattccttcaaatatcaagggcatttggaaatagtaattgtttgataatattttctttttatatttgaacagattggtgaggatgagaacagtgcatgacagaaaatttcatagttcaaaatagtgtgctaatgcctaaattcaagacattttttcccttacaatttttgatctcttgtagcacgtcctttcgaattttaagaggctagctcaattttctggttaataattgcttatctatcttgacttttattgtttcgtgcaaaaaaaatttgttgaggccgatgctgacgatggccttaagcacgggtggcatgcatcatttgtcatgatcgaactcatctctgttaagcacattactcatcatgtactgctctttgtttataaccttatttacgttcgatcatatgtgtgttttaactctacatagaaagtgcaagataaaggctaatgcctctcccgatagaaagactctgctccttcactcagtcgcatgctttctcaaccacaacggcttctccaaaaccctcaagaagttttgctctgaggccaaaatcctggtgggtacttgcacatttagcttcgttgcatatggtaggcatatgggaatttgcaagcacattatgaagttaagatatttatttttatattcagattgatttagcagaaacaccttctaacctatttgagtgagtagtctgctactgtgatgcaattattattagttattatgctgcatattagtttagtctttatcaaattaacaaattaacatgattgtagtagcatcacataatttgtatgcacactaaacatgttaggcattggtcatggaagtgtttcactattcaaaatgcatactatgtgttatccattgttaagactgttaagacagttag

SEQ ID NO: 44893 - DNA, 1293 bp, Cannabis sativa
  modified_base (74)..(75): a, c, t, g, unknown or other
ggggggggggaggtaagccactgtttgaactgtcaccaaataataataccatcacaaatacaacaaagcttgannaacacttgtcaaaaatacaataagacttgaaaataaatgtaaaaaaaaacgtttcaagtcttgataatacaataattagtgggtttgggctgggccttcacatattggacttaataaatataaaaattggtattttataatatgcggtgcggtgcggtttgaacaatatattaataatttaaaaccgcaaactacaccgcaccgcgtggtttaggaaattcaaactccgaccactcaaagaattttaaatcgcatttttcttgcgatgcgggcggtttgagctattgagcggtttgatgaacacccctagtatatatgtatgtattttattttgtattgaatattttttgtatgtatatgtatcttgaaattacattgtatatgtattatatgtataaaaatattgcaattgtattgtgtatattttatgcattgtatatgcatacattgaatatttttaactaataattttattaaatattgtgattaaaaatgagataggagagtattagaataaaaatttaaaaattagtttagatgaaattatattttaaactcatgttttttttttactatatagtatctagttactaatttactaagtagttactaattttaattcttgttgtcgtgttttcttagtaaatagttactaattttactaacagaaactagtttgttgtaaactattaacttaattagttagtaacaaattaagtagttactcatatactatataaccactaagtagttaaataattatatttttaattttatagaatttctttatgttgtaggttaggatgtcaatttgttacgatcaaacgtatttagtgttgattcgttactagctagctagaggtatacatttactaacttttattattaattaattatgaatgcttagaagagtttaaatatcttaaatattcatctttagtaaagtaggttgtgcaatatattttactgctgtcagatgcatagaataatatgcatgttagttgtgtttgaatattttaaatattcatccatagcaggggcggacccacattgttgcgagggggggcagtcgcccctcctgaaaaaaaaaatcgagaacaaagtgtatatgtattttaattagttacaacatatatatgtattaaaagatgatatttattgacataatagtaaccttggtgtaatggttaaggcggttaataaataggttagagggta

SEQ ID NO: 44894 - DNA, 1767 bp, Cannabis sativa
ttggtagatatcatacgataaagccagtgttagtactgcttcaaaattactcagaaaaaaaaaaaaaaaatcaaagaaacgaacaaaatttgtttaaaacaacaagtctgaagtcatactccttccacattttgctgttgaataaaatttgttcaaaactgtgaataaaatttagagcaatattttactgttgaatagtgttgaaatttttgaactaattgccactaactgcagaccttcattggttaattagaataattcaattgatatttacacactaattgatgtgattatatgtcaattattaatttatgttgttttcgtctatagtttgatcatatgaaatattatgtgatgtcctttatttgattattttgtttgagaaggagcgaagctgcattccactattgactattttgtttcagatgaagtcttaataaaaaagctattaaattgtatctaattaatgatgatataaaaacataaacaaacactacttagtgaggttcacattgcagtattagtattagttaatacaatattttgacattgagttgttctaataagttgtgtaaaattatcaattctttacaataaacttgacccgaactccgaccatggcctagactcgaccccggactagacctcgaactcgaaacatgccccggacgccaaactcgaattcgaaacctagacccggactcgaattcggacccgtgtcccgaactcgaggtccaggtagctgttcgagtctgggctcgagtttcaggttcaagtttggcattcggggcatgttctgagttcgaggtttggtccagggtcgagtctgggttcgggtccgggtcggaggtcttgttctggtgttcgggtccaggtcgggggtctgggtgttggtccgggtctggtgttcggggccggggtccgagtctggggccaggtccagtgttcgggtcgagggttcggggtcggtgtccaggtcaaggcctgtgtccgagtatgagtctgggttcagttccatattgtcagggtatgggtccgaggtccagggctggggtcggggccgggattaaccctagaccttttgtaagcattataaatatacaacctaatacgggtcatttattatgtattaaataatacgactcacattgtattaaaatttatgatcgtaataactaatacaatacaatgttttatttaaacatagtgttatttgttatttgatacaatacaaaccgtattctgtctaccaaacaaactcataatgtgaacaaataaatagttagattttgataagataagtcgagtgatgttttggaagttggtgttttggcaacattgtaaaaaaaacaactgttaacaaaggtgtaatttattaaatatgtattagagtacacaaacaaatttaataattatcgtttattattttttttagatgacgattgataaaacgtggatctcattgagaaatcgttgtgatcctacttactggaaaggtgtccaagcttttattgcatttgcgtctaaacacaaagattgtgatgggagaattctatgtccttgtgttagatgcttaaatacaagacggcatcctttggatattgtggaagcacatgtttttgacaagggttttctaaagagttatcaaaagtggattttccatggggaaccggaagtaccagttgccgatgaggcaaccgatgagaatgacataattgagatggttgatgtcgttgatgattcccaaaagaacaaagacaaccaaaa

SEQ ID NO: 44895 - DNA, 1492 bp, Cannabis sativa
aaatatattgcacaataagatatggtgatctattttatacaaattatgctctaaataattattaatgagagaaaaagtaatatgttattctcatatcattgatgataggtgtcacaaattgattggtttgcaaagaagacaaagcttgcccatatatatttatagatatagtgatatatatgttttgatatatagtgtttttcctttttggaataaagggtgagggcaataatataaactgacaatcatcacttgatgacattaagcaaaagtgtaattaatttgagactagaccagagtgatcgtaaattaggtggaatatggatatatatggtgtaaatataaccaccccatatgatatatattatatatatattgctcttcattatatatatatatatattgtataagaggatataatttagcaccaaagaatatgcttttactttttataggatccaagagaattaatccctttcaaatattagcttatataaatagataaatattacatacataataattttaataataatatttccgaacagaataaaggaagagaagaataatacatcattaatttttagacaacaaaataatgttaagaaacaaggccatgttcagtacaacactagtaattaataatatacccatatatgttaaaatatatatatatatatgtcctacttaattataaatatatatatagtactagacgagtaagattttgatctacattatttattcctatgccctatatattatgtactacgtagtttttacacacaatcaataatatatatcaacatattaataaattaatttttatacaaccatatatatatactaattatttaattgcataataagtttatatataattagttaagttaattaaataatgttaagatactagatattaagatttgtggattgtgatcatgaatatatataagagagagaggtataatatatgtatatacctgatatgcgacttgggattggttgtagtgacctcgtctaccccaatctcctagaaccaagatgctgagagagccatcttctttggctgcctgctccaatcgtgggaggccacgtatactacttccactacttattgaggacacgatgaacaacaaccatagcatcaccatcttcatcttcatcatcttcaccttgggacacagctccagtactggagaagagtacagtatatataattaaagaagagagaatatgtgtatatatatatatatgtatatgttaccccttaataaggcttctctctttctcactttatttaattatagtactttttgctttgttgtgatgtccaaactatatccactcacggccctttatatatagattgatctcacacaaatagctagctatgcattagtttattcattcaattaattattataattataatatatatttatattctaacctttatttcggaaaatacaaaattattattagggtaatt

SEQ ID NO: 44896 - DNA, 4891 bp, Cannabis sativa
attattttttgttgtggtttgaatgttcttttgtttggttgatcagacaatgttacaagactcaggaaattgagagttgaggtctcttgaataccctttagggagagtcggggtctcttgaatctcgaattcctcaatcttttagtgtgttcttttcggtttgatcattcaataacaattcttatatttgctcttatgtgtaagttagacaatgaaatgtattgtttgttctcagcatttagagctattatatctatgttttctacttacactagaaaatatctctttttatagggcgaaattgcgtcgtgcaaatgtcaactttctttccgaaccaatcaaggatggtacgactgggacggtgatagttctcacaactccagatgcccaacgaactatgttatcgtatcaggtaaagtataactttttacaatctattgtggtgccaaacttaatctttttcggttggcatttggagttgtgagaacaatcttgtcctttataaagtttctaaactcacaaggagttttctatgtactttaaagttgttcttgcaagtaaaactatatttggggtaaacatttcaatctcttcgtttgatttagcttatgatttatgaaatgtgaacagggtacatcttcgaccattaactttgatccgtgcctagctaagataatttcgaatacaaagatacttgtcgttgaaggatacctattcgagcttcctgacacaattaaaacaataaagaaagcatgcgagcaagcatgccggagtggttcccttgttgccatcacagcatcggatgtttcttgcattgagagacactacgatgaattctggtacgcgattgttgttactttgctcgtttgtttcatttgcatttacgaatgaaattagtctttagatgaattcaaggttaaggtacacaaggaatgtttctctttcgattagttgcttattgaaaatggtttaaccaaaaacaagaacacacgagatttttacatggttttgtgtatacaaacacctactccatgagaccttgtctacattagagaaaatccactaagaatcagtaagagtttttcctagatcaaagaacaacctcgaatccctcgagaatctttacagaactatgatcttccatcaagtttatcatcaaaagcttttagctcaatcaagagtaatctatcataaaaaaaattctagttatgaatgggggaatagaaccggggattcttggttacaatttcgaatctgttattatatgtttgctctagttttttatgttgaaacggttttttctttatccctaccttagcaatgagtttcgatgtattgggggttatccatattacctaaaaaaaccatcaaagaaaagaaaggaaacaattccccgaaaaacactatcgacagcttgttcataataccacattacactaattttcggttggattaatttttctcagggaaatcgttggcaactacgcagacatcatatttgcaaacagcgatgaagctaaagcattatgtgatttttcatccgaagaaagtccagttgcagctgcaagatatctaagccattttgtacctctagtctcagtaaccgatggaccaagaggatcctacatcggtgtgaaaggagaagctgtatatatccccccttctccatgcgtaccggtggacacttgtggtgcaggcgatgcatacgcctctggcattttgtacggtctattacgagggatgtctgacttgaaaagaatgggcggtctagctgctcgaatagctgccactgtcgttggacaacaaggtactcgtcttagagttcaagatgcagtaaagttagccgagtgttttgcattccatctcgacaattcaagttcaaattccactggtaatattcagtcagatttcgggtcagatcatatatcaagctgctagtgaggtatcatattcataagttgattttctttccatgtgttcatatcatttctacattgtaaattgaatcatttcattattctaattgccaaaagtgaaaaatgagaaagagaaaaaacaatgtttgaacaaggcattaatggagttggccttggttatagaatcatgattaaatatgtttatatgtattattactttcatggctttggattaggagtgtgacatttttttacctcgatttataatcttgtagggttttgctctctcgaactatgaaaatatttataaatttatttcttcgttcgcattcttttatttttgtaaattgtttcttgatgtaagactgattcagagctaatatactataattcgagagtccaagcaaaaaataattgcgttgatagtattagaacgataaaattcgaaattgtgtctcataattttagaggtatcacttgaatatttaaagtcattatacttagtctcacgaaatataaccaaaagggagaatttacttatttctatagttcgagagaaatgttgtacaaaagaataatttatttaggggtgaaattgtgtaagtatcataattgagttgagaaatgagagaagatgtattttcaatttaaaagaacaactcaagaaagaaaggaatcaaaagcttgattatatttaaactgtaataagttttactgtcaatcttttagttaatggttcgaaaatatatgttaaaatatatttttttttaaaatatttttcatggcattatttgttatgcctacaatattatttttgtaaatttttaaaaattttaaaatagtttaccgtgttaaaaatacgtttgaaattttttaaacacatgtagtaaattaaaatatcaaattttttataattaattagtgatattttttaaaaattattaaattaaattatataaaattcaataattaattatactaacaacaccataataacaaaaataagcatcactaagaatttttaacattcctcacgcagtaatgtaataacttatcaaaacaatatctttaatgaatcagattcttatattatattatataaattgcaacttgcaccactttcaataaatatatgtatatatatattttaattcattgcatattattttgatgcaatcatcatagaccacacacaaaaatgcctttttttttttcttttaaatttctagaaaataatatattaataaaaacagagcaccatcaatgcagccaaaataattgatataataataagaatatttctttatttattgaatggtttgatttgttcaacaaagtacaactcaaaagaaaatataaagatagatagaagaagaagaagaagcattatatttataattatagtttgacacgtgtgaatgtggtgtaatctgaatagaaaaagtcagcaatgtcctcagtcacacgtgtgacatgccttaaacttcaaagcataacactttttcattcaattcaaatttcaaagtctttcactttgacaattacaactcttactacttatcactttgaatttcactaatgaacaacttttcattccctcatgtttatgtatagataaaatggaaggttatttagagtttttgactctcgaactttaattagagataaaaatttagtaaaattaataaacagataatgaacttattaacgttattttcattttctacttgtgcctctcattctcgctttactcttactctgcttaactctcgatgagtttaggattgggaaatccttattggatatggagacccattattaggtagactcggtcctaggcataagcgggttagacctgtgtttaaagcctacctagctcaaggatccaaaaaatttcatttttttttttaaaaattacatattttttaattgattttaaaaaatactatattttttcctaaataagagcccacaaatattttgagcatcgaccctgccattaggtaccatcaagattaataagaaaataatgtaattgaattgaaaataaaaataaaaaacaagatattaactttaaaataattaaatattaattctaccaattaaaaaaataattacataataaattagggaagattaatagttaactttataagtataaagtaggtagtattaccctgatctcgccttgaaccctctttgggtatataaaattgcaccccacctcgtcccactacccattaaggtagataatccccgccccattcagagtgggtatccgtcactgcagatcaaatttttatcactaactttgacatatattaaagtatggccctcaaatttttaagaccgttaaaaattctctccgaacttttgaatttgttggattcaatgacttttatttaattctgtttaattttattaacatgtctccatgtacgaaattgtgcctcctaaaatttaatatgtactaaatcctgctcttaaactttaatatatacaaaattatatctcttaaactttcatctatatcaaacttttgctagtaaaatagagagaatttttaaaagcctaaaaatttcagaggtacaatttattcctaattagcttaaatgaaaatagtgatcaaactacataatcccactttattttcatttcatattcataattttacaacacaagagaagagaacaaaactcatgtatattaaattagtctacaaaacaaaccactacactatatcaaaatatatattacacaaattcacctactacatttacaattatcatcattcatcatcatcattagtacataacatatatgtaatgtatgtatatgtttgtattattacttcctttcctatatacattattaaagtatatattgactcttatgcttttttcattattaaaaatatacaaagacaagaagtgcttaatctgagtaaagtgtttaaatatcatatcatatcatat

SEQ ID NO: 44897 - DNA, 1611 bp, Cannabis sativa
aaacagttgtgtgccaagttaaaaatacattgctattaaggttcctaacatattagttttttaaaagttaaataatattttttttaagttgtatgagaaatacattagatttaaaaaagttcattataagttcacaacagatttggtgtttagactaagaaactttcgggtacaggtatggtcttcttaacattgtataacagttgcctcacagttgtgtgtcgtgctaaaaatatattcctattaagattcctatcatattactttttaaaagtttcatagtagatttttttgtaaatataatgccaaaaataatatattcaaaacgttcattataagttcattacacttttggggttaagattaagaagttttcccatacttgaatagtttttattacattgcataacagttgctaaaaaatttgggtgccatataaaaaatatactgtaattaaaaaacttgaactaacaacaaaaaatattaaatcccaatttacaaaaaaagaacaaccattgtcttaaaaaatataaaagattaaaataagtcacaccaaaaaataaactataacataaaacgagaaataaaacagtagcatccataaacaagtattatcatatttaacattaaaaatcacataagttcataaatcaattccccattagatgaccctacttcttccctttacaagccttcgaagacttgttctacttttcatcctcactgttaatatttttatcatttttgttttgaccataggcaaacaagaaggtagcaagacgagtgcggtaaacttcaatgtcaaattcattaggaacatctttatcatggatgaaaaactttgcaaaagcagcaataaatgtgctacaatctctgttcgacgaaaacagaaaaatacaacagttaatcaactattatgaaacacaaaacaaccaaaaaggaataacacaaaaacaataactcactttttctactgaactaggagatttgcaatctccaccactcttaatggagctttcagatcaaaacccaaatcaggaacagtgggcctattcttctaaaattcaagaagatcaaagaataatgggagcacaacataatacaccttcattgcattccttgctgcagcattcatcttggcagtcctcaaggaattataaagaaatgtaattccctccgttcaaatcaagatggccaaacaatccaatggctttctttcctaagatctacaaagaacaaaatatggtcatcttcataccaaggcttagaacaagaaattcttaaaccttttatataatggactatttggtgagcaacatgaatatgagacatcttgctttttaatgacttcgccttgcagaatttttggaaaagagactgcatagaatcatcaaaacgccagtctattgtagcgaaattctcagttacagcagaagaatactttcctttctttctttaaacttggaatatatttttcatttttcaaacaactggctaaccgggcagcttttaatcacgggttttcatgctttgttatccttaatgaatttcgttccttgttaagatcattgtgcaactgtgtttgttttttttttttttgtgcttgttatt

SEQ ID NO: 44898 - DNA, 2155 bp, Cannabis sativa
ccaatgtattaagcataataattcaaatttccctaataaaattcattttccttaaacaaacaagagctaattactcaaaaggatagcataaaagttcagaaaagacatctcaccttaaagataccacaagcataacattgagaattcgagattgtttcacaagaaaatgtgcatctcgattagcagacgtttaacaaaatataaacaacattgtttaaaaattgcaataaacttttacaatcagagccgacccaataaaaaattaaaattgaatcttttattaaaaaaaatacattcataaattctaaaatagacaaaaaaaattaaaatcatgtgtagtgggaccacaagattttatgattttttttataagtgctaagtgcatatttgcttttatgaatttttatttattatgtatactatacttgtgtaatggtccaagttgtcatatgcttgggttggccctctttacaatcttcaactactaagccaaaactaaaaagccttctaaaagaactatgaatagcttaaatagtaacaagactaccttctcattgttaaaccaaacatttgtgcgagatctaattcgtgttataaacaaatttattttttgttgataaaatcacatcaaacataaatatttattcaagtacaactctacgtaatataaacattacaaattactcaacacacaagtaatgtggaacaaacacacacaagtttcttttgtttaacaaaatcatactaaacatagcatttatctaattactaaaattctattacggggttagtgtttggtagctactaagtataatataaacaccacaaattactcaacacatgagcaatgagggacaaacacacaaaatttttttttttttgataaaatcctaccaaatataacatgtatccaaattaaattaaggatatgcatgataaattgatgcaccaaaaatgttatttaaattttagagtgtacaatgtagttatttaaaatcttaccaaaaaatataattatttaaaatatcttgtaaatttttgacaaattcaggaaaatttaacgtgctgaaataaagtttaaatagtctgttgcacacgtgactcttttgttttatatgcgtgtgaatgaataaattgtttgaaccctgcttgatatattgtaaattatttcgaattttttaaaactttgcagaactacgttgtccattgtcatgtatttatttatatataatagaattaaaactatttagatgtcaatttaaaaaattaaagtttctcgttctaaaatgaatagctacaggaggttatcttttttctccggccacccgctagccttctcttggcatatgtgcagcttggtcgggattgtgttttgctattgtcattcaattttactattgcaattagtcttttctctgttaagtagttttgagtattttagtgctgtctctatgatatgattttgagtgtattgttcttgtttgtgtgacatgattttgttttgttttatttcgttgttggttcttctttgttcttcgatgactcgccatcaaatcacggttatatgttgagaataataaattctttgcgactaaagaggttgttagtagtgcaattacgtgcctttgcacaatagttgagtgctcaagctacgaggttgaatgaatctgcagcaaatgtttatactattgtgtcttttaagcggtagatgatactgaatatatgttcttaaggttaattatgatgctgcaatctttttaatctaatttatttttggtttttttgtcaaatgatttgagaattaggcagctgattatttaactcgtttttcaaattctaattctggtggtgtctccaacaaggagatgtccttattgaattgcaagttattattgtaaccgattgctattaataaaattacacgatttatttaaatatatatatatatattaatttaaatgtggaaaacaatcatgaaagagatgcatcaatgcatttgggataatttttatatcttttagcatatattttatattattttaattatgtaactaaattaattttaaattaaatagagagacaatacaaccgcatgtataacaaatttttatttaagaaaataaatccacctataaattttagaaattgaataatt

SEQ ID NO: 44899 - DNA, 2776 bp, Cannabis sativa
attataaaggaagataaataagtttttttttaatagattaaatactattttggtgtgattaaatctatcaaaaaaaagacatagaaatttttatattttttgtccagtaaattattactataatagagtagttttgctcttcaattatgagttatttgcagtttaaatatttaatatttctatctttattcacttatatactttttttttatgaattaaatattcaaagttatttttttaaaatagtttgtaattttttgatcaattttgaataatggattatgataaattaagtttaaatattataatataaaaatgttatatatatatatatgagtgtaattcactatttagtaaatgattgtattttttaaaaaaaaaacgagcatataattctcctatatatttataattaagagtttatatatatgatgcgaaaataggtgtattgatgcatcttcattgtattatatatgtatatatattttttaaaatgacagtgtacactgtagttatttaaaatattttacaaatttttatataaattttaacaattctagaattttagttcaacaatttatttcaagcttgttttttaaaataaaaataaaagtggaagataatatttaaactatattttaatactataaattatttaatttttttaaaaaatatacaaaatatatttataaatagctaaagtatactccatcataaataaaatagaattattttacgtgttgaaaatacaataaaaatatagattgtgcaactaattcttgtgtgactatagatagtttttgttgacaaataattaattagcttttcataataattattaaattaaattatatatatgaaatttaataattatattaatagtggtataatacattataataatgttaaatattaccaatatctttaacagttctcatattaatatagttataaatatagactttcactagtacctaagtaattttacaatacaaatatttttttaacaacttaataatgtactccagttcacacgaaataagcacaaccaatgagagaaataaatagaattataggtagattgattgaattatgaacccaatttttgtaccatggtaatctttttttttttattttttggctaggtgtattcttattttattgaaatggggtcttcttattatttattatatgtaatttctttttttggtgtgtgtggaaaaaggggcttgttatatagtaaaatagattctcagtatatagtaatattatatattatatttgtataagagtggttctagatcgaatcatgttatccacttcttacataataatctgaaagcatatctcgagtcatgttaggttaggacttaggaagtttttacataaattaagtttgtaatcatagcataattataaactacatttgtcaactttttaactgaatacgataaagtgcatttggaattaataaggaggaaagttgatgatcataattgtcttaattattttctcatcattacattcttaagttttttactactatttttattgttgattttattagtagtacttagtttatctttctcataattttgttctctttgttaaaaaaaaaagcaagttttcatttaacaaatagaaactaaaaattagttggttgtattgataaaaatagtcctgggacgatatacttgatatacttagtttatactactaaaagcaatacgtgcacttgtatgtataaattttgcaacaagtttttgacaatgttgtcggaaaagtggtgtgtttttaggtcttttctctttttggttttattgacacattagggataatgtgttatttagtttgggggaaagactttttttgtttagtttttgtattgttgttttgtgtatgtattaagttaagccaatgagattagtaatgtcgtctacattacaataattctatattaaatattaaaatatttctaatatatatagtacaaaattatttaaattgattttgcattaactccctgactgtatatgatcacaaatattaatgtgacgaagatattgatagagtatctcacctataaatacaagatcctggtccccgagctcttcactcgttctgtgaaaacatcaaattctatctaaagagagtagagagagcttggaagcccgattacgcacacaaactagttttcttttctttagtttcgttttcttttgtagatccaaagattgtggagctcaaagaatcaataactggagatccaaagatcgtgtggaattgaatctcaaagtattaatggctaaaagtattttgatcctttgttcatagtacataatgttcgatttaattctgcatttcatacacgatcatatgtgcttcatgttttacatataataatctaacatttgctatcagaacaaattatatacttttgccttgattatattcttgtatatacgtgagtgtatgtatatttttaatatgataatggtcgattcttgtttagtcgttttggtacatattattgatatgattattttcatccatcaattccatcatatttttaaaacttattttttcatatatatacatatagtcaagatagtcaagatcaaagaaaaatacaaaaatgtttctgatttacagctgcttatgggtagaaattatagtatcaatctatgttacaaaacactatcggaggagtcgtttaaaatggcttggtgtagagagatttggagcagatacgatattccaaagcatagcttcattg

SEQ ID NO: 44900 - DNA, 4362 bp, Cannabis sativa
  modified_base (4127)..(4136): a, c, t, g, unknown or other
aatcgagaggcataagatcctttggtggtgtattctgtctgaagcccttctgaccagggttattcttggtaagagactacatgttgaggatgttaattgccccttgtatggagtggaggaagaacattgaagaacttatttctcatatgcgatctggcattgcatttgtggagatcttcgccgtgggatatttttccagtggttaattcaggcatccgtatgtgaaactaggtcaagtttatttaaagtcttgataataagggcattaatgttgatgaggtctttatctatgcttatgtagttgttgacactttggcgagcccaaaacaataaggtacatattcataagctccttaatgtgaaatagtgtcttgactcttttgttattcttatgcagacttgagagctactcttatcgtcgctccttctcctttttgggtggaggattggcgccctccttcttaagattggatcaaactaaattgtgatgttaaagtggtactcaaaagctcgtgtatagcaattgtgttgctagaaactatttgggtgaggtgatttgggttagcacgacaaacttggcttttttggatgctctttgtggagaggcaaaaacgtgttgcttggcgatcattttggcaaagctcaaagattacgagtttatcattgtggagagtgaggatagtcatcaattctctcaatcgcaaggagattttctaagagattaagaattattcttctttttgctataagctttctactacttttgttggttgtgtgttttcttacattttcaaaacttgtaattttgctgctcataatatggctaagtgggcttttacccacaaacagtttggtagcttgcatgtatcatctattccagcagacttattttgtaatgaccatgaagtctaatttatgtttcaatgaatgctttatcttaaaaaaaaaaaaaaaaagtacgccttgtaaataaaaaataactatttataattaataaatatatatatatgaaacaccaagagtttttacttagttttgtagttaaaatctacatactccacgagtcattattatttttgagtatttctttatgatgtacttagattacaagaggataactatgaatattcactcaatcttatagggtctctctttcccaaaatgatcgatccatttccccttaggttatgtccctatttatagggttcttactatgactgttattcttttgcaatcttatccaggtaaccgatcaagaaacatggacaatccccatgtttcatgtatataacatgtggatgaaataaaaaatcgttgataaccatcttttgatcttatttggaaatagtcttttgttgtcgaggtgacatgttccaagtatggcttgtatctctcaatggtgttcaaggatagttggttgcattttgtgagaaatgctagttaagatgttatttttgctctatagcctttcacaacacaactcttagacttagtcttctaagattctaaaataagttgcactttccttttttcccttaatctttcaacatgttaatgagttacaagctcttcaagaactctttatctaccctttccagtgatacatttttgatctgttacactagagaggaattctatctttatcatctggccatacgttgcttatctcgctgtcttactgccaatatgtaatgcgagattgatattattcattattaattatctctctgagacaattcatttgctactgagttttctaaaatttgtgtctaatttttcacatgtcatgtccatatttatggttcaaaatatggacataatataatggaaaggtaccaaaaggaaaaacaaaaaatagaacattttgtgaaccttctacacctaaataccattagtgactaatcctctgtattactcatctaagcatgtatcttaacaccacccgtcaaatgcaggggtgagcttatcactccaaatttatctgtcatcatttttaaattttggatgagtgaaagctttagtgaggtaatctgctatctgttcttgagtggagatatgtttgacttcaattttcctttgtagcaccttgtcacgaaaaaaatgtacatcaagtttaatgtgcttcgttcgggcatgatacacaggatttgaggccaaagcattggcactcatgttatcacaccagatgactggtatggaaggctgagtaaagtgaatttctttaagtagagactcaagccaggtgattttagctgccacttgagccaaggctctgtactcaaactcagtgcttgagcaagcaataatagagtactttttagatgaccaagcaaccaaggtatctccaaaatacacataatatccttctattgactatctgtcatcgggatagcaagcccaaacggcatcacaatatcttgtgatggctaatttgtcattatacttgatgtgaatgccatggtgcattgtccctttgagatatcacaacactctcttagcagcaatccagtgtgttgttattagacattttaagaactgactgagcttgttgactgcaaacgtaatatctcgtcttgggtgtgtgaggtattacagatctccgataacacttctatattgtgaatagttagccaattctttactttcatacagagacaaaggtcttcctcctgtcatgggggttggatatggtttaatgtttgtcatatctaggcgcttcaataaattggttacatactttccttgtgataggtacattcatgtttcatctctgaaaacctctattcctaaaaagaagttcaaagctccaagatctttctgttcaaacactttgtgtaatctagaaatgaagctactcaattgaaggtcattgttccctgtgatgactatgtcatcaacataaatgagaaccattataacaaaccttggtatctttattaggaaaagagaagtgtctactcttgagttgacaaaatttcacttgagcaatgtttgtttcagttgttcataccaggctcgaggagcctattttagcccgtacaaagatttctcaagcttacaaacatagtgtggcttttctttattttcaaaaccttgaggttgctccatataaacatcctcttcaagcttgccattcaaaaaggcattgttgatgtcgagttgtcttacatcccaaccatttgtcactgttatggtaagaacaaccctgattgttgaggctttgacaacagggctaaagatttcgcaaaattcaagaccatgtttttgattaaaacctttagcaacaagtcttgctttgatcctttagaaattggcatatgcattaagctttttctttgaacacccacttgtttccaacaatattcatgtctgctcttctaggaacaagtatccatgtcttattttttatcaggacaaagaactcctcagacatggctctattccatcctttatgtaagagagcctccaagacagaactaggttctaatgtgttatgatgcctttttgtctatgttgaatacattttgggtttaaaggttccaaccttagacctggttatcatgtgatcacctgtttgaggaaccagttcaggcacacgagcttgttgttcaaaagtaatatcctcttatgtgcctattgtctcttgatcaattgtactcgtttgagcaaagtccaaataaaagtcattagtgagatatacctgatttgtgtgtgaaaaacttggcctcacagatggtggatatgcttgagttggctctgaatgatctgcatcagtagaagttgagtggttgagaatgtcaaattgtttatctatctgtggtgagttgtaatttgaagtaggttagtgtatgggaagagaaaaccaggagcttcaagacgacacactaacattaggttctatttatagttatttataggaaacctaatacaaatagaaattccctttcattgaaaatgacatgtgtagatatatagagtctcccgttagaacttaagcatttgtaccctttatgcacttaatgataccaaaaattcacacatttaatggagtgaaactaaaatttatggctttgtgttacaaaaattatgaacagtacgcaattgcacgtaatcaagtagtaaactcnnnnnnnnnnggtcgaaccacagggaattggattgagtaccactagaataaatttatgattctatttgaaaaatcaatagtttttatgattaaaaacagaataataattcaagaaactcaagtagacagataaagattaatcagatgagaaaataaggaagaaaatcttgttgatttgtttacccaattgttaatgcctaactgctatcctttttcttgatgtgaatgacagatta

SEQ ID NO: 44901 - DNA, 1129 bp, Cannabis sativa
aaaataattctctattcaagaagctaacttattttatgcaatcactatttccacatcgagattttcagataacgtagtaataaaaatatttttggttattacactatgctccttgatgtcgatccttgttctccatgcactggggtttgttctgccatagctttcacacgaacggacacaccaccggtgttgacaacgctctgataccaagtttgaatacagagagaaaacagaggaaagaaaatagacagcagtaatttgaaagaatcagctcaatgaattcattggctaggcattgtatttataaacatgtgtataccgtacaagaataatgacctaataatatttacagaatcacaaggtaatcattacaatcattacaagggaatattctgacaataattggttacaatatgggaccacataattctgttatgccagctcacaacttctagagcagtagggtaaatttcatttcttcactgaattttgttaaccagaaatttatgaatgaacttatgattttttcaaatttatatgttatgaattttcaagattaaattaacatattcttatgaaaatttataattaaagaacacaagttaagtattaacttccaataggtcatacaaggtaaatagtataatcctataccatctacaaatcacacttttttaaggtgatagtcatacatcattaaattatttttattaatcctatttttttcaaaattaaaatcagcgaacaacctacaattaatgatcaaacaaaagtaggttgacaaatattaaacatccttgaatgaacaaaatgttggacaccacaacacgtgaaaaacgtaattactttaattattgaaaaaacaattacatcaagacttgaacattttttactagaccacaatacaccaaatattcacactcttattttaatactggacacctttataacactcttgtgtataactcacacttttgaaacactttatctttatgttgggacactttagaacactctcttactcttttgaacacactttgaaggcactcttgttggatgcacaacttgaagacccataacccctatttatactactcaaaagaaaccaactataatattctagataatt

SEQ ID NO: 44902 - DNA, 5341 bp, Cannabis sativa
atgtggcactagcctataagaattattttaagcgttcttgtagactaagtttggtgagcttcatctttacgacttataaagagatcgtctcgaaattcttcatcatatcctctttaaatttattgatcagatcctcattatttcgtatgtagatgagatcatcaacgtataaagagacaataagtgtttcattcataccttgagtcttgatgtagagtgttggctcactcttgctcctcttaaatccttgcttcgttaaatagttgtcaaatcaacttcaccaggctcccagagcttttcgttaggccatataaagaagtttttaatctaataattatctttttgttcttgcaccactaacccttgaggttactccacatagatttcttcttcaagatagacactgagaaatgtcgaatttacatcgagttgaaaaaccttccatttcttttgtgcgactagagcaatcaatgccctgattgtgtcaaggcaagaaactggagcaatttttttattttagttgactccccattgttgcgtatccttttgcaactaattttgctttgtgtttttagatagagctatctacgtcgagcattgtcttatagacctacttgactcctaaaatgtctttgtctagtggtcgatctacaagctcttaggtctcattcttctcaatcatctttatctcatcattcatagaatttctccatacttcttacttttgtgcaacttcaaagctttctggttccataatcactacgttgcatgtctcatagatctcagctagtgatcttgttcgccttactgtggggagtgaaaaacatgtgttggttcgatatggttgcctaagttgaaacttcattttgattaggttgttatcttggcggtagaggaatattgattgtctttctttcaacttcttctttctcccaattgtatatatgtaacatctttatcaaattttacatcttggttgattataagcttatttgattctaagttgtagactcaataaccttttgattgattattatagccaaagaaaattcttttcttggttttttggtcaagcttgcctcttttctcttttggaatgtgagtgtagcacatgaagccgaagtctataagatgttttgttgaaggcttacatcctctccaagcatcaatcaacatcttattctacacagctttggttgggcatctattgagcaagtagactgcaatgctaattgcttttgcccaaaatctttttgggtcgcttcatcatggtcttgttttttctcttagatacatcattttttcctggtgtgtattcaaccgtgagttggtactccatgcctttattttcacagaacttgttgaattcattagaagtgtattattttcctctatcacttctaattgtcttgatgtagtggcttctttgttttttgacacgggttttaaattttttaaaaatatcaaagacgtgcaatttttgttgcataaaataaaaatatgtcattctagaaaagtcattgatgaagagaatgaagtacttgttttgatcatgtaatggagtgcgcattgctctgcaaatgtctctatgaatgagctccagtggctttttggctcaccaagctttgtcgcatggaaaaggttgttgatattgattcttgagcatgcatccctctcagactgtgttaatctccttaattgctggaaggtctcacatcatattcttctccttgaggatctttagcccatggaagttaaagtgaccaaaacttctatgccatagccatgacttgtatgttttcgcttgcattgccacactgcttgcgtatctccataatataggaaatcatctattttctctcctttttacctataaaatttgaaagaatttatcttgcttattatagattgtgcaagaatctccttcaaaattcaaagagtacccttttttaatcatttgacctacactgagtaagttttgatcaatgtttgctaccaagagtgatgtatctcttaccttttaaagtgtcaatgtcaatggttcctttatcgatttcttccatgaagtcaccattaccaattttgactttagtcttggttttaacaagactacaaaatatgctttcatttcttgtaatgtggttactgtaaatactatcaagataccaagtatctttaacttcttctattgtagttgagcagacaaaatatattattcccatattcttctctttagtaaaattagcttcatgagatttctttaaactataatttttttctttgtgcctaaatttttacaattttggcattgtgattttcctataaaccaaaactctttctccaagtgactttttctttttcaagttccacatcaagaatacttgtcattatttatttatttttttttctgtttttcttgtgtctttttcccattagccttttgtttttgagaccacgaatttattttagactaaaagacatttttatgtttcattttcattatgcctttctcgtctacttttgtatgcttcaagagaacccattagttcaattaatgatagagtttttgagtctttcgttttctctatcacaaaaactattgaatcatattttttgtgcaagaaattagtattattttgtagtatattcttgaaaaaaattatttccccataggctccttgtgagagtcagagtcacgtgatcctgaagggaaaataccgggagttgtgcaatcccacatcgcctaggagttaaatgtgatgattcaaagactgtgtagatatgagatttcacagttgtagagagtttcaatgaattgattgatattgcctatatcaataaaattcatcttctttttggtagtccatcattaaagaactctaaagttaagtgtacttgacctgaggtaatttcaggatggtcgacctcttggaatgttttctcaagaagtgagcgagtgaggacaatccacgctaaaaatactcttgttggtctgtagggtcagtcatcattccatgcagcagccaagagggacatatctgtgtataagagtcattaatcgtgaaaaaagaccgaatgtaggcttgaagcggggacgttacactctcatttgatttactatctgtttaattctagaatagtaatcttttgtggtctcattatctttcattctaagatttttaaagtctctattaagtttttgtaatctaactgtgtgtacactgttccttggaactcctcctacaacgtgtcctatgcttcttccatcgttgttgcgctcataattcgtggaaaaagattgtctgtcatagcttgctgcaagcagtgtaatgcatgaaaatccttttattgagtatattttattgccttcttctgatctttcgaataggatgtaatgtcatctagagttttgactccctcttcaacagttttccaaagattttgtaattaaaaatagctactaattttaattaaccaaaaatcatagttttatccataaaaaattagaagaggtaaagaagagcggttggattcggaactcatagtgatgatgagtagcaaatattatgcccattaatgatcgaacagaggtctgataccactgatggtttgagaattaatttttattagtttaattagtttagaatatatgaatatgtaggataatgtgtttaatgattgttgtggtaatgtgttgtagttttgatattgatgagtagttattgatttagtatatgagaattatttggcttagaagacagaattgtatgtagaaaataataagctttattaagagtttgtagttgtttggtttggatgttggttacaattttgaatcctaacttgatggtatttatagtagctcacatatttattctagatctttattctattaaaaagaactttatccatacaaatgtcttatttctaaaatacaaactagaattttctacaatattaatttttagaaatgtttataagaaattcttgaataaatttttttacacgtacctaaataatttttgagtaaactttttcttcaaatgtgtagaaatttctaaattaaagtattgtagaaatgtgtagcacattttgaatagaacgaaaggggcaaatacagaaatcaactaaagaaaagacagttgacaagggaatgtatcagctattagtgggagagctgatctacttattccacagaagacttgcatttgttcccaacaacatggatagttttacatgcatatatcattagaggaaaaattggagtttgtgtatagagtacattacataaagggaatactttaaaatggataaatattcctcaagaaagaaaaaagagggattgaggcttttacagatgcagattattgggcaggtttagtgtgattaaatttagaagtgtttggttaaggtgcatgaggtttcatctgatcaaaatcaattaacaatgaaaggagtagtccatttatcttatatatgacattttattttttcaaatgaaaaatgtgggacaaactctaatacacactcctctcgtttaggcctaaaatgtgtgagtataacgaacgactttaaagagactatagggccaaatgtgacatttgaaagaaattcacaaggccaaatcaagttctcaaatggtggttgaagggaagagagcagaggtttttttttttttttggctctgatagtatgttagaatttaggaatatatggtaagggatatagtgttcaatcatctcaaaaataattagcaataagaggagttgtctattcattttatgtatgatattttatttccacacattaacaatgtaggagtaactctaataatttgtaagaacatcaacaactggattttgtactcatgtattagggagcttagtcacatggagaagcaaatcaaaaaaaaaatctgtggtaactcacaatagtgttgaagctagcataactgagggctcttgcttagagagtatgaactgttatggattagaggaacatgtaaataattatagcttcaacgaattgggcctttagagttgtactgtgacaataagtatgcaatcgacgtagcacataatctagtttatcatgattaaacatgtttgaagtattcaaacattttatcaaaggaatgattggaaaggagttataagtgtgtatattcctagcaaatgttaaccgaaggcaaaaggagtgtttaactagctagtttgcaatctgggcatgtggaaatagttatgcaccagcttgagtgaggatgtagaaaatattttatatgtagcatttattcggtgttattattataaagaaacctagctgtataaatttagaaattatt

SEQ ID NO: 44903 - DNA, 5046 bp, Cannabis sativa
cctgatgaagatcaagaggagtataatgcttggtgtagatgtaacaacatagtgatctcctggattcttcatgctaaatcaggtgagattgcaggcaccatcatgtaccatgacaatgctgttgaaatctgggaagagttacacgatcggttcaatgaaaggaatgccccaagaatttttgaggctcagaagattgtgcagaatttaacacagggatcaaatactctcacaacttacttcacacgcctcaaatctctttaggatcaaattagagaatatataccataacctatttgtagttgtggtgctatgaagatcattcatgagtatcaagaagaggattgacttcttgaatttttggttggattgaatgattcacatagtagtgcgagatctcagattctcatgagagatcctttgcctagtctaaacaaagcttatgcagctgttgttcaagaggaaagatagagatgcgtaacgagtagtgcaattagcagtttagacattgacaaacctgcttccaacacctgaggacaatttgctggtaatgttcaaccttataagcctaaatatagttgcactaactgtggaatgacaaacatacgatttatagatgcttaagaatcattggctatcttcttggacacaagctccatggaaaatttcctaacagaaatgctaagggtcctccactgaaacatgcttctactaatttgaccactggtgaagaagacaaatcaaaggataatgcacctgaaaaggacttgatgtctagtttgtccaatactcaatgccaaaggctgatgaatttacatgcttagaaagttgcagataattcaattaccaattttgttgatgatcaacctattgtctcccacttttctggtaaggattttctcatccatacctctaattggatcatagacacattagccacaaatcatgtgtgtcctgatctctctttatttcaaaatactaataataatcccgttctaaagttgtcattttacctactagtttacaagctaaagttgattgtattggatcaattcttgtgaaccctgaccgtactcttgaccatgtgttttatgttcattcttttaaaagcaatctactttctgttaactctttgacaacaaagactaattgcacattcatgttttctaatgacaaatgtgtcattcaggaaaatatgaggagcaaggtgattgggatgggtagaaaagttggcagtctcaactaccgaaacagtgatccatccaagagcaatcacatcccttctattttttttcctctatttcaaaatctaaaatctctagtgaaactgtttggcactataggttaggccatcaatcttgtgtaaaaactcatcatttgaataaagctttaaaattacattcagattctaattccctttttcattgttctatatgccattataccaaacaataatgaaagctaccattcatctctaatcacaatattggtaaacgatgttttgagcttatacatgttgacatatgggggcttttaataccttaaccacagagggatataagtatttcattactatagttgatgatttttctagatagacttggattcacatcattaaacaagaatctgatgttcaaattgttatcccacagttcataaaactgattaaaaacgagtttgacactactattaaaggacttaggtttgataattctaaggagctacaattgaatgaaatttttcatgaacttgggatcatacattatcactcttgtatccaaagaccacaacaaaattcttttgttgagagaaaacaccagcacttactcaatcttgctagagcccttttatttcaatcttatgtaccttttgtttattggggagagtttgttgctacgacatcatacttgattaatagaaccccaacacctaacctaaagaataaaactccttttgatatccttcacaataaaccacctacttatgagcatctaaaagctttcgggtgtctagcatatgcatctacattgagtcaaaacatcaaaattttctcctaggtcagcaccctgcattttttggaatgaaagcttataaactccttgatttgaatactaataaggtgtttcattttagggatgtttatcttgatgaacacatatttccttatgtgcatgctggcagtgttcttgttgactatgagaatttttttcctacacttcctagtggcaatcatgagcctgtttcgaacactttccccatgccatcacttcccgtttctcataatcatgaaccagtttctctcactcctcatactagaagagggagaaaaatcaacaagccatcttacttgaataattatcattgctatttggcaactcacccttctattttttcatcacagggttctttagtcagttcttacgctttatctcaagaagttaattatcacaggttatctcccactttcagagcaactattctcaccatttccagcaattttgaacctgaattttttagtcaagctcatgcatacctgaatgggacaatgctacgggcaatgaaattgatgcccttgaaaagaatcacacatggatagttgttactctccctgaggatcaacatgtcattgggtgcaaatgggtgtacaagatcaaactcaatgttgatgggagtattgaaagatttaaagcgaggttagttgctaaaggttacaattagcaagagggtgtggattacactgacacttttgcacttgttaccatattggttgctctcaaattagtcttggctgaaaggatggcatttgcatcagcttgatgtgaataatgccttcctacatggtgacctaaatgaagaagtgcatatgtctctatctaaagggtatagatctaagggggagttgccgccaaacccagttcgcaagttacaaaaataactatatggacttaaacaagcctcaagagaatggtttgccaagttctctagtgctctcactgatgaaggcttccatcactctgctacggatcattccctattcattaagcactttgatggagggttcatctttattttagtatatgtggatgatgttatattagctagcaataatctgcaacagctggaggccttgaaaattaggttgaatgacagatttaagctgaaagatttgggggaactcaagtactttttggggctataaattactagatcaaacaaagtaatacttgtttctaaaagaccctatccactccagctccttgaagatcttggattcttaggccgcaagcctatgaatacaccaatggatggcaatctgaaacttgggcaagatgagaaagaaaacttggctgatcctacattatatagaaggattgttggcaagctaaagtatttgaccattaccagacctggcatttcctattctgtaaataaactaagccaattcttgtccacacctcgggtatctcatccaaatggtgctcaaagggtgctccaatatgtcaaaaacaatcctagacaaggattttttttttgtagcagatacagaggtaaaaattcatgcatacactgattttgagtgagtagcttgccttgatacaaggagatccactacagggtttttgtgacacctgtacttgaaaattaactaaaaaaattatttttttattaaatttataaaattacgtaagtcgggatcccgaatttaagaccactgttgaaaatacatataccataagtatagttacataatatatatatttttacaaaccacagggcgataacaaaaatatgaatcaaaagataataagatcgaaaccctccaggatgcactgctgcgatatatacaatccttaccgagctccaactcactgctcctctaccttagcctttcccttacctacaaaaggtagcaaactaatgagtcgacatgcttagtaagatatgcataaaacatatataagtaatgcggtatcgactttgtacttaagtcgtcctgagcttaaatgcaaggctcaccaaatggttaagaacattctcaacaaaagtacgatcgctgtaccacatgcagtagagtaccgacttcacagttgtgtttgtagggccattactgtacttttgggagttactgagtgttgtaccacatgcactccataccccctagtactcgtattggtaacaccgtaactacccttaaatctacactgtacgaacacccttagcactatgactataccagtgttagtagtgtaaacaattaataacacacattcattcattcacatgtatactttttgctaatcttaccttgtttatgtgcttaggtgtgccggttagcctgaatgatacatcaactcgatgctttacaaggccctatatcacaatattcgtaattatgatgagagacatgctaaaatacttttcggtgacttaaaatcaaaactaaagatttccctatcgataaataatatggaaataccctaaatatcacaaaaataggaaaaactagggttcagaaaattatcccaaccggtagaccagttccttaaccgaaatttcggtttagtgggagttccttgggaccaactgggcaaccagttcctacaggtcccctaaaccgaaattctggttcagtgcaggaaccaccaaaattgcccccagcttctcaattcaacctcaaactttccaagaacttccacatcacctgcatatactccaatatactcaattcaagaaatagaattcatcaattaacttagaattcaaaaacaccattaaagctctaagttgagataccaaactctaatcttgcacaaaaaccactatactcaaccaacccagcttaaaataacacaaataatctcatcttagctccaaaatacaaaagctaaccccaataaacacatcaaactagctcataaatattcaacaacaattcaacttataaccaataaaataaaaagagtactagagaattataccttgggttgagagtctaaaaccttgctgaactccttgaattgaatcaacaaaatgttgggttttatgccc

SEQ ID NO: 44904 - DNA, 2721 bp, Cannabis sativa
  modified_base (1271)..(1271): a, c, t, g, unknown or other
ctttattgatgttgaataaaatagattacattgaaatggagtaaaacccaacatttagttgccttatacatactgagaaaaaatacaaaaaagaacctagtgagcgagattggcttttggtaaaagttatgtgtaaaaaacgaaattgttttacaatgtcactgtgatattttttagaactaaatatcctactgccaatcatttcttctctaagatttgtgaaatttggttgttgcttaaggagtgtcttaaatatttctatgatgatattaagattatggcatcaaatatgatagataaatttgagcaatattggacttccattcatggcatattagccatagcaactattttggatccaagattcaagataaaattgattgagtattactttccaaaatttatgttggtgaatatcaaaataaagttgagtgaattagaatgatgtgctatgatttagtaaaacaatataaactaaatgatggaaaagaaaatcttcttgattctttattcaatgtttctggagttggtagagataatgatggatgtgcagatgatttagttgattttgacttatttgttagtagtacttcaaatgtggaaacttacaagtttgagttagacttatacttgaaggaagcaatttttcctaggagtggagagtttgatattttagcttggtggaagacaaatggtattaaatattcaatattataacaagttgctagagatattttggatatcccagtgtctacaattgcttctgagtctgctttcgaaattagtggaagacaagtgacttcttatcgtaataggcttcatctgaacatgttagagacattagtatgtacacaagattggttatgggatgagatactaggtatgtttattctaacttactcttattatttaatttcttttatattaaaaaaaattaattaataccaatattgtttatttcttagatgcatcacaaaatgaggcttcatatagtacattatttaatgatattgaagatgatgaagcagaagttagcatttgtttatttgtttgtttactatttttttctttaaaatatctatttacttataatttatgatatttttattttagaacccaagttttatggatttcgatacttgaagattaaagactcttgaattgtggtggtgattactactagattttaaagttgaagatgaagacattattacaatttattaagttttatgtgtttgtttagatttcaagtttatgtttatgttttaagnttatgtttatggattttaagtttaacatggaaggatttttaattttagaatttatctaaatgaccatcaattatggaaagaatttagtttatgttgttttaatttagtgtttgtaaatattaattttgaatatatataattattattttttgcatttttgtaataaacgggtccccattatggtgtccattaccaatggggattcctcgtcccgttctccaacggggaaggagcggggacaggagaaaaactaataggcgagtatgggagcgagaaatacattccatgatttgccctgtccctatgtgcatccctagacctagtagtgcttctagagatgccgccagaggttagttggtacatttccattagcttaccagtatgtcgctagcatggaacgtggcctaaacctccaagagactttgtggtccgtcttggccacaagtctcaataagagatggcaaaggtagtcattcgtgtgttagtttgcatacgcacatgggatagatgcactatgctagaaagagacagaggtcttacgtaagctaccagtttgatggcttgtcttgaaggcctgccgacatgcgttgaagcatggtgccttgaggattggaccatggacgtatgggagtccttgggccatgagggagactttcgaacaatatcaaatgggacatgactagaggcgtttggcatgtcaatttggtgttggcatctagccacacatgataccttggtcacaagtgacaatgtgaccgatagtattgggatttactttatcgtatgagaacctatggatagtgtgaatattgtggctagagagtctcgatgcatggatgcacttacggatgcttgcgatcatgactcgacaagagttgttcgagggacgaaagtgtaaaggaggcacgcagttacgcaaaaaatgagcctattgttactcggatggttggaaggatgatcttggattagagaagtcaaggtgccacatgggtgttctgctggcagagaaggtgagccaatgacagttagtactagagtcaggttcatctcagtgggaggtgaaccttgttggcctatcttagagagaatgtaggcatgaggaaggatcaagatggtccaaatgatataacaatactttgttgagctagttagtttcctaaagtggatcaataggccgagacggagttgagactaggttgcttttctttgttggaatactggacatcctagagagggggcagtgatggttacttcaaatagttccaggatgctagaaagacaactaccacgtgcaattatagagaggtgctaaaaatggttaaaactcgttgtcgtagtacaaggtttgattgtatggtccataccctatgcttggtattgttggaaattattttaccagaatcttagatctactaacaagtatgtttattaacatcctaaataagaactt

SEQ ID NO: 44905 - DNA, 2477 bp, Cannabis sativa
attgttggattgtttgagggctcaatactctttaacaatgtatattgtagttatattaaatattttactaatttttaagtaattttaaataatttatgatgtaaaaaaaataataaataattaattacacactaaaaaaattgatgctaataattgattgtttaaactataattttagtatcacaattattttaaattttctaaaaataagtaaaatattaagtataactaccatatagatcattcattttcttatacaagtattggataataaattttcaaagtaccataaatataagtagcacccttgcctagtgttataatataagttagactttttgacacgatacgaaatcggcacgaagtcgagagtcgagaggcacacgagcacaacgtagcacgtaataatatgtgcttagacacgacacgatacgaaaaaatatagaattaggtacgacacaacgagaaatatggacttaagtatgacacgacacgacatgtaaacaagaatagaaagcttaacactttaaaaagtccgataatttgataataatggcagtaataatatttatttatcaatgaaaatgatagtaatattaaaattctaataattataattattttttatataattgtgtgtaactattgttaagtaaatattaaagtaattaaaattataaaatacatatatatttattaattagctcatcaattgtaataaaaaaaacgtaaaaatatggcatacaaatttgagctcttataaaaaataggttcgtttatttaagaaaaaaaagccggcccaaacaaagcacgtcacgaaactatcgggcttgcgggtcgtggcagacctactctataaaattgttgcacagcactgtacaactcatattttttttataacacactcgacacgatctataattttttatggcctgtcatagaacgactcatattttaaaaatctcaaaatatataagtcgagctaatacggtatacacgtatttacaattatgcccctacttaaaaattcccctacaatatgtaagtattcaacttttttacccctttcattaaataaattaactttggtatatgtagacaaagaataaagcttaaaattctactttttcttaattagtaatttagtatatgggtaccatcgtacttgacttgagttgtggtgaattgtaacataaatagaaagtaaccaaaggttttatcaatctattctgttagtaacagttattttcatgtgcagtgtaaattatcaaaaagtctttgttttattcaagcctagcttctttttttttcaaaaaatctgaccagaatgttgcttttgatggccatgttgttggggttttagtgtatatctctcaaaaattgggaaagaaaaacacaaatattaaagaataacaacaataagcaaatcaataggagtgagtactaaaacaatgaatcaatcacaatgatccttacataagctattatgacatttgttcaagattgccaaaaaaatgcatatttcaccaaacccgaccgagccacccgtttgaaaccacttccaccctcactccttagagccacgactcttcgacgaaaagcacaagccccatcgagcatcgaatacctaacttttgtaggaagttggaggagaaacactatttttgtcacatttttattcatgataaaaaaaatttaatgggtaagtaatttatattaatgctgtttaaatattccatgtgtagtttatttatattattaaaaaaaatcaattttggtgaaatttgcatattttaattttcaatctcccaaaaaagagatagaaaggaaaatgattcaaatgacaaagtataattgaaatcaaggaaaagatagatatcaatttgagagggtgttgaatttatggttattttttaatttttgcccaattgatatacattacaaatcatattttcctttataatttgaatcttacgtgtattatgtttaatattctactagagtttatagtctataatgataaaattaaatgaaaattacaattttaaactaaaaaaatctattgagtctatgtctcttataaattcaaaatactattacctctaattaaattgacctattataacaaattttcattattaagtctaaaaaatgtgtaactaataatgattaatcgaagtggtcacaagcatgatttattagttatatatttttttcttacaaagaagagatactaagatcaaatctccatccccaatataaaaaaatgattaacataaattgaaaattataaatcctattagttattattattaataataataatagaatttgaaaaggagagatgaaaatgaaattgaatattttgaagtgagaaaagagagggagttgtagtgccaaaccttgacggcacgtaagtaaacatcaaactaagtcaacccatttgtcagtaccaattaccaattaccaattaccaa

SEQ ID NO: 44906 - DNA, 802 bp, Cannabis sativa
tctctctctctctcactcactcaatcactcaggcacaagtcgacgtcgacactaatgacctatgatgatggctaaggaccaatctactactacaaaaaaagtgagtttagcatcgatttaaaacctatcattcataatttcactccacataaaaccaatattgatgtttgattgactaagaagactcacatcgaaacacatatgaattgaatatgtgtagagcaatgaataattgtaagagcggagaatttagagagagaagaagaagaaacataatgaaatgaaatgaaagctcaatttgagatgtgagatgtaaggccttctataaaacttgttacaaaataaagtttacaccagtcgttaataacaaataactataaatgacagctaaggagaataacaataataatagaatgctaaaaccactaaactaactctaacacccccctcaagttacactcgactctcgaatcgttacttgtctctaaatatgtcaaattgaagttgtggtagtggtgttgtgaggatgtctcctatttgatgtgctgccaaaaaatgtctgatgtcaagttgttgagcaagcactctgcccgtaacgaagtgaagatcaacctcaaagtgttttttctattgatgaaacataggattggacgcaagagatataggtccaaggttgtcacaccaaagaatgggacatgagggaagttgtaggcctcattgaagagtgattggatcaagattagttctgtggtggcaaggaagatatcacggtattctgattctatgctcaagtgagcaacaa

SEQ ID NO: 44907 - DNA, 1242 bp, Cannabis sativa
ttatcttattttggacaaggctatggtggtgaatacagtgtagtgtttgttccagttcacatataaaaataagttaacgccagtttttgcaacaactgccttacgtttccaagaaattctgaattgcgtaagcttgtgaattaggctgaatacaggactttttaacacttgggacgtacatgataaatagtccggctccttttgcgattatttccttcatagaagtcatttcaacaattcattaggaattgaaatgaactatgaattccattaaagtagtcatttttttctcgaaaggagttgcccattgttcatctctcccaattttttggtaattgatttgtcctgcattttagactgactttatttcttgctacaaatatattatgcatgcagttacctggagcagaaaaacttcacaaaaaaataaaaaagctttccaataatgtaaaaaacgtcaatggtggacaactggagagaataagtggatctcattagggatggtagcaaagatgagaggaacatggcgaagaacagagaagtttttcaaattttgtattagattgaccagttattacttacaggatcctttcacccattttggcatataggctttgagagatgttgattgtaatgttgacatgcccaatgatcttaaaggtctgaacaggtttttaggatttgggaccatgtcaaaaaggaattttgttttgtgatatcatatttaagaagttttgttaggaacatactatagtgtaagccttagaaatttgaatacatggcaaaacaaatgtcaagtaaaacataattaattaggctaaaagccattgcccataggtcttgcctgggtcatggttgattttctgagtttcttatattaaatggatgaaatcagccatttgtggttaactgaataccctttgctgttttcttcaaatataattttttcttattagattgaatattgtgatgtggacaagttaaatcccaatttctttgcactgaaattatcatcgttttagtttttacttttatcatatacagtagccaaactatataatacacctgtactattttttttccactaaaaatgatccccgagttctattgctagagaaaattttagggaaacactcctgtgccttaattactcttggttgagacttgagagtgggaccttttagagagtttatcttatttgttaatttaaattttaaatgtacatataaagtgtacttatat

SEQ ID NO: 44908 - DNA, 2281 bp, Cannabis sativa
aagccagtcgtgaagccgaagcccacctcctcacagcttcttcgggaaacccacacgccaccatcttttccgtcaaccaaactagctcagccgccagcttctcagccgatctcccactccgactccctccctccctggctctcccgccaccaaccttggtccaagccaagtccccaacggatcgaaccactcgcaaaaccttgtacaacggataatcaactgggccaggcccattcccactctcggccgaaacttcaggcccaacaacacctttctccaccatatccaactcaagctgcccaagagtcctcgaaaacgccgccgataaaaccgtccggttaacttcacgcaaagcaggggaaacttctctccggttatcctcaataatcttctcagccaaagaccgaaccacttcgtacttccgtgaactcaccggaatctcgctcataatcgagagcaactgcgaaagcgctcgaccgattacggacttctcccccccgtcgacggcgccgtcgagggatggcggagagtgagcgaacgcgccgccgtccttggtgtgcttaagcgagtggaaagagaagtaatttggggttagagaagggattaaacgaaggagaaagaggacaaaagcgattaggaaagagcgaatgagttcgaggagtctgtgcttttctgtaaaggtgagaagagaattatcggcgtaaacgaatatggagtaaaccaggtttcggagaagcatagagcctgtttccatggcgattatctcgatttcttttctttttttcgttgttgctaaatttagtatgtaatataaatatataaataaaaattattattgagggtttgtgaataaaaagaggtaagttaataagagaaaagagatgaaaatgaagtaagtgggtgaataatttttctggagttttgatatatgtatatatgtagttttatcatgtcaattaatatatagttttaaatatctcataaaaaaataataactgtatgtatatttgatataattataggaagattttgtgggagtatagtccttggttttggaccgtagaaggataggagaattgcatctattttgttagcatgttagcagttgccttttactttctaacccaaaaataaataaataaataaaaacagttgttgacaagtcttccaacgacggatatagctgttacacaaactcgtacgtatattatatatcaatatcataattattatttttttaataaatgtagtcatagactaaaacttggtagcctttggaaaaaaagaaaaagaaaaacactagaactaaaacttggtagtttggtttggttagtacttagtagcacatgggagagagtatgtaggtgacaaagggctaaagttagaattagaagaggcaaataactatattgttggccaacagatctcatttgctcctagatatatagagtagagtagttcttgaatgcaaaacttatgtcctagagtttggagagaatggtcatctaccactctctctttgctaagtgacttcctattcggttctttcttttcttcctccttcttcccattgttggtggctgtgtaagtctcatgtttttccttcttggtagagtgtggttgggtcttttcttttttctttgggcttaggcttctctgcacctgctctttggtttttttttttcggtttgtgctttttgttcctgtcctttgttgtcttgggtgtggggttctcctgagaagtggggtaggggttggtcgatgagttgagtgtgttggtaaggttgggttgtttgtttgtgtgtttggtagcaggtcatttatttgtttgtttgctttcaatggctttagttaatgccaccaactcctccactaatggaaagtgttattcttatgaggaagcttctgtcaaaattagtccttgtgcctcttctcagcaggcattatccaccttttgtcttcttgggaaagttgtggccccaatgaaagttaatgaggccactattattgactttgtggaaaaagtttggaagtttaatgtgactgtggttgctttgaatgatggtgctaacaaccttaattgttttgagttgggttttttaagtactgaaaaccgcacttgggctcttaaacatggtccttggtctgtacgtggctacacttttatcttgaaagcatgggcgcctaggaaggaactttttggtgtgtttgatcacgtgaaaatctggttacacatttttaatctccctagagactatttctccattgttaatggcaatac

SEQ ID NO: 44909 - DNA, 2306 bp, Cannabis sativa
ggggggggtgcatggccacctcttaggtacacatggttctgcccctgcacttggatgagatgagaaatgctcttgtttgagtttaagttataagcctgattcttttttacttttgtctcttaattttttaaaattttatcttttaggggttgggggaaggggttttgaaaggggataacccatgaactccagaactttggaaatgtctactttccttgaaaaactcaacaaccttttcgccctatgaactcataattgagaagaaaaagataaggaagaggaagaaatttaaggtttaaagatggaaagaaaagccaattagctgtatatcagtattgaaatgcattttttacactgtaatgtctttacactactgttgttcaactttcaggtaggattcgccttataaagactggcgaaagcgttagcaatatttccttggacgatttaagtaagtctgtctttatcaaaataccctaacaagccgttcacatgctaccatattctaatttgacataacattttgatttatgtgctcatcttttaatggcaggagagggattgttttagcttagagacgagaccgagcaatagtgaatgttggtcatgcctctttaattttgtaagaaatttatcttgcatcttagttttttagctgtaattaaacgcagacagatagatgctcaagattttagaaatttttatatacacaagataatggcatttctatttgtattttaccagtttcaactgcagtttcgacctacatactggtatgtacacactacacattcactatgcatacaattcaaaacctttagttctgatttcacatattcaagactaactatatgcaactaaatttaatgaaaaaaacaaagttaattatctatacatcgcatagtcatggcttgttttaatgagttattcatacatatttattttattgctttagcatatcttccactcaatgccaatagatcaatctcgaagtcttagtttccattttgtctttgaaagcattgttgatggttgaaattgaaagtgccttctttgcataaaatattcttgtgcaggcctagcttattatatatttataattagtagtagaaactagtacatggaaaagatagtgtgtgtatatatgttataatatttatgaagatccaactacacaagttggtgttattatatcacctttagtttccaatataagagtgctttgcaaagcaattggacccatttactattaaaggcttgttttctttcctaacttttattgtcttttagtactgaaaaaggtgatcagcatacataattaggctgtagtactaaaccttaatgcttttgaattgaagaaagattatcaacttgcccttaatgcctattcttctttatgccattcatagacttcatcttcatagtgatcttgaccatttgtcctatttttaaaagtacattaccaagatttgctttttctttttttatacacactaatttttactagatactatagtttctctgttttttttttactatataagttgtatattgtatatatataacaactagataaaagtaaactaattaaaagtgtttaaacggtagcaaaatgtaggaacttttgtattgtgtgtggctgaagctccaagttgccaaagcattgccatttggtgaaattttgtaaagtaatattttctcgataatttttgtcttatgagtattttccacatatttaattatttatatatagtcttggttgactatagttgttccaccaccctatcttataaaagggcctatttaaaaaagctgtagtggatactcatgtttaccttatttttttttttctcttgaatagaatagaatgagattttattatcaatagttcagaaagtacgatttgaatatgaacaaaagtcacgagcaacacagtgtgcagtcttgttaacaaaatttaacaaaacaaattttgacagaatataaataagctaatagaaatttacaatcactcactaaagaaccaaacaaagatgacatttttatcactctgaattgcttgtacatcaactaagcaatcagtttcaacaataatattttgctagcactttcacttaatcaaactcaaagtctccttaacccccaaaacttctgccataactagttgaatacgaccaacttgacttacataaaatgcttctaagttctaacaatcgcttatgactatcctaagttatcccgcctgctctaaatatgtcttctgaatcaatatttatcttaatcatatttaaatatggtttagttca

SEQ ID NO: 44910 - DNA, 2626 bp, Cannabis sativa
atagatcgatgtgatctatatgactctactccagtttctagaacaccaccaaattctctctattgattgagtaagaataggtacaatatagtcgagatcgattctttgatgagttctctcaatgtgtttcaacactcacactcttacctaagaattttctttatctatagaagattcttcttacaaaactcaaactcaatctctctcttttctctatacctctctctctctacctcttaatattttctctctctcaatctcaatctgatcgatgttttgaaatgacaagtgaaggtagtctaggctttaggatcaagatcctaagtcggtggcgacaagaattgaggttgttaagttagttaagcaataactaacttaaccaactctcctttaagtaaggtctccacatcaacataagtagaagtacatccggaagcgagtatgagagcttccggagtcacgtttcaaggcactcgctaggaccttccagataggaaaaatccagctagagatgactatccaagactaccttccaggaggaatagctagccatccagaactcctttccagaggaggactagctttcctgaagacccttcctaaaagaacaagaaagccttccaggacttgaatccgcgagtcaacaactttccaagaataatagtaacttttggagacatttttatttggaagaactatacgaagaattccacctagttacttcaaattaaaagaatcatgatgaagaaagaattcagccatcatggttggtcttctaggaatctttgtatactaacttttgagattgatcaagttcaagcaatgcttatgttctaaccttaggaaaattatcttctgttctaaccttctctaaatcaactagcccttcttctatcttttctctaatttagtagaggcttatatctatatgtttgctattttcataataagctgggttcttacaattatggatggatgactggctatccgaatacacagtcactccccctttaatttgttttaattcaaaaagaattctccaaagccatagcgcttccttgaatgcttccgtagtagccatgaattctgcttccgtggtggaaagagcaaccacggactgtaattgggccttccagcttatacagttacaatttgtgaagaaaatgtaggaagtggttgattttctagtatctttgttcgaggcatagtcagcatccatgaacctttttaactccaattctcattttgctttctcgtaggtcagaccacaatcccaggttcccttcaagtaccttaataaccatttgagggccttctaatgttcaatgcccgaatcggacaagaaccgacataggatgcttagagcatgagctatatcccatctggtgctcaccattatatacattaaacatcctaagactacaacataggttacattcttcatttcctctttctctttcaaattgttaggacattgtttcttctacaaaccgaattatccccctaatggaatggataaagtctttgtatcttccatattaaacttctaaataaccttcttgatatatttggactgcttcaagctaatggtcccttccttccagttcctagacacctcaataccaagtatcttttgaactagtccaagctccttcatcttaaattctcttttaagcttggctttgatacttttgatcacagatttatctttgctcatgatgagcatatcatccacgtagagcaatcaaaacacagttgtagattcttgagatataagtgaagatcatatgcggatcatttgaacccgatttgttgcatataagtatcaaaatgtttgttctattgccctgaactgttttaaaccatatatggattggttaagcttgcacactaatttaactcctttcctttccacttgaaactcatgtggttaccttatgtagatctcttcatccaagaatccattcaaaaaagcaatcttaatgtaaggcctggataattaggcgcgctacagtaattttctaattaatgtcccaccttagctaatcaaaggtttttcctcaaaaattgtgccaaattaaattttttatttaaaactattaaactttataaacatatatatatttaaataaatcgggatcccttgtttaaacttttacaatctatataaaaatacatttacaaacttgtcgcacaatgactacaaaatacagtccaagatgtcccgagaccgaacactccaggtcacgtcgtctcgacatgtataattatcattcgagctcagaactcacacttatccagccttcatctttcctttacctacacaggaaagtagtattgtgagtcaacagactcagtaagaaaaatacgtacataacatataatataatgccaactcgcatcaaggcgcccatacacctatccacaaggcttatcagataagtaagaacgttcttaacatttggtactattgaccatcatattagccactaccagcataatgattgcacttcatgttgggctttgtgccctaaataaaactctattttaatgtaatcttttctattcaattatcaataaagaaacatattaaatttcattgcttgtttaatgtgttatttggttc

SEQ ID NO: 44911 - DNA, 2297 bp, Cannabis sativa
cttgtctacttgtgcattgtatttttaatttgtgttgtccatggcttaattatggtcttgtttacagttcactttcagagtttggtgttcttggatttgagttgggttactctatggaaaatccgaactcattggttctctgggaagcacagtttggtgattttgccaatggggctcaagttatatatgatcagtttgtgagcagtggagaggctaagtggttacgtcagactggacttgtagtgctgcttcctcatggttatgatggccagggacctgaacattctagtgcaagattagagcgttatcttcaggtatttgaactattatacttattcttttcaataaaagaatctcgtattagttatgcattttataaaatttagtttgtttttttttttcccattacctatgtgtctttctgttgtttttttttaaaactactgtagtggacaaaaaataaatggcaacgaaggagagggaatttatcaataaaactcattgtctatcttatgagcatgcaaagatgcactaggaaaactagacaataaaactttaaagtctgaaaagagcactaaagagtaaagtgctgaattgtttgatcgctcccaccaaaataatacctacaaactataaaaaataatggattagtatggcatctataagaaagatatatgaaagaaatttcatattagatagaagaaacatcctcccaattgtataaagagtaatttagacagccaatgtaggcaccaaacaaaccacaacccagtcaacctcaaagggtaccgcaactagcctcaaaaggcaacataaattaaacagaaaactttgtacaagacagccaatataggcaccaaacaaaccataaaatggtacaataactgtcgatattgacacaaaaacttaccaaaagcaccaaacgacacctattacaattacataacaagtctacactaaaaataagctttggttggattatatatgtctacaaaaatatagattaaaatacgtaaattaaatattttattttatttttgaaatgcaattattttttgaaatgcagtatataaattaatttttttgtttgtgaaacagtgattaaagaaactttatacaaatagaaaaataaatatattatatgggtaaaaatataatatattaatacatataaaagtgtgaaacaattaatccagccaggcatgatctaagcactgattgttgaaacaattattccggccaaagacgtcaaccacaaaacaatgccaaagcaatgtcgtgataacggtggtgtggtggagaatgatcctctttaaaccttggccatttaacagaaacaccatatatactactgacagtaaaattgatacaatatatatatatacaaaaaacaaaaaggaacaaacctggagattgaatcccattcactgaggaaactggaatataacaatatagatatagaaaaagatgaaatcattgcctttgaattttacattggtataccaactaatcacattttccgatttgaccatataccaaacaaagtacacacttaaattgtaacaaagaaaggaacatttagattgccgtattcaattttaagtagccagaacaagagattttacataattctaacgcagcaaaaaccaaatagcaactactaaatcagaaacctgaaaaataaaagaaagaacaataaacaatgaaatttaaccttggaatcgccaccagcaatagtatctcacagctccttgatctcaccatcctgatccctggccaccttatctgagaatcccctcttcgacaactgcccttattgtattcttaaaatctaggtttatctcctgttacccaaatttaatattatatatatttatagcagattttacatcatgaattgaaccagatttcacacacatatagataaatatatataataatagattttaggtatacctcttctaattgctaatggggaggagaggatttagagatgaaatctgtgagtgaaataatgatggtttatccaaccaatctgaatagaattacctttgtctgataactttggcttgtctggttaccgtcttctgcctctgaaacggtgtttacgaatccttggaagcccaaaacaattggaagctgaactttaagtagcaacattttttgagtggtagaaccattttggtaattgatcatgtaataagcaaaaaaactgtaaacatgaagccttgaaaaagttatcgatccctttattatcctttgtaaaaaattaataatacctaccgtcttgttgttgt

SEQ ID NO: 44912 - DNA, 3474 bp, Cannabis sativa
  modified_base (1656)..(1657): a, c, t, g, unknown or other
ttaggaaaaattcaaaccgcgaccgcaccgtaaagaatttcaaactgcattttttttgcggtgtggtgcggtgcaggcggtttgagcggtttgatgaacacccctaaaagatagttacattaacattaattttaatcgtattaccaattggtgcaattcagtgctcatgcccttcgtcatcttgtaaagaaaacaaagaggaataaaaaattttattttgagcacaacttcattgatcaaaactatctttagcaaatgaaactacctctttaacattcttattcttaccattctacaccttgtcattgtgcacatttcacaacgtccagcaaagcataacaactctatgtttcatcccaaaatcccaacaatgaaatctatcatgaagccatcatcccccaaaagaattatcaccaatctctatcactgaaatactcgtcatctgtcagcaagcaacagcaaatgaactcctttcaagacaatgaaaaatctagactttctaattcgtacgcatcttggacacaacaacaaggggagaggaatatgtttcacacctaattggacacgggtaggaagacaattggaaggagccctccaaaccaaatccttgactttaggaggcactctccaatcctacaactctttccaaaagaccgagttaccgactccaactaactcacatttaagctcttgaagaagtcgatacgcactcttgaccaaatatgactcactatttacaattatgttttgatgtacaaaagaccatcagtttgtgcttcgaacctgaaaaacctaaaatgatgttcatgagtcactatattaattttgagtttttttaaagcaatggaagttctttagaatttctacagaattttcgcataagaacaaagaatttggatccttgtacagttggtatggactcctatttataggcaaccttcttattaggtcagattaactaagcgagcaatgctattacaatagaggatttacaaatgaagtaattaaaattttcttcattcctacataaggaaaacctaatacaaaaggtaaagtttacttgtctagtttgatacgtgatgttaataggttcaaaatgtgtcgccaatgagtgcacgagaatagtatatgtcaaagcagtgggtacaaaaattccaaactttatgttgctttatagaagagcttttccgctcgtactgaagggacaagttgcaatgtcctatctttgagtgtcgaaagatgtgcagagcttcatctgaaaatacttgttttcatcagcagagcttttctttttatattgtcctcttttatttttaccattttttttaaagtctattatttttacctctttttttttaaaaatactttactgattttatccctgtcacctcaatatactctccatgtgactcccttatatcaggatattttgggtacaacacatataaaaagaggtatgtttcaattaaatataaaattagaggtaaatttggttaattgataaataaaataggtatttttcaataaaccacaagtacattgagaaaattacactctatacccgctttttatttcatattttaatttttactttcattttactactctttaatttatacccacttttataagttatattcccattatgtgctttannaagtctaattttgataagttttgtgaggttatatttggtactttgattataaaagaggatatttatcaattaaaattattttagagttatatttagttaatgtgtaataaaaaagggtagttttcaacttatccccgagtacattttggaaccctcctcttgggttgggcctgtccaataatattaggaacaatttcataaatacacaaaaataacaaaacaaaaattacaaaaatacgtttgtatagaattttaaatatttttgcattttctaaaattttatttacagaaaaatatgatcttttgatgtatttttattattttgttgttaattttttttttatatttgtatattatttttatgttgttttgatattgatttcctgttactttcatgaagttttcttgttgatttgtgtgtttttataaaatactataaaaaaaaaaaaaatactttaaacgtaaaaatataaaaatttcacaaaaaaaaaaaattactggttatttcccaattcctattgcattctattatcatttttacaatgaatcaaacactacattatattattgaaaatctcatagctaaaacctaatgaagcattttggcatctttggcaagaaaagaccattgactattgatcaaatatgtatatccaagttccaactaactattacttgtaaaataagtaaataaataaaaactataaaactctacacgcaatatcattctcaccaacaacttttacttgaataaatgttaaacatttcacatttagggtgtgtttagaaatcaattatatacactaaattattcccataaaccgatgtatgcaaatttgtaatgtacctctcaaaaaaaattgtaatgtatgttataactacaaaaatacactttatatttttctataaatatagagaacttgatcattgaacaacaaataacatcttactttttataagatttttttttgtcaaaatgtagtttaaactaatattttttatataagataatatatttattttttcaagttttaatatctaaacatttagaccggatttgacccatgaaatccaaaaattggaaaacacatgttaagtacaggcgggttaagttgtacccatgagatttgaacgagcatgtccgagtttatattttacataaatacaaatctaggtctataccatatgcagccgtacaccggtaccaattattattattattatcattttcaatcaaataaccaaaaaatttatgataagaaatcaaaagtacattggtcgaaaaaaaattcttccaattaaataatctcgttttttatatgtagtgtacatctagtgaaataaaatacaacaaaactagatatacacttaaaaagataaataacaataaaaacgatcttatgaagggagaagacaatagaattattcactaaaaatatcgaactctttaaattcaaaagaaaaaaagcttttagaaaggaaaacctttgttatatctaaagttttaagacgagaagaggaataatatattttgtagtagagtaacataaatgtaacaaataaataaataaacccgaccacacgtgacccggtggacccgtccacccgtgaacttagttcaactcaatcactacactgctcaagaaatcattttttttttttatttttacatattcaaatttctaatttttttaggggctttttcatttttacacttcaaaacatttttttttttgtatttttacgaaaccctattgtaactagcattgcaacctaaattgcaacaaaaaatcgtataaaaacccctattgcaacta

SEQ ID NO: 44913 - DNA, 2430 bp, Cannabis sativa
cttaccaatacggccaactctcattccagaacgagcaagagctcgaagagcagactgggcacctggaccgggtgttttggttttgttaccaccagtggcacggagcttaatatgtagagcagtaacacccaactcctgcacaataaaaattattactaaatattttataaagactcaatgccaaaacttccaacaaccagcaacacaacaattttctgtttacatgtaccaacttcaaatgagagagagagagagagagagagagagagaaccaaaccttgcatctctgtgcaacatcctgagctgcaagcatagcagcatagggagaagattcatctctgtcagctttgaccttcattccacctgtaatgcaaattaggaataattgaagattttactatggaaacattaccaagcaggattttcaaataaaggtatatcttaaaaagcaataataaaatacacatgacatgctttgaaacccagacaccaaaatgttcgaataatcgtagtcatgtatatgatgtgattcacattaaaagttacaaacatgtaacaaacagaaagcatataacgtcctctcctgaataaaagtttcgatcaagtaaaaaattaaattattgtaattgaaaatatagatacatcctaactagtgataaaaaagctttctactctacaaggtagttcacatcatttgttactgtgagaatcaagaaactgtaaggtgttatatcacatcaaaacagcaaacagaagacattcacatgctttacgaggcaaacattaaacacgagctaaaatatacacattaatgaaattcacgaatagaagtcttaccagtaatacgaacaagggtttctctcccagaaagatcagtcacatgctgcacataaaaataataaacaaaaattagcacaaaatatcatcagcaactacatccacagaaaattgaacaagacttacgatgaatgtatcgttgaaagaagcaaaaatgtgggcaacaccaaaaacatgctctccttccctgacagctgggccaagggtgacattttcttcctttggctccctgttcttcctcttcgaggcctgtaagaaacatatcacaataaaattaacataaaattcataagcaacattaagaaatatttaaaaatttaatctataagaaaatcatttataccagtgaacaatttataaatatagagcaattgcaacattatattataacagtaaagtatattaataaacatttcataatgtgcatcatgctaatttgaatcgctccttatattttctaaacaaaagttatcaatgtaggctacttataggatgattaaaataatggaaacacaacaaaattttcaaaaagattaacatataaaagaaaacagataatcgtgctttgaaacaagccaccaaagaaagacaaaagccagatttgattcacgaaaacttctttaaaatgagcaataatatagtacatcaatatcattatcgtgagtacaacaatctttatttacaataattaagaacaaagaatgtcatactcgccaccaaaccaaaattaaaatacccaaaattctaaataaaaaataaaccttaaatcttcctaatgttctcaatctgcaatttaaacaaaactaaaatcgctttcgagctgaatattgatgtgtatggaatgatactagtgtgcaagtgagaaggaatgaaaatacgttgagaaagcattggattcgtattgactcaccatgatttcgaagctagacgagagagactgagagagctagggttttgatgaagtgtttggaagctaaactagtcgccttccagaaaaccctacggaggaagaggatagtgaggcttcgctttcgattatatatgaaactagggttttgctatattacgaaaataaccccctcatctccttgctagttgcttattgggataaaaggtaaatgctgttttatgtcattttttttcacttaaatatcataaatttacttatcaaaaaaaatatatatataatttttttaccgctaaactctcttacttattattctacttgtatttaaccttttaagtttaaaatttgcaaatttaaagagttatctactttctacagttaactaccaatatatagactctttatgtgtacacttttataatacacgtgacacgtttatattaatacacctaatattattatttaaataatattttttatttttataattttatttaattttaatttaaattttgaaaataattttaaataataatatttagtgtactaatataaatgtaccatgtgtacaagagtatatacataaacagatggtgacagttaaccggatggcaccttaaagttgctactagtttagtaatttgaagagttttaccgccaaaaactctaaatatatatatatatat

SEQ ID NO: 44914 - DNA, 1659 bp, Cannabis sativa
  modified_base (295)..(299): a, c, t, g, unknown or other
tattaattttggggttaagatttcgtgtgtatatatacatataaatatgtgtgtttgtttatttgttggattttaatttgtttgaattgatttgaacttggttttgttgttgttgtttttttttttttttgattttgatagttgtagtggtagcagatgactgaagaagatgaacaaaaacaagatggtggtggtggtggtaaggaaggaatggtggtgggtggtggggggtggctgggtggctgggaagggttcatagtcaaacaaaaagaaaaaaaagaaaggaaaaaaaaannnnnaagaaaaagaaagaaaagaaaaaagaagaaagaagaaagaaaaaagaagaaataaaaaaaaagaaaaagaatttttttaattttttttatttttaaaataactaattttttatttttttaaataatttttttacgtggaccaataaaattgtgcaacgtgtttattgtgtccatgtggacaatctaacttgacagttaacagctaaatttggacggaagtgttaaattgctaacagtttcctagttttgggggtttacccgcagaaatttaaattttaagagtttaatgaaaccaaaacgaaaacattaaggattttgccgccatttaccctttaaaatataattatcgccacctcttgtaagtaagattattttatttatttatattatttgtcttgtacggcaaaaattagtagagttattttctgagagtagcataatcttaataatgttatgatgactaattattaagtgaaaataaataagagagtgcaagagttttcttagcaaataataaaattacattaaaattaagttttatttgaaacataaaattttaccatcactttagatacaatattattattataagtataattaaatattaaattttatataatttaattaataattaatataaaatattactaactattacaagaagactgataatgttaggacggatgatcaataataaattaataatgccataatttttttttattatttttttattttttttatattcgaataataggaatggagaggtcataggatatgaatggacataggaaaatgaatttctagcgcgttttattggagtatctatatataaaatttcttttggaatatgttcttatatatatccccaatgacgcagctactcttgccggctgctccctctctctctctctcaataaatatatatacacatattagaccccactttctatatatataaaaccaaagcacacttcctttatcatccaaagtaaaaccatggagactctttacctcatcctttgttcagctccagttttcttagttctttacatactcattttcatatcgtccaataacaatctaccaccaggtagcatggggtggcccataatcggtgaaacgattgaatttctgtttgggaatccggaaaagttcgtgttcaagagaatggaaaagtattccccggatatattcaagaccaatattctgggcgagaagaccgttgtgatttgtgggcccaacggccacaaattcctcttctcgaatgagcagaagtacttcacagccttccgaccccactccatgcaacgcatgttccgatcttacaaagaccccaaaaaggcccaaattcagcaca

SEQ ID NO: 44915 - DNA, 3111 bp, Cannabis sativa
ggctcagacagggggacccactgtttccttttctatttatactatgtagtgaagtcctctccaaactgatgttgagagcagagcagtctagaggtatatctgtgattagcattttccatggagcttcgcctttatctcatcttttttatgcagatgacacaattttcttctgtcaagcttcttttagtgaggctactgagctcttacagtgtttgcaaaagtatgacagctgatttggctaaaaggttagctacacaaagagcggggtagttttttcaccgaacacttctaaagtagacaaagatcagattaaaatgttcttggtatggggcaaatcagagttaaggagaaatacctaggaaatttgttcttttttaccgtgaaaaagaaaggatgattttcatttcttaaaatagaaaattttgaatagacttgaaggttggaaagaaaagtatctttcatattcgagtcgtactacccttgtgaggtcagttttacaaaatattctgattttttttacgtaaacttcgaaggtccctactaccctctatgatgagcttaatcgtattgttgcgagattttggtgggcgggaaatgcgaagaagatgaagtattgtgctattaagagttggggtgagatatgtcaacttaaaagttgtgggggtttaggcgtgagacgattcaaagatattaataatgctctattttcaaagttgttctggatggttttaaattaggagggtaagttgtggattaaagctcttgtagaaaaaatattgttcaagggtggatgcttggcgagtggaaaaatagggttcagattcgttggtgtggaaaagtctcttagatgttcgggagattcatgttcaggggtgatattaatttatggacaagaccttggattgtttggaaaacttgtgaagatattaaagtcaattttcactataatcggattcgcgcttttagaaaggtggcagacctctttgtggatggtactagggaatggaataaggatcttatccagagttattttgatgaggatatcgcagaggatattctttaaatcaaaccattgtctactggagatgatattttattatggaaagctactagatctaggggattctcattcaaaagtgcatattagatgagtcaggaattgtgtgcctaatctagtttggaaaggtttgtggaagcagcaactgcattagagataagtttgtcatatgttgaaaatccttttgaagtctctccctactcaaaatagattgtgtttcatcactccatgtgagctttttggtgtgttttgtaatgctaaagttgaaacagtactgcatctttttagtaagtgtgacattgtctgaggtatctagtttaagagcagatggggtgtgaggattgacgagcttaattaagaatgcccttttaattttggaagacggtggatcaatgtcaaagatgaggaacttaagctttttgcagcatgtgtttgtgaggttgtatggaagtagagaaatgacattatttatgatcgtaaagtgtgtgattttatgggtatttttgaagattgctgtagacgattctcggaattctctagtttgcgtgatctgctgcacgtaagtgactggtctaaggcgttgtctactggtatagatcatatgactgaggttgttgagaatctctccattgatgttagtggcaatgacgtgtggtacttccaagttaatgcatttgtggatgggtcttcggctggttttgcagcagtacaaaaagggtgcaatgctatggaagatgcaattatggttgtggatttcgatactgttgataatgtgcttgaaggggaattgaagaccattggtctactgtgaaaaatactcagttttatggattctactttggcagttaaaggtttcatggttggaactttgcccttggagtagggctcttatcctacttttatggattgccttagtattagtaagttttttaaggtgtttaaggttatgttcaatccttagtcttccaatcgtgtggttgatttcctccctcgttgggctaggttgaaaaagttgtgtcccatggttttttaatagaagtgtcaccctttgtggccactactttattatagctgcgttttgttgtgtttaataaagtttgttactcaccaaaaaaaaaaaaaaattaatatgcaatatcgcactatgttgtaaaattgtgtatataaaagaatgacattaagtctcattttttaatattattttcatccaaaaataaaaaaagaaaaaaaccataagaagcgtcgtcacgaaagctagatcattatccatcataattatttaaaaagtgttaattacaacctcttatttaatctctgcgtttgaaatcaccgaatatttgcttttctaatttctttcatattgttattttttatagttacaatatcatctaagtaaatttttgaaaaattccttatagtttactgttgggattaaactcacttaatctgtcaaagtcaataggtccatctatttactgatcagatgaattcgaaaaaagttgttgttagttgtaatagttgattttaatactaacttaaaaggagaccccaccaacaactataaatacaagtgtctttactcttttaaggaagttctaatgtctaatctccaagttcatacttcaaattctaagttaagtctagagagagagagtgtccaagatcatagtgagtatgtgtacacggatgtaatgtgagtatcactcttgaagtgattttccttaatgtgagacatttctttgtaattattctctgtgtttaattttattcttggacatattcaatcgtgtactattgactattcaagcaataaagatccatgattcatttattctcaagctaagttttcttgtctaatttcaattaagttatagttttaattttgtgattggtttagttttatatgtgtattcttgaatattgttactactgcaacaacctgttttaagggtgagcattcaccacaaatggtatcagagctgagggtttgaagttcaagaattacattcaaccaatcaagattcatcttgaacatttcaagaatcaaactcgaa

SEQ ID NO: 44916 - DNA, 4215 bp, Cannabis sativa
ttgaaacttcttatgactattactctctatgattctagaaaattctataatattaccaaaatgatagaaaattctagatacttgtagagtaggtgttgatctttaacatatccaaatcgaacaaacaacaattcagtttgtaaattgatcaaatttataatttttcattagataaattcataaaataacattaagattacctcttctaaactaccactagtaggtggtggtggtggcggtgctggagcataaaccttcttgaaacgcagtggtgatggagtagaaatattggcagcactcaatggttgtgctacaagatcttatggagaagagatattggcaggacctgatggttatgctacgagatcgaaggcaaggtcagcatgggcttgttcattcgatgttcctccagcaccaaaacaagacacatgggatatacccaaaccctgctatactgggaacaaaatagacgaatgagctcatccactttctcctccaactatctgttgctttcctctgtctcagggacatgtctctccaaatctgatgatgtcttgttcgacccatatgtgtttttttcttttaggacgtggtgtgttgaaatatctggtctgggtgatgccgtaacccatggctcaaacccgaccaccatactcatctgtccccaacaccatggtcaacaccccgacatgtggggatatttatttatttgtagttttttattcattattaaggatgagaaacgagatttgttagtgggacaccccaacatgtgggagatcactaacaaaccctaaaacctatataaagagagtaataggctaaggtaaaagggagaatcgtatctccttccttcacctttttcctaagtcctctatactttgtcgacactaagtctccttgatccaaacaccattgatatacactgtttccaagaataggaccattcttttgttttactcttattggtttgttattctcaaggacctcacaactaccatatttatcagatttgtgaatatcggatctcccatgagccttgtgtttataagtctcgatatagattctaattaaaaatctatttttgtatttttttttcacatactcttgagaacataactctgatgtgtcggatctaattaataaaaacaaaattagacgtagccccattactatcacgacatgggggatgaactacaataaatctctggtgtccgttttatttattgcggttttatttagttaaattaatttatcgcaatcctcttattatttacgatcttcatagatcagatgacgaaaaactacgtcagcacatatatatatatagtatatgttgttataatatttatttaatttctttattactcctaaacaacaactttacatcctaataacatcttcaatttgaaaacctagacacctccaactatacaatataatgcttgtttaaagaactttcctattattggtctttgtattatattgaaatagaattgtaatgtccttcttcaattgtattaggacagctaaagttagtaagtctgttaagtggtgattagcttcttttctgttaagagttagttagggattctgttataattgttacatttctattactcactccctctctatctctcgattgtatataagcttgtactgttccaattcaatgtaatacaattactctttctttctctgtcttttcaatctttctctgtttattggttgaagcttatcaatggctaaaaggtttaacatggtatcagagatttttcctcccttgttggccaatatggcttttggaggacctcaagttcctagttcgagggatcacaatggagctggagacactgttggtaacttaagcactcaggatcagcgaccacccacctttgcatcgttcaagaatgtagaattcaaatgagttctctacaatatatttatctcataatctttcaatttgtttaaatgatcataatgttttacgttatggctgccattcgtggaaatcgtctccaatcttacatcaccaatgatcctcctcctcagtttcttactgaacaagatcatctctccaaaacttttgatcctgcctatcttgactgggaagttcatgaccaattactcatgtcctgtctactttcgtcaatgtctgaaagcctactcactcgtatggttggctgtgacacttttaagtagacctggtccaaacttgagcaatacttcaccctgcatgtttctgccaaggtgctggagttttgaaccaaactgtagaatttgaagaaaggccctttgactctgtcagattatttgctcaaagtcaagcatctggttgatcttcttacttcagttggtaaagtctacactgctcgagaccatgttgcagctatctttaaaggtttagcaagtgaatatgacacttttgtcatatccgaaaataccagacttgaaacctacagtgtagctgagatcgagtcattactgcttgcctctaaatcaagaattgaaaaatcagacaaagaaggtgacatcagttctcagatttcctctcttgaattcgaatcactggaagcaaactatgctgcaaactttaattgaaatcttgcttttcatatgcagcaggtctttccaagatactccatgcctaacaactccaatcatggaaacttttgaggaggctattcaagaggaggcaactatagctctcaattccctccccctgggttctatgatcgcaacatgcctttttaatatggtagaggaaatggcagatgagccaacaacacaacaagtaaacctcagtgtcaattatgcctcaagttttgacacattacacccgagtgcttttacaggttcgataaaagcttcacaggtgtatcacctcatctcccaagcagctccacttcaactaaatctaattctgcataagctaatcttgctgccactcacactggtcaagatcccaactggtatccagactctggagccacaaatcactatactcctgatgcttacaacctgtctatagctgcatacaatggtgctgaaaaactctttgtaggaaatggtacaggtttgtctattcaacatgttggtcattctacttcctccacaccaatgacaagtggactaagactttctgcctatggcagtgaccctgttgaggatgtgcaactatataggtctattgttggtggcctacaatatcttaaaactacaagaccagaaattgcatatagtgtgaataaagtctgtcaatttatgcaaaaccctctacagtctcattggattgctgtcaagagaatactcaggtttattggagactaattggactttggattgcacctaaaaaagccaacatccatagacttggttacattctgtgatgctgattgggctgcagatccagacgatagaagatctacctcaggctttgccatcttctttggtcgaaatcttataacctggcaatgtaaaaagcagcatacagtatcaagatcaagtactgaagctgaattttgatcattggcaaatgttgttgctgaactcacgtggctacataatttattttccgagctgaaaattactctgctaagaattccaactgtttggtgtgacaacatgagcaccattttgctcacgcccaatcctgtcctacatgctaggaccaaacacattgaacttaacctttattttgttagaaaaaaggtgcaaggagctgttcaagttaatgatactcctgttgtagatcaaatagttgatggtcttacaaaagccatttcaagccaacaattccacacttttagaaacaaacttacagttgaggatgtctcaattctaagtttgagggggactattaggacatctaaagttagttagtctgttaagtggtggttagcttcttttctgttaagagttagttagggagtctgttattattgttacatttgtgttattcacttcctctctaactctcgattgtatataagcttctactgctccaattcaatgtaatgcaattactctttctttctctgcctttctctagttcttagttgaagcttatcaatggctaaaaggtttaacaagttgtaataaaatcttcaacattaactgcatgttcacatataattttcccctatttggtagtgtcaaccttacaagggaaagaaaagagaaacaaagagaatactttacttacaaataaatttc

SEQ ID NO: 44917 - DNA, 2532 bp, Cannabis sativa
gagagagagagagagagaatacccctttgatgtttcttaatttctaaggtattacttattaccttctaaaataattcaacccccttttacttaatattaatcttaaaatcaaaatgtcaaaaagcactaaagacaaattagaaccaatcataagaaatgaccattctacccctccttacaaaacttaaattgctgaaaaacctatgggcattttggtaattctaactaatccaccaaaccgatattttaaaattctaaactagtctggtatacttccaccataatccatcctttattttcatgatatttctgaccacactatcatgttcccaaagttgtcgggtctgaaaatattttattctaaaaatggtatccataataccctgttattccaataaattctccgtaattaataaattacattttatttaatcatttaatcaattcatactaataaacataagtaagatcataatcttacttcattacccgagtaatttgcatatttaataaaacatgcccaattaaataccatagtattttcctggatattacattgctcctagtctatggggtcacgcccagcgaaaaaaaattattagatgaataacaagtgtttacaaaactaatttgacttatacaaataaagactccctctttgaatttactgcaactgttataatatattcttctaatcaaattttacaagtgccgagaccttgaactcccttcaattcgtagcatttgcacactttaccccaaagagtgtctcacatgcagtcttcctcccgaagagtgtctaacttgcaatcttcctcccgaagactgactcacctgcaatgttcctcccaaagagtgactaacctgcaattttcctcccgaagagtaactaacctgcaatcttcctccctaagagtgtctaacttgcaatcttcctctagaagactcacttacttgcattgttcctcccaaagagtgactaacctgcaatattcctcccaaagagtgactaacctgcaattttcctcccgaagagtgactaacctgcaattttcctcccgaagagtgactaacttgcaatcttcctcctgaagagtgactcacatgcactttttcctcccgaaaaggtgactcgcgatgggatctaatggaactaagccatccttgctaagtacatatggtctatctcatctaaaagagatattctttgggtgaaattgatcaatattatatatttgaaaagtagatccatttggtcttacaagcttaggcaagattcaagttggtattagagaaaattgtgtcactttagagacaaattttcaagcacagatatcatgaaagcatgagctgttggaaaattttgaacgaactggttatacaacaacactttgcctcaaattcaattcgagttcggcaagggtatttggagttcattaaacatgcctaagcatcgtttcatcctttggcaagttgtaaatgcccagctgttaacctgagataagttgatgcaatttcatattgctttggacaatctcgactgtcctatatgtggaatgacagcagaaactcatcaatacacattttttaaatgtcctctttcttgttgagttgtggagctgatcattgaatggctggggtcaagaacttggcccctcatttatcatgactgaagaaactgattagcattgaaagttacaaacatgaaatagaggatcaacattatagtgatggcagcagtgatctatggcttatgcatcaacaaaaatagatgcatctttaataattactcaaaaactgtttttctattgtagatgatataaagaaaatggtttattacaggttacaaataataaaaagtagatgtctcaaaagccatgagaggatatatatgaataggatttgttgtaactagggttgctgtcgtggctcttctggattggttgtgtattggttttttatttatttgtgattaatgaagctcattcttcttgataaaaaaaaataacaataaataagccttaatattatatcataataaaattattaattttacataaataaatttatcaattatatatagatgtatttattaagatataattattttatataaaggtatactttattaacacggactataaaaaagtaattaattacaatttataagttattttcatgtataacatgcctaaattgagactttattttttttataataaattatagattattattaaatagagtatttttagatagatgttctactgaagatgtatttatagttatcataaggttgattttttttttttttttttttgctgttttatagaggttattcttgaattttaaaacatatatggtattttttataagtaaactacaaaacaaccaaaaataaatattgaagagtttattatttttattgaagaagtattttataaataaaaaatgcaatgcgtggaaagaaaaaaaaaatacgtattcacttattttggtaaattttttctcaaatttttggtctatcatcta

SEQ ID NO: 44918 - DNA, 1828 bp, Cannabis sativa
tataaatttaataaaattaggcatcctttttcacttacttcggctcctgatgacgattacttgagtgtccatattcgcggattgggtgactggacaaaagagctcaattccactttctcaaaagttagtacctcttttttctacatgtaactgaccttcataagtcttggttaatatttatattttctgccgaacatatgaatttagaaaaatgctcacaatttactttaggtgaataaaatgaaaaaaaaaatcatacacttcaacttagtgtttgaacactattctcaaaagtttaaatattcctaatcatttgcatatttattgcagttacctgatataaacttacctccaatatctagtaatcaaagtatcgttgatgggcaagtcaataaaattccaaggtattactttagctattactttagctattttcaaaacattttcatccattcaaattattactaatcaaactcttatgttgggataatataaggctcctaatcgatggggcgtatggtgcgccagcgcaagactataaacagtacaaagttattcttctgataggaggtggaattggagtgactcctcttatgagcattgtaaaagatgtgcttaataacaggaagcaatacaaagaggacgaaaaagacttagagaagggaattaataattgcaataataaaaagaagaagagaaagccatttgccacgaaacaagtctacttctactggagcactcgtgatgaagggtcgttcaagtggttcaaggaggtgatggatgaaatcactgagaacgggaatgatggtgttattgaggtccacaactactgtactagtgtttatgaagaaggagatgctcgctctgctttcatctctatgcttcaaactctttatcacgccaaaaataatggacttgatattgtgtcaaacacagcagttaaaaccaatttcggaagaccaaagtggtataatgctttcaagaacgtagcagcaaaacacgccaaccaacaaattggtaagtatttctctaccaaaaatctaatatacaattacacttattatcctctgtttttttttttttttttggtcttttttatattggatattgtggagggattcaaaattaaaatctcctcgcagaaatgtagtatcatttccttttctttgtctttagtttgttgtttgagtgttgttaactgagtttatcacaacattaattgggatgaaggaaaacataaatgaaaagaacgaaaaatgatgagagaatgatacaagaaatggggattattagaatttggtacacatttctacacaatttagtttagaaatttctatacacctgtagaaatatcatctaagaacttaagagaattctagattagattaagtcaacaatatactagttatgttgaactctagaaacatttagatttatttgaatataattccttctagtagaagaaggatctaaaagaaataattccaatcataaagtgtaaagggtgagcaactataaataccccttcaagggtttcaaattgtaaccaacatccaaactattaataaagcttactacattttcatacaaccctctctgctaagccaaaacaattctcatatactaaatcaacaagtactcatcaacatcactacttcaattaccataacaaccattaaacacttattcctcatatccacctattcaaatctaaaccaatacaaatttattctcaaaacatcactggtaactacaagaaatgcaacttttaccagcacagttcgctactgcactggtaaaagtaacttttaccagcatatttcgcaaa

SEQ ID NO: 44919 - DNA, 4629 bp, Cannabis sativa
atttagggcataaaacccaatattacaatagtaaaatttaattatgatgccactcgagatcatgtgcttgaaacaggtgttattcattttgaccacaaatcggttattgttatgccatggactactaatcttgatgcagtgaggatggtgaactctattcccctatggatcagacttcatgacctaggactataatattggagaagcaattgtttaagtgctttaattagcacaatagggaagccaataatggtggataaattcaccaaagatagatctcaaatccaattcgctagaatattggtggaaatggagataattgatgagcctcctaggataattcactacttcaatgaatttgccaggttagttgaacaaggggtggggtacgagtggctacctgtgaagtgcaatttgtgtaagggatctggccatagaatggctgactgcaagaagggagaaaagcttcaataggaaaaaaaaatagagaagaataaatcagaagtgacacaagagaacccaacagaggaagaataggttataaagagcaaggttgagattgattaaaaacaagggggactgaggggaataaaactgaaagaagtatgcaatgacaaactcctagaagattttcccaggtttataaactaaaacagcaaagtctcacagagaaaatagaggctgttggatttaatcaaattcagataaattcatttgaggtgcttcaagagcaacctggtgaggagaaaggaggtacttcgtattttacgaattgatatggagtgttgcaatattttaagtttgaacattagagaaatgaatagcaataataaccaagaaactattctagattgttgtcgtattaataatgtaggtctttgtgcgattttggaaacaaaaataaaggggaataaaatggtagagatgatagactctagattccctggttggaagcattactctagttcggttttagaagggagaatcttgttattatggaagaaggtgtttgtgcaagtcattgtgcttgaggagaccaaacaatatgcctactgttgtgtgaaaatggtggggcaggaagtagctttttgtgcaacgtttgtctatggtcttaattttatagaggaaaggaaggagttgtggcaaggccttgctgggttgaagtttccagtaaaaccttggattttactcggagacattaatttagttttttgttctgatgacaggaatggagggcaaccagtgtctagagctgagatggaggattcaaagagatggcttgctttgcatttggctgacctgttaatgaattctggctcaaggtttacttggaccaacaatcaagatggcaaagctcattctcgaatagaccatgttcttaaaaatgagaattggttggacaattttcctaatactacagcctattttcactgggaaacagtctcggaccatagttcttatttggtaaagactgttgctctcagggatataggagctaaaccatttagattttttaatttctaggctgaacacccgtacttaaaaaaatatggtgctggataattgggataaacctatgacttgcagggcttgaaggctgttttcttgaaacttatgaggttgaaacatgtgctgaaaaagttcaacaaacacatggttggggacattgaatctcagtttcacaaggctaaagaggactataattgattgctcaagctcatcctagggaggctattttgcaagaagaggaaaaaagggatgtcgaacagtatggagttcaagctaaattgtatcatagctttttgatgcataagagtaaaataaactggcttaggaaggggatgaaaatactacttattttcatgcttgtatcaaaagttgatcttacaaaaattgactttagttgtattgagacaggaagcagattaagtcttgatcaacaagttcaattgattaaaccatttactgttaaagaaattaaacaggctttgtttaatattcctaatgagaagatccttggtccggctggattcggctcaggtttttttttaaagtgatgtggccgaaaatgggagaagagatttgtcaagctgtccatcaattttttgaaacaggttttattccttcagagcttaatgaatctactatttctcttgtgcctaagaatgattctccttccaaagctattgattatagacatatttcttgttgtactaccttgtacaaatacatctctaagcttctttgttcaaggatttctggggtattaccttttctggttaagcagaacgaaggaacttttattaaacaaaaatcaatagctcatattattctcatttttcaggacttaatcaagaattatgggagaaaaaatgcttcccctcgatgcgttataaaaatagacttgagcaaggcgtataatatagttgattggagatttcttaaatatcttttaggaggtttttgtatcccagctaggttcataagctggattatgatttgtttgaaagatacctcttatcttttgatgatgaatggaagagtttagaagggctttaaaggtgagaagggtcttagacaaggaggcccgatatcacctttactgttgtgttagtaatggaatacttaactagaactctaaagctagcagcccgaaatgaggatttttggtttcaccctatgtgcaagagcttgggcattgttagcctctactttattgacgacctattccttttttgcaaagggaataggcaattagttagagtccttaaatatgctctcatcaggttcagtaaggtgacaggtctgaatgctaatgtcagcaagtcccaagtattttatgggggtgttcatttggatgagaaggcagccattctccaagatattcaatttcaagaaggtgagtttcctttaaagtgtcttggagtccttatgagaccagcaaagtgaaaaatggaagattgtgacttaatcattaaaaagattaagaatagattacatacttaggttaataggcatttgtcttttgcaggaagagcccaactcattcacttagtcctccttgaccttataaggaactactggatgagtattttttatccttcctcaaagggtgactaaagagtggagaggctttgtcgtggtttcctttgggggcttaaaggaaataaaccgaaaaattcacctagcttcttgggagaaagtttgcctcccaaaatcttttaggggcctagggttcaaagatggagccaaatgaaactgagatatttcagtaaagtttatttgggctctttccaataagcatgatatcctttgggtgaaatgggttaataacatttacttaaagggagattgcttttgggatcatagacttaatcctaattctagttggtactagagaaaaatttgccacttaagaaattggtttgacaaggagagtgtgttagttgctggaactaaagggagatttaaggcagccaagctttacaacagcctcttgcagtagcaccctttgccgtactacaagttcatttgatgtagacttagccttcccaagcataggtttgttctttggcaagtggttcattctcaccttcttacaagagataacatggtgagatttggtattctaatggattctcttatatgtctggttcgtggaatggttaatgagacacattctcatctcttttttgagtgtgtgttgtctaagaaggttactataaggattttcaattggttgggagttgaagggtggctcgaatgggggagtataactaggaaagagttgctaaattatttttttttattgctgctgtcactgtttacaacatttgaagaaataggaacaagtgctattttgatggggattttctcacacgaatttgcacatagccaagtagattaaacgtatagttcaatatagaatttatagtgtcaaacatgtgaatttaaatgtacaagaaagaaagcttatacatagaatattacatgagtaatagggtgtattggggggttggttattatcctgtttttcttttcctggttggttgtaaagttgtttgtgattaataagattttctttttgataaaaaaaaaaatcatagtacaaatataaataacgtaaaaaatttactataatatgttgtgaaaacaatgtaaaagcaatagtctgtatttttttttttttttttgaaaagagcaatagtctgtatttaaaagtttaaattcgtaaaagtattaaaaaactgtaaatttatatttttacaatattatttttaatatttaaatatttatgaaaatatctctataatctatgtcacattaataattagttgatgaaattttattttattattattttttaaaggactcgtgagagaaatttttagttttagttaattggagtagaaaaataaaataaaatagcactagtgctttgaagaagggttgtgcaaaattagtcattaattagtaattgattagtacattatgggcctaaacaggctaatttgtccaattcaatatttgggcatagcaaaagtctggataacgaatccagctaatctcatctatctggaattatttatcccatccagcagggtgggataaataagatcggaagagcgg

SEQ ID NO: 44920 - DNA, 1491 bp, Cannabis sativa
ggagatatggctgctgctgatgctgccactcttcctccaagtaagagaactgtaagaaaaacatgtatatagatcagtaactaataaagaaaacatcacttcaaaagggccatattaaaaacaatcattattataattagtactctttattacttacctgtaggtacatttgaagcaatatttgagagtattagtatgacaatggctagaacagctatcccaccagcatgatcgattcgtgcatggggctccattatagtccacaaagtgctgggaattcctgttctgttaaagccatctactgtgatgaacattccacagaagaaaactaggagagagtagtaggagaccttcacatgtcaaaaaaacaaaaacaaaaaagaaaaaaagaatacatgttataaaggttacttgtatatgaagtaaaaagagagagatatatatatatatatgaatttgaaaatacttaggctacttagctgcactttaccttgtcaagacatggtccagcatccttgaaatcaagaaccataagaacaagtgctgctgtaagtacagtccatgacatgtttagccccataagcaatgcaacgaccattccaagagtgacaaggtaaagacaagctttccatgattttctcctccatttcttgatcaaagtttcttttttctcagctggctcaatggggatgccattttcgatacagttagccatttcttgaagtccatgttctccttccaaagcaatcttttcctccaactttcttgcaaaagaatcaactgcagccccttctctagaacaaccacttaagttcctcccagactcaacatcaccaccaccacatggggatctgcgaatatttccttcgcccgcggttgcatacaagctcacttggtttggtgagcttctgaactcagaagtgggattattgtcctcaaaagatggcctatgtgacatgtgaactggtgagaattggtgtgaggctgcatcatcaggacatttcacctcctccaaagctgtttcttcatctttcttcatgtataatatcttccaatacatgcctaaaagaatcaaagcattaacaacaatccccacaagcattgcagggagaattcccaatataaagtccccaaaagatatgccactctgaatagcaataatcagattttgggggttgccaattggagtagcagaggatccaacattagcacttgaggccagtgctagcaacaaagggtgagctggtatgttgttttccctagcaactttcaagataaactcagtaagaagaacacagcaagtgtcattagtgaagagtgcacttgttacagcagtgaaaatgcagattctgcataacaagtctttggccccgcgactcttccacgaaaaaagtatgcccaggtcttgaaagcattggctctttctagatagatactcaccaccatagtcccaaaaaggaggccaagaactgagagatcaatggctgcata

SEQ ID NO: 44921 - DNA, 1207 bp, Cannabis sativa
attgcctaggagaaatgattgaagaaactagttggaaaaaatttgatgagaaaataatttttgtcgttgtttgagaatcgctctattttgtaggaatcgttaaagcaaacagtagaacaaataaaaaaaaaaattgagttgagcttcatttatataatcaagggcattttaggtattaatatttataaaaggtcatttactttattttttttaaaaaaaatggacattaaccttcatcactatgagatttaaggtcatttgttacaatttctcctataaaaaaaaaatagaattgttgttcatgcaaacatttgtattagtatgtataataacccatagagtggagtaaatcatcatttattattgatacttaactataataagtacttggaatgaaagaaaaaaaaaatatctgatatggacaaacataagattcgaaaattaaattataggggaggtgggtgggtttgagatttttcgcatattgtttctagtaattgtctttgcaatttctttgttaattagccctttttggcgttcaaaacttgcaatcttctaactaaggctaaggtagggtgttcattttttattattatttttttttttggaaattgacaattcttttgctcaaaagaggaaatgactattcttgctttatcactttgtttgaagtaatgactgtgagacactaaaattgtagacactatttaaattcagccatgatgtaattcttacttcataatatttatgctaacgaaatattcgtggctaaatttgtttttggtagaatttatggtgaaaattgaatgcatattcgtttataaaatatatatgttctcactaataaaaacatatatatttgatattttattaggtaagaagtgagatgtatttcatttatcatgtgtattaaaacataggtaatacattattaatattttgtaaggttttaaattgttcttagagcactcttaataggagctgtaatctctaaacatgattttattattttttttttcttttccttcactctttctcaacacatattgttaggtgtgcaatccaaatctcatattggttaagaatgagaaggattatgggcatataagaatagacattatctctgttggtatgagacctttgggaaggtgcgtaaaaacaaaatcgtaaaggtttagatattatgaaaaatttcaaaatatctaca

SEQ ID NO: 44922 - DNA, 886 bp, Cannabis sativa
tagctagtctgtcttatgttttggaaaattgttggagggtatactacaagatagagcatctcgctcaaaggctgtttgcatgtgtttttagtttttagttttcagaattatgatttcaaaagtaagaatcgaaaaatattttttttgtcattttaaaaatttaatagtatttaatacaattttttaaaagctatttttagttttttttcttactaaaaaaaaaaaattcataatctacatcataccatgacatgaatctatcctaccctggacctgacccgaatccagatccggacccagacccaaacatcggactcagatccaaacctaaacaccggactccgaaccccgaacttagaacctagacccgaattaagatccggaccccaaaccccaaccttggaaccgaaccccgaatctcagaacctaaccccagatccaaaccgagactcgaacccatacccggatccaaaactcaaggctaggtcagagatccttggccacgtctaggttcgagatctgagtttgggtctagggtctaggtccgggtcgagatctaggtttgggttcagttcaagtcggcctagtattccaccacttattaacccaagattccagatatttattaaatgtaaatgagagcgatctaccaaggcaaaaatactatagatgcaaggttggagtctaggtccagggtttaggtttgatatctgggtccggtgtccaggtttgggtctgggatctagggtccgagtctgggtccgaggtccgagtctgggtccaggacctggttcatggtttgagtcagtgtttaaatctgggtccaggtcagagtctaggattttagtctgggtcgaggtacggggtccgtgtcggggtccagagt

SEQ ID NO: 44923 - DNA, 1274 bp, Cannabis sativa
aaaaataaatatttaggagctaaagaaatagtaaaatgcttaataaataagatgaagatttttacgtagttcatggtgttaattaaccttagtctacgagtcagtctattggcctctgagggcgtgtttgctgtgtttacgttattttgcaggataccctaactctgtgttcttagtttatcttgaagaagaagaaaggcggagcttcggcaattatggttctgatcccccttcgtatataaatggaagggtatttatagactaagggcgagtatggacatgcccatgacccgccaaatttttttactaaaagctcagtaatggggtaaattacatgcaaaagagagctgactattggttcctcagaaacaattgtgctcgtgagggcagcagcttggataatcagagatcattgtacatagtggacacttgtcaccaaaagttttaacctttaaaagtggaggaaacatgtcgcttaaaggcttaacctttagaagtagaggtctaaataactgtttggtaaaaagatggatgaggtgcgcacactacaatgcctggacacaatggacgatttaattttgtgtcagaaaaagcataatcaatgttgggaaatccagattgcgccaaaggtagacattcgcaacactctggttagtcagtgtctgcgatagacacttcataagtatccacccgggtattagttgggcatgcaggctctaaatttagaccactcctagctattatgagagagacaacatgtcttccgtgtccagaaagctaagatacggcgaggtagacttccacttatcccttagtcttgacttgtttccagttttgtgaagcttctctgtgactgtgtctttagtgggtgattttaattaatgaaattatgagcttatctcttcctttatatgacacgtgtcacatgttcaaaaacacaaataacacttacaatgaggccttagggcgagaagttttgtggcaagatttaaggatcttggaaggaaatataagagactgtggatcaattcaggcaattttaatgtagttagtgaactagaagaaagaatcagctttaaaggagctaccaaagatttcaaagtcatgaatcagctctttaaaaattacaaatcggaggatgtgaaatataatggtaagtttcatacttggaataataaacaagttggtgttgttagattttatgctaagcttgatagggttttggtaaactaaagttggttggataagtacactagtgtggaagttcttttcat

SEQ ID NO: 44924 - DNA, 5757 bp, Cannabis sativa
tctctctctttttggggaaatggggaaagtgggacaagaatcagatttcaaaacccagttggtagttgaaatttgctccatttcaacaggccattcttctaacacatgtgttcataggcaacattgcaaccagcctaataataataaattaccattcattgattggtaccgtattattggagtacgtttttttctggccttttgttcataatataccattttaatggcttctttctttctgtctatcttttgtttttgttttaaaaaatatatgattattgatcggaaaataaatctataggtggaagaagatgctggaatagatgttattaaaaaatgttaccataaacttggtatgtgttttttggttaatgaaaataataataataatgtcccacacatttacattctcaaaaacattatgtttattttattaaagcctttgtttaattggtgcagctttacaacttcatccagataagaacaagcatcccaaggctgaaattgcattcaagcttgtctcagaggttagattatatgcatatatatatatataattcaaattcccaagtatctttattgtggaatgatgttaagtcatgttgtcaaattatgccttacattattagaattggatagaaaaagagtttaggggttgaagctactggtagtcccacgtgatttcaaatataaaggcattgtacatatatgtggaccagtttcattaaagagtaattaaagaaattaaaccagactcatcaagtcccacaacatattcaactataataaaatatgttaggtgtgagtgcattcattcaattcattcattttttttggaggggttgtaagttaatttcaaaaactgtaaaagaaaattaaattatgaacccgaaacagaacgagtgaaagctaacatttcattgtttttgtaggcatattcatgtctttcagacaatgcacaaagaaaagcatttgacttaaggagatggaggagtttctgctttgattgtcttcatagtccaaagaagaaggcggctcggagagtcccgagttggccaagatctcacaaaattattcgcgggttgaaagatttacgagacaggttcagggaagagacgagggtgattgagaattgcctgaaggccaatgctgcctcggctgcagctgtgccaaggagagaatcttgtgtgtttagtcctccaacaacaaactctttgttaaagagcaaatctcataatgggagacgaaaggagtctcctattttcaatccttctgactatgcttttgatgggtatccacatatgaggagtcgagtttacaagaagacagataatttttggttcatgagaactggacatgtttttaatagtgaaagagtagatagtagagtgaattgtgactctcctatctttgagattagaccacagaaaaaaggcatttttaagagtaaatctacttgtgttcattcatgacattattatttcaaggaaataaaagaaaaaaaaaaggaaaattgagggtttttaaaataaaagttgtgttcaattcttattatccttaaggctaattaggatttttgctccctgaattttaacatgtaccaaatcatgctactgaactatttcgattgttgaatttaaagacttttatctaattttagtaaagaaaatctaacatgaataaaattagacaaaagtacttaaatttgataatctttttgacggtcagaacagttcaggaagcatgatttggtacatttaaagttcgggagacaaaaatcctaattagcctatccttgatctatgtttgcatggcatgagaaacaaaacaacatataggttgaacactcttaataaaactatgctcatgtacataactcaaaaaaatcaaattttataatagctcaaaattgtaataaacggtacaaaatttcatattccctacaatattttatggagatttctgtgctgataataattaagcagccagtgtcgtatcttttcagttgaattaagcttttttgactgcctgcttctcctggattttgagtataccacgatcgatcaagggctgcagctctttctttgcctgtgcaaccactgcagaatctgatgattctaagaaagccgaaatgaccttgccactgcaaacacaacacaaaaacaggtatagtagaataaatatttatagaattagctcttgaagagtgggagatagtgtttggagctttacctgtgacctgaggcccacatttcacactttccgttcaatgcagatttccatagtgtagaagcaaaggcggggcaatccaagattagttttctaatggtccgactagaatggaaattttcaaggacgtgttcctccttcgattcctcagatttaggctctgctacaacagatgctatggcttcatgtaaggcgtttaacttatcttccatagttggtttaagaatgccatctgcaccaccaattgcaacctgcatgaaacagaaaatggaataaataagtaaaaaaataagaatttgatggttttacagaaccacacaaaattaaatatctcgagtatttgagtacctcgtatatcacatccttcccaaagtttgatttaagtagtttgtctgagttttcaatgcatacatcaataagtctctgcaatgcaatatcaagcagaaataatcattgaaaagaaggcagtaaaaagacgcgacaattgattggaactctgtttcagagttgatattgttcattatgaagaaacaacagacctcagccagcccactcttgactaacaactcttccctccgaacagaaggatccttcttcccaccctcaaccatgttaagggtctcaacagggtcagagcttgtattggcctcagtttccgtctcttctgtgtcatcattaggtttaacctcctcgcttgatcccttaacctataatcatgtccaaccagaatgtcattttactcctgaatatagggttatgaaaataacaattactgatgtgatacaaaagagaaatggttttccaattactttgccggaaagagaatctagagacaaatcgagagaagccagctcgtcgggagtgaaatagcgagtacattttggatgaagtagctgtagtaagaaacgccttccattctgaaaatcgcaaaaagtttgaaaaccacctcagcaataacattcttgaagaactaaaatttctgtaatgtttttcccacgtagtaaaagtccaaattttaaagagcgttactgatgaaagattattttctgaaactagtaactaccacttcattcctaaacatgctaaacctattaacttttgaattctgacatggttaaaaaatatcacatgttagccttttaaggatttattattaaccgaagtattagggaaaagaataaaccttatcgtcaacaagctcctctaaattttcttgaactccatgaatgacaatctgcaatcaagttaacgcaacgtataagatgaagtaaaatgtgactccattaggtaacaaatccactttctacaccaaacaacacaaaaggaacaaacctttgttaaaagctttgtgtcatcaacaactgaaataatgcaaacaagaacctgggaagcaaataatataatatgaaggttaggaatgaggatacaaaaaagtctcaaaagaaaccattataaattcaagaagccttaccatacttccgcattgatcacgagcaatcttttgtacgtggtctttcattccttttattattttctttctttcctataataaattggacaagaatgaaacaaattaagtaaacagctggttaagtgacagaatctaagaaatcaggagaattagcaccaaacctttgcactgccatgcttgacacagagcatcccaagcctagatccatccctggtatggatcattcgaacaagaagtggaccagataattgttggagcacatctgtggcagaagtcttttgacaaaattgatttaggagaagagaatataaattttaaaaagcaaaggcagtctctgctggggaaggtaaatgaaatttttgcaatcgcagaacacacctgatcagcaatattcaagtactccattaatatcctgtgtatgattgagtgatcaacaattcctttctccagaatcggttggatcaccgaagtcatgtggcgcacgacagagggtttcggcaaacttaactttgacattatatcttttaaactgaaaaaagaaaagaaaaaaattaacagattggtcagaagtacagtgcaaagtaaaggaagtccaaaataattcagcagcattattcatcaaacaacactttcagttgcctaatcttttacctgctttctttcattgtgacgagatccttaaatatttgtagctccacagaatacaactccatcaaaagctcctgtttttgagttgcatttcccaattggtatgcatgctcgatgactgcaaaaacaattcataaggaaaattaaaatactacagaagcatctatgaagatattatctaatcctaacacataaaggagatacaatctactcagggtaacttgcaagctcattttgtgaattgttaacataccatcagatccaaccacttgacgaagaagttgagcaacgtgcccatggagagatgaaataactaccgcaagctgttttttagaagctgtaaacatagcaacaataacaaattaaatatgaaaatagttcatcgtatcaaaatagtacagcttcaaaagacccttaatttcattattcatatttcccagaaaaattgtaccattgtccaacattttcttcaccagatgaacaccatatttgttagatgacaatgtgagaaaatgtggttgaagctcctcaaatacagcatcattttcagattttgaacagtactttacacaagtctaaagaaagaggaaaacattagaaacaagcaaaaaaggcacaaaagaaaaatgtgtaaaacagaaagtataactaagtggtagataatcacctgcagaacacgagaagaaacatgagagcctgcaatttcagctatctttcccttcattttttgtagtgcttcggtgatcaaccttaccgtgataaattacaaattaaaaccaagttcagaaacatatacaaagggaagaagtttaaaaagtggatgaataaaaaaacagaaagacaatttcatggtttttaaagacaagtaaattcttatgcaagatacatacttggctctatcttctttgccaatattgcgaaccctcatcttttcccacaaatgtgcaagctcctattgcaatgagaggaaatataacaaagttaattagcccacaagtccaagataaatttctgcaatgcctcaattaattaatcatgtttttgcactaagttcaaatttagtctaccttcatttcctctacaaagtcttagagtaatgccaacatttatcaattttcagtttttattgttaaaattctcgaatagcagtgagacataccgaagctaacaaaagtacttacttgttctaaagtgtaataaggcttcctcttcttcttcctggcctcagcaagatcctgcaacaagacccacaagccaaaattttcttcatgccacattcaaagcttaaatgttcaaaacagatataaatacagaaacccaatacaaaatattgattaaaaaacccaagtatcacattcaattctatcatagagttagataaaaaatccagtatcggcaatacaactaaa

SEQ ID NO: 44925 - DNA, 801 bp, Cannabis sativa
aaattagacaaaagtccttaaatacaacaatctcaataatttagggagtatttttaacgactttaaagtttagagagcataatttagtaaatgtcaaattcaaaaagtgaaaatactaattaacttttttttttttgtaaatatatatgattagtgaaagtttaattaatattgtttgaaggaataagagtacatattgaaatataagatgatatgaataattaaaggaacttgaaatgcgtgcggggagccgttgtcagaaagagaaggatgtattattcacgatgctaagtgggcctgtcctctggaaatcattatgttgagtttattagtttttatacacttattttattgtatgtacacttattgcgaaatactacagcacggaaaatattactattggttacagttaaatatggggtggagtggaggccacatatttaatttaataaataagatgaataattattaatcagttgctctaatatatgtagagagaggccaaagacaaaaagctttaaaaagagttatataaaaaaaagaaaaagaaaaagaagtgttatggaaactgcatgcgtctctctctctctcttgtctctgagaaatgtctgtctttgcatgcttaatttggagtgtttctcttggatcacgcaatgcagcaataaaatgaaaattcattccttcttctctgttttgttacaactgataataaatagattattttattactaacttctccaattctaatccccttaattatcattttctgttgagccctttactctgcatgtacgtatttgg

SEQ ID NO: 44926 - DNA, 3713 bp, Cannabis sativa
tcagttggttacaaacagttaagactgttaaaaaaaatagcagaaaacaattaacgaaactaactgtttattatctaatatcccccctcaaacgaaaaggggttccagccattttgagtttgtctttgagatagagaaacctatcagtagtgagggcctttgtaagagaatcagcaacttgatcaactgctggaacataccgaaccgacagctcctttgccataatttggtctcgaacaaagtggagatcaatctcaatgtgtttggaccgtgcatgaaagatcggattagctgcaagggcagcagctccttgattatcaacccaaataattggaggatgatgaagagaaacctgtaactcagagagcaaatgaaccagccactttatttctgcagcagtattggccaaacttcgaaactcactttctgtactcgaccgtgcaaccacattttgctttttggcagaccaggatacaaggttgcctccaagaaaaacgacataacccccagtggatttcctgtcatcaatagcactagcccaatcggcatcagaataggcagagatttccattgatgcagcaggtgtgagaagtaatccatctgatattgtcccttttagataccagagtaattttttacaagcagtccaatgtgtaatagtaggtgcatgaataaattgactaagtttgttgatgatgaaagctacgtcaggtcgagttaaagtaaggtattggagggcaccgagggtacttctatagagagtaggatcatgaaatggttcaccatcattgagtgacaatttttgatgagagctggctggattgggacaacttttcactccatcaagctgcaatctagagagaatatcagaaatatatttactttgggagagatacatacccccagaatccctatagatttcaattccaagaaagtaatgtatagacccgagatcttttaatgcaaaagaattattgagatcaacaattaatttggagataagatctgaattaggaccggttactagtatgtcatcaacatacactagtaaaattatcaaagtcgaatctgagccatatacaaacagagatgtgtcagatcgtgatggtcgaaatccccactgtaatagagttgtccgtagcttttcattccaagctcgaggagcttgcttcaacccatagatagccttgtgaagatgacaaacatgattaggtttggtagggtcttcaaagccttttggttgcctcatgtacacagtttcatgtaaatcaccatttaagaatgcattactaacatctaattgtttcacaggccaattggaagtgacagcaagggataggactgttctaaccgtaacaggtttgaccacagggctaaaggtctcttcataatcaattccaagtgtttgcaagtaccctttagcaactaatctagacttgtagttattcaaagaaccatcagcattgagtttgattctgtacacccacttgttgtcaataacatgcatatccggatggtagggaacaagtgtccaagttttagatttgatcaaggctgtgttttctctttgcattgattgtagccatttgggatccttgagagcttgctgagttgttcttggttcagttgggaagaatgtttcttgtaaaggatgtcttgtagccatgtatgcctttggtttgtaaattccactttgagatcgagttttcatgtgatgaacacgatttatgatgccagaaattggtgctgtagcagattgaggagcagtatgagaagcaatggtgagagaatctggtgcaagagaagttgttgttggttgctgcagcatcatagtagcatcaggagtggaagatggtggcagtggtatggatgatactgtcaagtcaggtatagaaaaagggacagtagggtgttggttattattttctgggttatcaggtggaatttctgggtgaataggtggaatttctgggtttaatatggatgttgctggctgtagtataggtagtggagggtcaggtattgatggttggttatgtgtggcagtattttgattgggcatagaaaggtgagaagcaccagttgcacaatcaagaagagagttagcaccagtagcaagattatttttgaatgaaaatgcaggaaatgtagaagaagaggaagattgtacctgacttctgttgaagactgtaaaggcaggaaaatgactttcattaaaaacaacattccttgcaatgtacattctgccattggagttctcacatagataacctttgtgatgtgaagaataaccaacaaagatgcattgatcagatctatattccagcttatggttgttgtaaggccgcaagtggggaaaacaagcacagccaaagggcttgagaatcttgtaatccggttgagtcccaaacaagctttcataaggagttttaaacccaagaacaactgtaggaagacgattgattgtgaaaacggcacattgaaaagcataccaccaataggacaagggtaaaccaccttgagcaagtagaaccaaaccggtttaagttatgtggcgatgttttcgttcatctcttccattttgttcatgatcatgtggacaaggatgttgaaaatgaatcccttgatcactaaggaatctagcaaaacgcctatactctcctccccaatcggattggacacttttaattggcaagttaaattgtttttcaaccatgcttttgaactttataaagacatcaaatgcttgagatttgagagttaaaggatatatccaagtatatctagtgtgatcatctataaagtgaatatagtattgaaaaccttctttagatgcaacatgggacggcccccacaaatcagtatgaattaatgcaagaggttgagaagcatggctagtagataaggggtaagaaagtttatgacttttccctttttgacatgccacacaaaattgtaaatcttttaaaatcccactatgtgaaatatttggtaaaagtctgcttaaaacagcagcacttggatggcccaatttttgatgccaaatgttgacatcttgtttcaaagtagtagataaagcagtggaaaaacaaggtaaagaataggatgaatcaaactctttattattgatagactgtgtacatgagtctactgtcataccagtagagatattacaaaaggaattagtatgagaaacagtaggaggacaatttgaagaagacacagtggtaagattgcattgtaatgcaggagaggatgaacccgattcaccaataatataaaggccatctttaattggtcccttgagaagaacaactcctctgaatttgtcctttacaaaacaacaatgcttgtgaaattcaagatagacattattatcattcgttagtttagacacactaactaaattctttttaatggcaggaacattaagaacggaatttaaacgcaagggataagaagtgttgggagataagaaggtagacccaacatgagtgatgagtaattgcttaccatcaccaacaactaaggactcagttccagtgtagggagagggtgattcaagagattcagatccattagtcacatgaacattagctcctgtatcaacaaaccaaaggttatcatcaccaaagtcagggataacagtggagttatatacctgatattcattgtcagtgtccaattccgtaagataagcccgtggattgaca

SEQ ID NO: 44927 - DNA, 3399 bp, Cannabis sativa
atatcttaaataaatataaccaaatatgagtgcacgagtatacttaggtgtcccacatggtattgtcccaaacacattctcccctcaaactaaggagaacccatcttcctcttcactacttcatcatcttcttcttcttcttcctcatcccaaccaatcattactaattattattttcaaaacccacaccccaattcactcaattatataccactttcaattcccaacaccaaagatggcttttttattccttcccatctccaacaattcccatgaatgtttcacagtctccacataatcagattcctcgcccttttcggactcctgggtttttctcttttcctcttatcaatttccatggctaccccagaaccaatcccatcagagctaatacagaaggagatttattcagtgtgggcaattccacctgatgaggtgatcaccagagtcaagaaactcatggagggtcttcgagctgagtttgaaggaccccaatttgaaccccacattacagttgttggagccataagtttgactcctgaagatgctgtgaagaaactcaaaacagcttgtgaaggtcttaaagcttatgatgttaccgttgaccgtgtggctattgggactttcttttatcagtgtgtttatcttctcattcatccaaccaatcaggtaaataagaaaaaagatcacttttttatgttttggtttgtgtttttggattaatgggtgtttgttagattgtttgtaaggtgtttgataaaatgctttactcaatttttgttgtgtgaactgaaaaaaatgattgactttttcatctctgatgaaaagtcaaaggagtataaggctttgcttgtgtgtgctatggtggaagcttgttcactttgatctttcattgttgttatgtatgatgaaagtcaaagcagtatataactacatataatgcttgtattaccagtgtgttccactgaggtaattctaaaaagatcacttttttatctttggtttgtgttttggtttgatgggtatttgtttagattgtttgtaaggagtttgataaaaagctttactcattttgagaccactctgttgtgtgaaactgattgtgatcctaatttgttgacttttttaatttgttgacttccttataatgctataatgctttgtattgtgtatatgattttcatttttctttatcttgtttgtgtttttggcttaatgggtaatttgagtttagtttttgtagattgtttgataaaaggctgtgctcattattgtgatcctaatttcaagtttatgtattgacaactatgggatttcaccactcaaacctattaccacccaagaccaaaaggtagttaagttagttaactaaccaatacaagaggttgtgactcaagttcaacttcttaagctcctataagaatccaactgaggccgcggaatcccaccatcgaaaatgttggttccaagtgacaattcttgtagctctttctagttcccaatctcctcaggaataattccacctagaaaattctgatccaatccaacttttaagccctcaaatttctcaacaacccaacttcatgaccaaaattcccacatttcaaatcaagatgcactaaatttgtttcccatttatgttaagatcccattgtcaaggacttaactttgtgtaaagaacacatcaaagagtttatgcacttgggttggatgtcatggtggaggaagcttgttcactttattctttcattgttgttttatgtataatgatatttatcacttttgttatcttgtttaggtagtggaagcttcatcacattgctgtgaacattttggttacaatagctcaacacgtaagtcatgttttattaaaggaaataatattgattttgctttagctaattattgtatgaaaattgaaatattataaatcacttaatcttctaaaagttttgaacttgacatgaactgaggtgaccttttagttaatggggtattaatttttgcagcactttttatgaactttgagagtgttagaaaagtaagtaaacacaatcgaaaagtgtctttcgaaacaaaaattagtcttttacttatttctttgccgaaaacttaatttgcttcttctgaactatgaaccaaaaattgaatacaagattaatttttggagtctttggtgcttgttcatattcaaatacccgaaactagttttggtgttcgataagtgttttcttttctcatcttgtgataccattttcatgtcttgcagcatacatgcctcatttaagcatcctctactcggatttaaccgaggatgagaagaaaaaagctcaagagaaagctaacatccttgacgacagccttagtggcctgagcttccctataactcgtctcgctttgtacaaaacagacaccgaaaacaaaactctcaagtcttgggaaaagattgccgaatgcagcctcaatcccaagtagattattctctcataatacccttttctttaatgtcatggcttgcaagttgttctaagaactttaaacttaaccatatgtgctattttcagttaaaagttatggacaattttggcatgttgtttgatgttttgagatgttgaatgaagttttaattctatcaataaatagagcaatgctcgatacatactcaaattatatatattttgttatcgatactgtattattactatattggctttaaaattttactttcacgtatacacaggtgtacacattggttatctaattggtatttaaaagtgatatttaactgatgtttcaaatttgtaaaaaaaaaaagtaaatttaagagaattttgcctaaaaaaaaaataaagagttaagtgtataaaaattaaaatataaaaagattttactgtcaattactcaataatatattagtaatttgtgtatgttttatttggtctatcaaagttaatgcttcacatataattttttttccttctattctggatggagtaaaattcaaatcacatgattgaagaaataatttttcatcattagttcttatattttttcaaagcattactagtatttgtcaaaatatttatttctaacaatgctttagatattccataaaaatattggaagactagttgctgaaagttagaaaaattgctcaaagtttgagttaccaaagtgtatttttctcttttaacaacactataagtctttttagttagtcttaggtctttgattggaccttaaatttaagaggaataaaagagtttggatggaatcaataaattaagaattttacttttaaaaagttaaaattttgagtataattggatgaaccacttgaggctagctcaagtggccatagggggtgcgtgtgtattggagatcctgggttcgagtccc

SEQ ID NO: 44928 - DNA, 759 bp, Cannabis sativa
aatgcattgccatctccagacccaaattcttccatttcccagctattaggatttgcatgtccgacgatgttattgatgtattacataaaatgtacattcttaatttttaggttggtgtgggcaagtgcatttgattcacctaacttcttaaatattttattttgaaaactatattaatatttcaattaattaacacatataacttaactaattaaaatatttcttaagagtaattaaattattaccccctcatcatcacatcaatttatttgagaattttacgaacttctataatttctaaattatatgtaaaaatttcctaaattaataaacaaattataatttaattactcttagctaatttaagttaattaagagtaaaacaataaaaaaattataattttctaaattatatgtcaaaatatcctaagttaagactttttttaaatttttacagaaatatctaggtcatttaaatatttaaaatactatttataaatttctgataagtaaaatgatataatataaccataaatataatttttctaacttataatttataaataataaaatattttagataataactaatttatgaatttaaaaatattatagttaagatatctataaaaaatatttagattaattttatatttataattatttaatttgtcatataagataattttaatataatattttaaatttaaaagataatgttatcttttaatttaaaatatgtctactattaaaatattt

SEQ ID NO: 44929 - DNA, 1425 bp, Cannabis sativa
  modified_base (580)..(587): a, c, t, g, unknown or other
  modified_base (650)..(650): a, c, t, g, unknown or other
gtatattcatattagtgttaacaagtttgggctgcaaaaatagagagttggaccatattaattagttaaaagtgagaaaagtactcattttatggtattttggaaaatttacatttttcatggtaataataaaaatgtatattttatataaccaaatggcctttttattgtagtaataataagttagaaatgttatgagcaaataattagtttttgtgtgattgtgaaattaatatacgtactatgttattactatacattaataaatacatgcagattacgtacgtacatacttcatattattaatattgttaatgagtacgtaaagaaatagctaaaggtttcaccaatattttaaactactactcataaatgtaatattaattttgtatgagcatttttagcatcattggtgtctagaggtttggctattaggttgggataagtttaagaatatctttttatatatatatatattaataaaaaatattctcatattatattttagggccttttttatttttacatttcaaaataatttttttttttgtatttttatagaattctacatagaaactcnnnnnnnnactagcactgcaacctaaattgcaacaaaaaatcgtactaaaacccctattgcaactagcgcngcaaccactttagaaactcaaactttaattttgaaaataaagttaaaaaatagtatattaggtaattcccctatattttattgaaatatatctacttttgtgagtgaattgttcaatatactcttactttttacttaactctagcacataatttacattaacttaagagtattgggcatatcatcaataaaagtgtatatatcttaaaaaaatataaaaataaaagtaaaaattaattcatgtaaaataaaatgtatatacaattgtaatttcctctattaagtatgtgcttagagctcactaagggtctatttttccttccttttttgctgattttaaaaaatacaatatttttttctaaataagatctcaaaaatattattttttttttcatatgaaactatatttcaagaccagccctggtgcctaataccttctagaggtgtcatattatgattggttagcgatattctctaaaagttattattacattaaattatataaaatctaatactatattgcaccaataacaatattataccttaaaagatagtaggcaccattaatacattttatcatttatcatattcataatgtccaatatcattacgagactaggttttatgattaacaatttatcgcaattatgaaagtaagatatataaaataggatctaatattacattaattacaccaataataatatgatactttatatattgttagactatattgcctcatttttagtaattttctacaatattaaggagtttta

SEQ ID NO: 44930 - DNA, 2070 bp, Cannabis sativa
ttttattttagtcaaatttttaatattatcacggtttttaataattaattaatctattaatattataaactagtttataaaatcacacacgtggtgtccctatattagggtgttactacgcgaattacttaaggcttcccactcagaaaaacttgatgtagatgacaatccaatcgaagattgggatgatttcgctacacaaagtcttggttgatcctcgaaaacaacttggagtaggtcgtcgtctatttggttatcacatccctagaattcacccaggttcatctacaaaagaagaagaatagataggtgaggaaccgaacaaggctggaatgtctttccaaagaaaaacactccatatactccgaccaaagaagagaaagagatcaaattaaggaaaaatcgtcctattgaaaggattttagagaacaaggaaatttagggttttgaaaccccaaaagctctagagaacaaagacagagaaattgggttaaattttactcaaaagtatctatcatagaatagttcaatctcaacaatcaggttctgagtttatttcattcaaaataaattcaaaaactctagattctaacagcaaaaagacaagcatgtatatccagtaatgtcatagagaatttatatacaaaattcataagaatgaagaagaagtaacttactcattggttcgcaatttgattaaaacttctcgatgaaatagtctgatcagggatgaataacacaaatagattaagaacacttctcgcttttagctctaaagtttgcgaattgttaaaaaaaatagaaattggaattttttttttatccttttatagtcaccgaggcacacaattggtatcaaattcaaaaattcatgtttccccccaaaaaataatgaaagctcattattgtgaaagtaaagtaaccgtcagtgcacgatctcccatgtacgattttcagggtaaagcatttaatgttgagatttgaaagacaggtagagattcgcacgccttgggtaaggctaatgtcacatccaggttggcaagtgtgtacagacgcaagtcacctatttgagtgacatgtaaaccgttgaagtccctgtacaagtagaagttcccacacgaacttggggcaaattttattccaaaatttacatgggtgatgtggcagatgattgggtgacacgtgttaaggagaataactctggtcagtatttctacatgccgacaaggtttgaaagacttatataggccctgcacctcaccctgcactgagcaacagtagtgatccgagataggtgatgttccgattagagaacctcactgaaagatactttgatatattttccttaacttcctccacaattatagctcaataagaatctctattttcatgagcttgatttgatagattgagaaaattgtgggattgcatattcaaatcctcctagatttatctcctattattttgtaacaaaaggtatttgtattatttcaatataaatagtgaagtcatcacactattcaagagacattttttcacataagaaagagagtaatcactctacaaaaatattgtttttcaagagctattgagaaactcacctagtcggaccttatgttcttgatagttcttactaatacaactaaaggggagtaggcttataccattataaggggccgaatttcaataaatattgagtgtcgttcattattcttatctcattattaatttctctacaattattatcgctttaatagactcaatgtcgttggccaatagttatattatatgacaactcattagtttcgaaaataatttttaaggctactcaaatgtattttagattataagctatgataatataacttcaaaataactaattaattactaaaatgtatacaaataaattttggatgtaaccaaattgaatatcaaattatatgatataaaaataattttttttatgtaaatgtaattaattagtttcttattaacactattaataaccaaaaagtatcttttaaaaatgcaggaaattaaaaaaacgggaattcaagtattaaacttgag

SEQ ID NO: 44931 - DNA, 1112 bp, Cannabis sativa
  modified_base (1084)..(1084): a, c, t, g, unknown or other
gcttctacatggtatcagaagtctcccatggagtcctccattccatctcccgatcctacaccttcctctgttactgatcctccacctgccatgtccgcccattcttccactcccagtacccctgtttggaatcctttttccagttctttatccacatctcttacaatcaagttagatcgcactaactttctttcttggaagtcgcaagtggtgcctacagtcatcggccatgatcttgatgaaatcattttcagtggtgtgcctcctcctaagatcttggttgatggtaatatcaatccctcatattagcaatggaaaaagagggatcaactgcttctttcatggcttcgttcctccatgactgaaggagttctggcttcggttgctaatcaccacacatcgtttgctgtttggcgtgcattggagcaaagatttaccagtcaatctcgtgctcgactgctccaattgaaaggtcagttctctaacgttcagaaaggcaatctctccatcgctgattatgtcgataaagttcagatgcttgctgattctttgactattgctgggtcgaatattagtgatcaagatgtggttcttcagatcttaaacggtcttggtgctgaatttgatcccgtcgtatctggaatcacatcaagaagtgattctttatctcttgatgaggttcaggctcttctcctgtcccatgagagccgactcgagcatcacagcaccatcactgatactgccatgaggcttcaagccaatctggctcttggaaatcattgacctaacccaggcagatacatccctccacctgctcgaggaaatgccaatgaatcatcttcaagaattgttggcagaggtggctatcgtggtccatttcagaaccggttgatgtgtcaattgtgcctcaagagtggtcacactgctgcggtgtgccactacagattcgacaaaacctttgttccccctaaaccaagtgctgcatcaccttgggcctatattgctgaagttgatatggaaaatgacagtcaggtatataacacaactattttacctgactttggtgatgataatctttggtttnttgatacaggagctaatgttcatgtgac

SEQ ID NO: 44932 - DNA, 3473 bp, Cannabis sativa
aaatagtacggtaaaaacacatgcatatataatttactcctgctctgaaaattgtatgtaattaagaaaatacattcatatataattagctgtaaaaattaaactaatttctaaagttaacataaatcaaatagagaggagcaagcaaggactctctaaacaaaatataaaaactctgtaaaaataaaacatttctgaaaggtactcaccttaattcaatccaaactcagatgtttttagtacacaaaattagatatgaccatcattgataatatcatggtatatttatactcaaattaagtgtctgtctttcttcttctttttttggtgaaaaaaaataaaaataaaataacaatcacatgtgatttccccctaactacattaggtatttttatcagatttttttttttaattagctacatttaaaagatttttctatttctgaaaatggtaattgttatccccattgatatttttgattgatatttttgttgctctttttctattttgtgttggtgtaatatcctaaacattaaaaaaaaaatctcatctctgtaattaaaattgcttttatggatttttcttattttgtttcatgttacttctaaaacttaagattttttttttgaagatttagtagttgtttttatttttattttttttttttcaaaagagatttggtggttttgctagccccttgttttcgttttctttgtgtattgttcttgcgttctttgtgtattgtgtgtttttgtttttcatgccattttttaatttaatttttggagcatcctatcttggttcaaaattctaattttttttttttgaaattatgaaacatatatgtacttattaaaaaaaaattagtcaattttttcatttaaattaataaatcataaaagtataatgtaatagtttttgttggagcaaaaatgagcagcaaatataattacaattatattgattgaaaaaaaatgagttacaaattaaaaattgatggagacatataataataacatatagatgaaaaaaaataattacctttttattgaataaaatcaataatattgacagactcgctagaagcttcctattcgcctttcggggggcataagatcgtcctcaacaatctaacagaaatgtaaactcggattgaactgagaaaatagttggaaaagaattgatagaatcatgtgggtattcctcgtacaaactcctcatcatggtttaattttaggttttgaatcgaacaaattggctagtgaaaattctcgagtaaagtttgctattacataatttaagctctttaacactgtatttagtattgaagattgagctttccatctctaatagatagatatacattcagaaaataaaaattactgaagtattttagacaaataatggttaagtgttgaatgattgacgacccttttttcatctataaatactgctatcttagggtcggggttgttgatattctattcgcatatttttttttttttttttttaataatgcatgcatttatatatgtcgcacctgttatgtctgatattttctatttttaaaatacaataatttttatttttttgtagtttataaatcaagcggcgtaataccagcaatagtatcagagcaattcttttggtaggtgtattagtgacttactaaaaatattactaactgttagtatattttacttatagtgatttgatatttttttttaaagttaatttgatgtaatgacggattatttgatttaaatatttttattaaattaaattttgatacaatttattaatattttttttttatttgtctaataatatattaccgtattattgttacattagaaattatgccaaaatgttatattttattaataattttgagtactttagaaaatttatttacattataaattttattatattataatatttattgttatttatttataacgatactttaatttaatttattttatatatatgtgtatatctatatataatatatattgcaatttttattagattaaatctccttacaagcttaattcaacttatgaagttatgtttatttcactgagtgttagttatatctgtttgcaacagaactgacttcatcaactaccaagactgctataaatagcaaagcctctcaacttagatgacaagatcacaacttgagcaagattgagctccaagagagctagataggaaagtattcttaagagagagaaacaaaagagagttagagaggggaaagagagaaaagttgtaaatagagtaagagaagaagaatgagatcaagaagattaccagtcaacttacgtgactcggaatcttcaacaccattgatgtaattcaagactgattatagtggaagagcagaccaattcctatggcgagctcaacggagatgtaagctgtttaacgtctaaatgtgacttttatggtggttgtagtatagatcaggtggtagattccacagggaagtatttatgaacaaaaacattagtagaaaataaatacaaaaggttaataaagctagagtggtaatagtaaccagtgagtttgtgatttttattttggtattaaatagtaaaagaaaacaaataaaatgtgtaatcaatggtaaagagggaaagattttaagagtcatccatatgattgtttagctattttgtatctttgattcacaaagttgagacaaatgatgtaacactaaagctcattatattttgagtatacaagttattgaaaataaaagaaataatttaattctatgtcactacaacaaaaactgtcatcaagagcgacttttgtcgttctagaaaacttcctaattcgttctaggagattatttggcgcgactagtcattcttaatgttttgttcctgataactcaaataagataaattatttaattatttctaataattatttaattattatcaaaataagataaattttatccggaacgactttgataagtcgcgcctaataccatcactattaggaatgaaatttcattgttcctgatactatcgcgcctaaaacctgtatttgttgtagtgtgtagagcctagaaataatattatacatcaagcaataatgctataaaagactaaacataaaactaagtcaataatatttttaccaactagaaacacatagaaagagcatgactaaacttatatattttttttaaaaaaaagtaaataaaaatgaacatgatatatagaatatgagtaatactatcattaatattattgcccttaattttatccaaaatacgtggaccagtgcgactgcgacacgtggatttgaggagtagggttttgagataatttgactaagtctttttaaatcaagaggattaacaagaaaaatgcctcctggagaaggtatgaaggatccacgtactcccggagggcgaagtcgtagcaaggcacctctgggaggtatca

SEQ ID NO: 44933 - DNA, 1327 bp, Cannabis sativa
aaaaaaatatataaatatattagaaagataaaattgattccttcctctttaatttttggtccaatgatgatatttatgatgagacaaataaaagctactaggtgataatttctattcaaaaaattttgggccataaatggagatctctccccaccatctttttccaaccaaatttttgggaggcttccaccactatttaattgtcactactatacactttaaaattattcattctcttttttttttttttttgaatgctaagatcaactgttaacctccaattttaatctttacatgaaaataaatatatatctaataatttttttatattgttattcattatagttacaatgttaaatttgtaaattattaaaatattattagacaacagggtttctgatattctattttacatactatgctcgtgtttgaaaaactttaaacttgttttcgatactttaaattatttaaaaaaattgtaattataataaacactatataaaaaaataaaaaaattatttttctttttatctatcatctttttcttcttttattaattttttttattactttttaaaagagtattgattcttggttgagtgaatataattaatggtccaaacgtggtccattattgtttatatttatttgacttttaatagatttgatcacttggaactcagcgtgttttgctcatgcatatctatgtgcctcccaaaaatatgttttaatgatacaaaagagacatctataaatgtaacaatggaccattttcattattattattattatgattagtcactctctagtctctattgctttcttttcttggaaaaatcccaaaacttttttttttttaatttcttatacaaatatattatagggataatattaaaaaaaaaatacaaaatcttttatgtacacttgaaaatttagtttatacacaattttagttaaatttattttcattaaattatcaaaatatccatagtttaattacatgatagatctaatacattggaaagcattttataatattaatgtaaccctctaccaatttaggcgcgctataatatttttttaattactgtacactcatttactaatcaaataatttatttagaagtaagtttaattaaaactttcttaaatacacttaaacttaaataaatatatacaaatatatattttaggcatggccaactataggctaaggtaggttaggttcgcgcctagggctcactcattgtaggagctcaaattaaaaacaaaaagtaccttttaaaaaatatacgtatatttttttaataaattttaaaaataccat

SEQ ID NO: 44934 - DNA, 2221 bp, Cannabis sativa
aattttgttaatgtataaaaaaagtattcttcaacttctccccttttttttagcaaaataaaataaaattcaaataattctttgaactatttttctagcaaaagttttttctttaaaggtcttacgaggtctcttggactgaggggctttgagtaacggtctcggccaccctaacctgaagacgaccgtggttacacatattgtaaaatttaatgcactaaaaaagaagtatttttgctagtatgtttcacaaaatatatttgaaatatttattctggagattaaattgtgtctattcattatttttggtaaatttgtggctaaatttaaacatttataaaaaagattgatgtggggctaggctaggatagctattttagatggatatcatcactagtaatttagtattgttattaggcatgaactagtgttttttttaaacaattttcatagtaatttttgtattgagtagttttcatatttgagattaattttgatgtgattttctattttgtttgatccctgcagatggagaggtcttgatgaggatgactctgtccaaccaacacttgtgagaatgccaagaaacaagtacccaattatagttgaagctctttgagatatccatccaataaatcaaaaatatagtaattggtgttgagtattaataaaactccttaataagtagcactacctaacatcactacaaatatgattgattaatgggtttttttttttaaaaataagttattaaatcaatatatatttttatatagttgcattaataatagtatgatactttatagtaaagcttatttatactgtaagtccttaaattatataagttttggcaagttgatccctaaattttatttttttggcaaattagttctcaaactttattttttggtaaattggcaagttgatccctaaactttattttttgataaattggcaaattaatgtatgaggtaatataagtttagaaattcaattattttgaattttatgaaaataattttgaaatttattcaaaataaaattattttggccaatagaatagtacgccatgtgtacataggtgtacaccttggtaatcctagttggtgtcactattggcatttaacaataacatttaaccgataccttggatttgcaagttaacttaagggagttgtactataaaaaaaaaaaaaaaataaggagttaagtgtatactaattaaaatttaagggagtttgaccgtaaatttttctataatatttataacttaatgtatagtgcctctttacatgtacctaataattattcatgagctaaatcttttagctataatatctcatttgatgggatgacatttttcatttgttttttttttttcttttctttaattttttttaccttatagctaaataatttacctctattttagctactctaatatgagtgttataagagcactcacaacaactgctctaaaatagagaaactttaaaatatataaagaatcgtattacaaacacgctacattaaatgctttaaactctttcttcattttaaagtttttttaaaatttactatttatgctctacatttatagaatatactatttattgctctaaatatattttattaattgttttagattttaataattatttttgtatgtatgtgtatgcattaatatcatatatttgaaagaaaatatattaaactttttaaaaagtggggttttggtaatgtgtttttaaagaagctcatgtaaggtgtaatataaaagtgtgttgtaaattagagaagatagaattttggtgatgtgctttaaagaatagaatatagatagagaagctattgtgagtgctctaagagcatctccaatggtagcatcctttaaggatgctaaaaatttccacatcattcaaaaatataatattttattttatctctcttccacatcatttttagcactcttacttctaaaattactccaatggtatagcactcttcaaaaatatttcaattatgatctcacacattattatttaattttttagttttaattttttattaaaaaaaataataatagcatcaatgctactgtatagcattcacacatatttccaaaatagtattctttttcctctaatggtatagcatctcaactttttactactttctttatccacctcagcaagcattctttaaatttttttttactatt

SEQ ID NO: 44935 - DNA, 3492 bp, Cannabis sativa
ccctttgtccatctcataatagagagtttttatcactttttcaggatctgggtgaccatcaatatcataataatactacatttaaagaaattaatcattaattggttgttcgattaattataaataaaaattatttcaactaccaattatttaccttcattctctgcacaacttgttgcttaaaatgttgagttatatcaacaaaatctaagtagttccctagcaataacatactcacttcgacacctaactggcagataaaagcttggttctccaagccaataacttttcccatcgcatgatcaagcataagtggcaatagcccttcatttgcccaccttcgagtatttaatggtatataactaggagcaccacgacattttcttttgggcggtgcagctttctcgcaagttgagagtaccctactaggatccggtggatctaaaccaccacaatctccccaatgataagatgttacatcggctaacattatgactcttaaaatgaaaaattatatgactaaattactatgaatgtagattagcaaaaattataattaatctaaattaaatatcataatcaaaattagcatcatcagatacactatttatttaattattacaaaatatttaaattataagtagaaataatagtcattatcactctcatcattttgagaaataatatcatctttacatcgatcaactagcaacttgtcaccttcatcagctattacatcatcaacgtcatcatctacaacatttttatcagcatgattaacattcaaattttgtgtagtatcaattattgtcgccattttagaaggttgaaaaattaactctcctagatccattatcaaccaaaaatttgacgagcttgaatcatgtacaacatgttcatcaacttcatcctccttaatgtttcgaatttgtcgatggtttacatcctcgactattttccagtttctacctctaagcagattattgagataaaatacttgcttaacttgagtagcaagtataaatgggtcatctttttaccttcaccactcacgttgatggttctgagtgattgttttcttcctacatggattagtattaaaatatttacactaaaataatgtcactgaatacacaccagtaaaagttaccatcaatacatcttttagcgtcccataataattaaatgcttctattcccaccacagagactctgctattttgtgtggtatgcttcttatcacgttcagctaccataaaacaaataccattcactacaacatcttcataatatgctactaagtaatctgattcagatgctaaagctagaaactcttcatcattctccaatgatccaagcttgtgtaagccatatatcgaaatgaacaaaattatattagaatgaataataagtaatcatgatgataatgaatgtttatgagagtctcatatcaccttcttatgaaaccatcgctgaaaatatttttttgtgtagaacgttatgatctccatctggatatttaagctttatctcttctaagtgttcactataattcaaatgatatgtctatgttaaataagacatttagaatgagaataaattttaattattaaaaaaagaacttgctctaaatatggtttaatttcatgtgaattgtcaaatatgaaccacttagccttttcactagtcttacggtctagaggcatgatattttccattttaaggggatcacattgtgagtgaaagagggtaagaattctagaatcacattatcttcattgcgatcaagtcggttatatatggtttctgtccctttaaactacataaaacgaaatgctaatgcctcatctgcaacatagctttccactatcaacccttcaagatgagctttgtttctaacataattcttcaatttttttatgtacctctcaaaagtgtacatccacctcataaacacaggtccactcaaaattacttcttcaggtaaatgtaagatcaaataaatcatgatatcaaggaaagctagaggaaaaatcaactccaacttacccaatattaaaataaggtctttttgtgcttcctccatatctttaacgcttatagttcttgaacataattgtttgaaaaagttgcacaattcataaatagtggttcatatattatttgggagaaatttgcagaccaactgacaataatcgttgcattattatatgacagtcgtgagacttcaacccaaggatgtttgtaaaatcattgttcactttcttctttatatttgagaaaatccatctgaaaacttcaagtctttgatgaatttacaaattttgagtttttcattaggtttgggaacgtaaggggagtgcggcttcatcaacttaccgttgtcatcttcataaatccacaactattccattactcccaacttcatgtctctcgttggttgtgtcctttaatttatcattgtccaagattgtgcgtaagagactatcacacattcttctcaacatgcataacattaatattgtgtttcaaagtgtttgtacaccaataattaagctcatagaagatactttttttcttccaattttgatcttttgcaaattgtctacttttcacgcctccaaactgctcatgttttccagtaacttgcggtacaagtttatttacttgttctaattacctcacaagtaaaatgtctcgctggacgtcttcttttaatttgtccatcaaagttagtgcccctcctaaattgatgggtactgggcaagaatcttctgtggccaacataagatgtcttgtaattcacttgaatggaagaaatatcttcgttacatgctggaaaaattttgtatcgttgaccactccatccagacaaactactttgagtaggaaaatcattcactgtccataaaagggctgcacaaaacttgaacatagtgtttgtcctacaatctcttatattaaacccatcaacccacaactcttttatctcatccaccgatgatcttagaaatacattcatataattatctagtgattttggtccagaaataagtatgatcaacataaaaattatgatctttcatacacaatcatggtgggatattatagttcactaacacgataggccacatactatacactaggctcatgttgccaaatggattaaaaccatcagcagttaatcctaagcgaatatttttgggttcactatcaaaattaggatgttttgcatgaaagtccttcaaagctaactcatccaccgggtgatacatcacctgttcatcctttgatttcccagtgtggtgccataccatatgttttgttgtatgtcttaaactatacaatcttttcaactggggtgtcaatgaaaataacgcaacaccttactgttggaaattattttaccacgatctagatttactaacatgtatgtttgattataattctataatctaacatcctaaatatgaatcccttaaaataatgaaat

SEQ ID NO: 44936 - DNA, 1690 bp, Cannabis sativa
atgagttggaatactcatggacattatcgggccaacccgataatgcatctaagaatgctgtcagaggttaacaggtacgtttccattagcttgtcggtatatcccgcttgctcgggatgtggcctaaacctacaagagatgttgtggtgtgtcttggccacgattctcaacacgagatgacacgggtagtcattcgtgggctggtttgcatacgcgcatgggacagatgcactatgttggagagagacagaactagtttggtgacttgtctcgagggcctaccacttaacgttgctagcgtaaattttttgttaatatatctatgtattaaattttaaattttttattaactttttgtcatttttattattttgttaatatatctaaatattaattaatatctatgcgcattagagcagaatactataatttgattcaaacgaatcacagaattatgtttttgttacaattttcacttctcccattttgctttatttttttataattcatttgagaacattttcatagaaatatgtttacaaatctaatcagtcaagtttaaacctgattttattttggcattttgttagaaaagattagcttaatacatataatttttgtataatcaggaaaacaagaagataaagaaagaagcaaacaagtataggctataatgtgtgatcctgtttcatcgatttgtggggcggtcgtgggtgaattaatcaaagatcaaatctaccggtgcgtgagacatgtgaatcgactttgtcactgtgcaactcacagaaggaatgtaaagcaattgaatgaacaactagaaacattgcacaaatacagaaatgaattgtcaaaggatgttgagtcgaagaaacaaaaacaagaacaaattcataaagaggttatcgattggctccacgaaacacagaataatatctttgaaaagcgtgaagaggcagagcatgcaagccaaaacttttgttatttcacattccatccaaaagcaactattgatgaggacacatttctacatatcaaaaataaaatagatggtttaatcgaacgttacgtgaattttcatggtcgcatttcttatccttctccttatttagacaaagattacatggcctttgagggaagaagaagaattttggaagatgtgatgaatgcactcaaagatcccactgttcagatgattgggctgtgtggaatgggtggcatcggcaaaaccacacttgcaaaagcaatagctcgacaagcaaaagaagtgaatctgtttgataaggtgatggatagtgctgtttctcaaactcctgatttttcaaaaattcaatgtgaaatagcaaatcatcttggttttaaattcgacactgttgagaccgaacccataaaagcagataagcttcgccaagagttaagtaaacaagtgaaggttttgattattcttgatgatatttggaaggaaataaatctgtttgaaattggaatacactttagcaataatcaaaacgggtgcaagattttattcacttcaagacgtcaaggtttatacgtttctacttctacaagtgagtttgctctcggtcttttgaaagagggtgaagcaaaggagttatttcacagagttgttggcgaaacacttgatgaagaacgcgaagacctctcaaaggaattggtttcagaatgtggagga

SEQ ID NO: 44937 - DNA, 1780 bp, Cannabis sativa
aaacaccacaaaaatatattggaaataatacaagaatttatggaaaatattataacttaatatagagattgagttactccacttagtactaattcgttttaagttgtaaccaaatctctcactaaaatacattcccttttttattcaaaaaaaaaaaattcccttttaatttataaaatgatatcagaacaaataaagtttctattgtctccacttttaatctttatttggaacttttgacgaatgtatttctaaaaaaacacaaattttccaatgtgtatccacaagtttcttgatttaggcttgtgagatactattattattctatttttttagtttttcactgttttagagttagttacaaggctatacacatttctctataaacattctgctcaaagacacgttaatctcttacaagtctttgtagctcatattcatcttcagattttgtacacttgatagtcttgtagaaataagtttttttgtggtcacatttgttatacctacactttcgagtctaaatgttgaaagaatgtattagaaatagttctacattaagaatataagaaaaatattataatttgattaatctagtcaattacttgttagtcaattacttgttagtaccaaataattttaacttttttttttaaaaaataaaaataaaacgtgcctcttgatggataaaaattagacttcgtgatcattacaaaagatatttgctagaatggaggatacagataagcaaccatattaattgtggataaaggctcactttaccacattatgagctataaaattacaagtattaccaatacttagaaaataaacaacctacaaaataaggagataaccttttacaaaaagaaaagtagttcccaatctcccatctagcctccttgctgttgagagtattgatcactaccctagagtcgctctcctcaataatgaacttgcaacctttaacatttgccatgtacagtgccaaacaacaagcagtcaccttgccacaaagaacataagaaaaatctaactttgtcgtgcttactcaagccacctcgccttcgtggtttctagctacagccacaatacacatgcattccattcatactttaagatgtttgagccaatcttgaggaggaggaggccattcatccaacaagatcggaatatgagcgagataagggaaactctataatttgcataagagtaatgaatagagacaatacaatgctttacattatccatattattattgtgtaccttatcattttggaccctccaaatagtgtcaacaacaattgaagtatacagaaaaacctcatctgcattaatgcctttggtttttaagttccaaataaattggacccagtctcacatgcaaatacctatacccgaaatagaaaaaataccacaagacgaggactgccacaaataaaaagtcaaattgcaagtgaggaaaaggtgcaacatagattgctcctcaaccccacatatagggcaccctgcaccatcaatacagattctcttatgaagaacagatcgaattgagagagcattagacaagatgctccaccaaagaatgttatggcaatcgagaatcttgttatttcaaagtttgttctagagaaaaggtgcaacctcgcaagaagaagccctatgcaaagcttgtaaaagataggctaatttgcgagagaatcaccattacttttctttgtccagacccgtttatctttttcctaaccaggatgctcaatttttgaatgtcctaatcatt

SEQ ID NO: 44938 - DNA, 4165 bp, Cannabis sativa
aaataattatataaacggtccggtccggtttaaccgttaatcatatattacgaactttaaccgaaccattacgacgtaaacgctccggattgaccaaaccaccaaaaacggtttccccggttacggtttacaatggtttagattgtagtggtccggatttaaattgcggtttcccggtttatatgaatagccctatgcgagttgaatattttaatggctcacgttgttctggcatgtattataaacgaggcacaagaataccttgaaaaataatattaaagctaaaatataaacaaaaagatcttagtattcatatgagcaatcaaaagatatataaaatagttccataggtgaataactcaaagtatttttttaagttttctctagagaaatatgttaaaactgcttgcatataacagggtagattaaaattgctcgcataaagcaaagcagatgagaatcgctcacaaattaaaactatacacagattataactgctcacatatatacatagtagattgataactacttaaatatatcaaagaaaaacaggtacaatggaaatgctcccagcctaaagtatcttaagttggatcaaaacataaatatttagattgtgagataaaacacaataaataaacatatttagttcaagtataagatacgagacataaaaagtaaagatatatacataaataagcaaagttggcagtccaataatgcaaaagtcgtaacaaaataatgccactaggggcaaccattgtctcagccaaagagctatttttctatgttttttttttaaaaaaataaataatatataaaaaaactaagtctaaatggtaggagacttggacgaatcttcttcttcttcttcctcggagtccactgcttcttactcattggttttctcgcagtaagccagtacctccgtagcaccgtcacccaggaagctcaggtccatgttgggattggccaaccaggctcagtaaatggatcattttgcaacatttctgcacctctccttagcatcatcctcgacaccatcaagctttttatttgccccattgagctcttcctggagtttttggcaagcctcgcaatggtctttggcttctttttgaccatcttcaagctcagccttatgattcctctttagttccttgacatccttggttaagcgtatgtcctccttctgggcatcattccattgcttcgcgatgatcattgttgtttattggatttgcagagtttagtttctagttgttggattttcttaaggccttggtgttgtgccacatgagacagaatggatgcctacaaacaaaatatatataaatttgaaagaaagataaggaaaaacaaagagaacgaggaaaggaactaaccgagagactaaagttgagactcttctcaaacaactcctcgaagttgccattattaaccaaatcctagtcgccagactgaaaggatttgaaatggcgccaactagaggtggcatattacgagcagaactggaagccggtacttcctgcttcactaggctaggggcaggaaagggtccaacaagactatttcaggtcttttacccgaagatttaacctagtgagtcgaaccctgggcttgctcgtcaatatccaagacggctggagtttgagagtgaacttgatcgacagttggctcgatgattatatactgcgaagcatgttttttgtttgcagtggtcttccttaatctcttcatgggctctggattcgttctcgatgaagttttcgaggcaacaatcctcttctttccttttttgccagacgtattgagaaggttttctaaatccatatctgtgaggcaaaataatacatcaacacttattcaaaattagataatagaaaggtggggaataaactcccacttaaaggaagttaccataattatcagataatgaagaggaacaattatggtaattactaaattccctatatccagtgatcatgtaaatatcgtaagggtttgttggaaacaaatcccaatctaaatccagatgacttgccatatcaaagttagtaccatattgcttggcaattccgaagtaagaactagtgcaactaagttggacatgaaattgagtagggctacacatggattgggttgggcagtttttgggcagtttggcagtctttaaaaatcacaacctatacctgcccaataaaagtttgcggtgtgcaattttttaaggggcaattttatgcaattttttgagcggtttgggttgcttaaaatcaaaacttccaaagtacattgtcataaggaaaaaaaatattcaaccaaatttttttacctgttaataacaatgcataaaagttcttaaaaaattcatatcaatctttataaactccataacaaggcataataatagtccataaaaattttaaacagttcttataaagtgcatactccataacaatcttaaaaagatctttaaaaagtccatacaagttcataacaatccaaaaaaatccataatacaatctaagttaataataattcataaaagtctccataattaaaacaaaagtgacttcaaaagttggctccaaatgaaaaactctgcgaaataataaaaataaaataattaccatataaataaaaacttaatattaattaaattacaatacatattataataacaaaccttaacctctaatgaaaccattttaaatttgcaacgctatatatcatttagtatgctcgctagaagtagttataatctctgcaaaaaaataaaatatatatcataacaagataattttcttcagctattaaaaagtaatagtaataataaaatttatatataaggagttttcaagatcaaatagtatagagtgaatatttatcaagacaatgacaaataaatgatgaaatatatatatatatcaaataataaaaagttgtatatatataaagtaagtatattttactattttcaagttgttcagaagtatttagtaattcctcttcatccctgtatttcttgacaataattggttgattactttcactataccaattcttcaaacatattagaccctccactgtctttggtagttatgagctttgaaatggatcaagaatgtgcccccaattaaaaatgcagactctgatggcacggtggtaacaagaatggccaaaacttcttgagcaatcaaagataatatcggatacctatttggttgtcccgtccaccacttcaaggtatcaaaacgctgacccataataaaatcttcagtatcatcaaccaaatacttgtcaatctcatttctatttctttcaccatcgtgctgtcgctttttagaaatgaacttggagacaagtccaccaggtttagttgtatctccttcaacagaaagtgataaattagaacttgtagttgaacttgggccctcaccaaagtgcatctcatcgtaaaaatcaaacagcttgcgcaaattctcttcaattttcttaatcaactttgactgcaatgatatatcataaaaagtttcgtaacagtcaaccacaaattgtaacttgtacctaggatcaagaacagtagcaatgattaatgcaccattagctgcctttgactctccccaatatttatcaaattttctcttcatattagcagccatggaggatagcattccatctctttcctttgacaaagttatcaactcattctgaatttcgcagatctcttgaaaatacaagttagaggtcacataagaagacccactaaatttcaaagtgacttcataaaacgtttttaaaaacttcacaaagatccttagatttttccaatcatctttattaggtggtccttccttactctttccattatcctcctcaggaaataatacctataatttttgtcggtctttatcctgtcaaatgccttttggaacttaagagcacactctaacatcaaataagttgagttccatcttgtaggtacatctaaacacaatagcccctcacactcaatatcttcagctttgacacattctttaaatgccaacaaccttgatggtgatgatcttacatatttcatagcatttcttatggtagcaattgacttatttttctcctttagcccatcagctactatcaaattgacaatatgtgcacaacatct

SEQ ID NO: 44939 - DNA, 1094 bp, Cannabis sativa
agggccaattcaactggcaatcttctgtcattacacaagttaaccaaattgttgtttctttcaaccaagtacattgcaatggcaatgttaccagtccttgcagccaatccaagagcattcatatctaacctatccttaatttccaagtcttctctatccatactgttccccaatgttcttacaattccgatatatccaatagaaacagcatgatggagagctgtctcccccaaaagtggatgtcttgctcttactatgtttctgttcactccaatcaaacgagtcacttcttcttcttcattattttcaattgcttcaaacatcctctttaaatccgataacctaactactgcttaataacatatacaatatgagcaaacattaagttaatataatatatgtagtctttatatagataagatggtgatcgaaaataaacaaatgaaaaaattctaaaccaaaataatgaaagatatcatttccatatgtattgtattgatgactgtgtgtattcctagagtttagcaaaaaaattatatgtgtggactaagaaatagtaacagaaatcataatttataaattatataacatagttaatttgtacttcaatatatataactgtacattatgtaggaacaaagatagaaactaataataataatacatatgtttcttttgatcgatcagtttttaccttgattagcatccatagtatcccttacgcagacaatatttcaaatctcttgaagcttaattaaatttcaaaggcaaattgtagcagagtataaaacagtgtttaatgaaggtgcatagatcattaattgatcacatatttatagggggagaatctatataagatgtttttgaaacaaagatgattatttcggtggggtgtgtgtaggtacgaggatatacaaccttattgctttattaatttcctttctttattccaataacaataacacttattagggttagggctgtacaaaaatattcgtaaactgtccaaaccgaataactcgtccaaaccaaaccgaaaaaaccgataaaaattacaaactgaaccgaaaaaactgataaattacaaaccgaaa

SEQ ID NO: 44940 - DNA, 987 bp, Cannabis sativa
aaaaaataaaaaagtataagtagctagattaaacagaagctacaatacacaagtatatatttcttgtatcctatataaataattatatatataaataaatgtcattatcacttagccattataagaaagcgatttttcatactcttccataataaaattgaagaaccacatatgtattaccttaattatgtactcttaattagataaattgtagactcaaattaattaaccattagacataaatgagtgaggttggcctcccattgagcagtgacaccacaaagaaaaatcacatgcatgcttgacatatttatatatatataagatatgtagtggtgggtcttgctatatatataggtttttgtataaattttgacaatgaatcaacacaatacaacactagacaaaattaatcatgatgacattaatgtatatatatagcatttccttttgtgtgttttgcaggttttggagactatcaatgggagaaggagaaacaagggaccacccattagcgaaccctttgggaccaaagagtccaaggcttgaagaagtgggtttggaaccaatgctagtgattgtgggtggcaatgaattgttaagagatagggtagaggagtatgccatgaggttgaaagatatgggtaagaatgttgaatacgttgaattcgagggtcaacaacatggctttttcaccaacgacccttactcccacatttctaaccatgttttgcaacttattaaacgctttattcttcaaaactcatctaattaataactaagcaattacatatcttatatatatatataataaccattattgatagtactggttaattatatacatatattaatattatatatatataagttcacttttgcataatttctctagctctagctcacgcattatgcttttcattttatatcgtttgaggtgatatataattatatggtatatacacatatatagatcgtgtattgatg

SEQ ID NO: 44941 - DNA, 619 bp, Cannabis sativa
cgagatggtcaatggggagcttcgccatcatatcaagcggtcccgctctgacgaccatcatgacactgagatctctcctagaaacgaaggcctagccacggagcaggcctgcctgcaaccatgaagcttgtcagctggaatgcacgtggtattgggagtgatcgtgcattccgtcatctctcccatttggtcactttatgtaaacctaatattttgtttattatggaaactagactggctaagaatgtcgttgatcggcttaatgttagacttcattttgactctggtttggaagtccgtaggataggcagaggagggggccttttgttattatggactaatgatgtaactttaactttgctctctcaatccattagtcattttgattgctatgtgtctctctcttcgaataatgttttttttcttctcacttgtttttatggatcgcccattgagtctcatagacctcaaacctggaaaatcctcaataggattggccacaacaatcccagggatccctggcttattatgggggacttcaatgcttttctttcttcggatgataagcagggaagaaatcccgatagaggtccggctccagaattcaggctactgctta

SEQ ID NO: 44942 - DNA, 1350 bp, Cannabis sativa
aaaaaaaatattaatgagattaaaggaaattaaatattgagaaaaaatagtaaaaattaagtaatttaactatttcaaagaagaaagaaactactactatatatatagttgattataacatgtacccatatcaaattcataagcttatcttctaatttagaaaataattaaagtttgaccaatattatttatttaacctaagatatatctatcacatcttattttatgaaccccacgtgcattttagattctctcttacctaacttatattgccatgaaaaaagataagtagttaagaattttggagcttttggaaaactatgctcataggattttataggaatttttttatagttgagcatgtttttgatcccaccactaaaagtgtgtttaattttgaaagatttattattatacccaaaataaaatttagaataacttattttatgtatgtataaaataagatttaatattatctgtttttaggtttttaattggcacatgaattgattattatccgattttttttttttttaagatgatgatgagcaatgtaattatttagatcttctcacaaattttaagaaatgttgaagaatttactttatcataaataaaaaataaattattttgaagtttgttttatatatgtgtgtgaaataaaatattttaaaatttattttgaaaattataaattatttagaattttataaaaattagtggaagaacctaaataactataatatacactcttatatatataaaatgatatgtccatacaatacatgctctggcgtgccaatatttttcagtcaatcatatattaaaagacgagatttggctggatagttttatgggtcgagtgcagtcggacataactaaagcagtgggtgttagagaggcgttgagttgggttaaggttaataactggagttcatttattttggatatattttgtttgaaagttgttcatgcttttagtaatcccttattggagtttttttcattttgaccgtaagcatttattaaatttatgttatgtgaagattgtttttgttaaacgatcagctaacaaagtgactgtaacgtcccctgcttcaagcctccattgggcacttacacacacacacgaaatgatggctcttatacacgagtacatcactctggttgcttcatggactgatgattgaccctacaaaccaacacgagtgcttctagtgtattttttcctcactcgcatacttcttgggaaaacttcccaggaggtcactcatcgtaaaattacccaggtcaagcacgcttaaccgtggagttctttcgtgttgggctaccaaaaaacaagatgcacct

SEQ ID NO: 44943 - DNA, 926 bp, Cannabis sativa
gacaaggcatgcatgttgttgagtacatgtcagggtatgaccacgccacctacaagatgtggaacaagaggacagttgtgaggaatctctcgtatgagtagtggaggcacctcgtctgcaagctctgacatcttcaaaaatggtatgttgcaaccactacccttgcacgatgggaccgcttgatacccaacagtcactacttggcacaagaccacctcctgcacactgtcatctacaaaagtgcaacgtcctatctgtctccctaggaccacaagtgtaccaacttgtaaatgagagccaatagagctcacccataaataccctattttcaaaattgaaaaatgattggaaaatctttgtaatcaaggcatttggagaagcgagaaaaacttttacttcttcttcttcattaagtttctgcaactcggttgaagttcttaaatatttgctttcatttcgtcataaacctatgattttccggccacaacttcgttgacgaaaattcatcaataaatattattatagtaatattaaaaaggataaatactattttaaatcttgtgttttgcgaaagttatcgatcggaccctctattttatttaataacaaactagcccctatattttccaaaacggtacaaaatagtaccctgggctaatttttttttatcaaaataaaaattaataataacctaatctagatgttttacgataagagtggttatattttctacatccattgatgctagaaattgcctttaagttaatcatactaaaaataatcaaaaattgagcccagattatattttgtaccatttttaaaaatactagatcaaatttatcatttaataaaataaagggtccaatttataatatttgtaagaataattagcatttttacccgttgaactttcgacactacctaat

SEQ ID NO: 44944 - DNA, 2919 bp, Cannabis sativa
  modified_base (1441)..(1445): a, c, t, g, unknown or other
  modified_base (1886)..(1893): a, c, t, g, unknown or other
tcttaagtcaatacaaataacgaggattaggctattaccgaaatgctcggggctgaacctctataaaattcttgtgtctttttattgctttatcgtatattagttattataaatcatttatcgcctgtaaaacaaactcattgtcgttgtctaaaagcgaagtcaacacctatcaactaagaatggtcataaaaggccaagctctcatcgacttcatgactgaatgtacatgaatatcttctgaaatctctcaagatttgggagaaaagcaagagcaagagtagaagcaagagcataaaaattcagtctggaagttgcactaactacttgtacggtggaggcattgcccacattacgcatgggggtaatagttgcgcggagcaacaaagatcgacttcaaagcttccaacaatgaggaccgaatttgaagctctaattgctagcctaaagttagcacatgaagtgcgaactgaaaagaaatgcctggaacacttttccaagacactaattagaaagggcccaggttgacataggtgtcaaccttggcattggttctcgcttcaagcttgttggaagtttcatttggtccccgaaagtagttgaatcttaatctttactgaaaaaaaaaaagaatatacccagatgagttcttagaaaaaatgcttgaaaatggcctgggttgacaaaatatcaacctcgacgttgggccagcctcaagtgtcaatgtaggcactgggccttggttttggcacccaaaaagtgttgtttcttcccctaaagtactttttccccatttttagtgaagacgaacaagatgtaggaatcagattttttatctgatacttgaaagtggcctagattgaccaatttttaacctgggcgctgggtgtccgagcaccgtgtgctctgggtgctcaaaatgagctttcactactataaaaagagttttttctatagttttttaagttgcgtataaagtattaaattcggttggtgtaactgacactataggtttggacataaatactaatttttcttgcttcgattctgacgctaatttactctttggttaataactgaagcaaaaaaccactgcactgacgctaattgttttttgctttgattattaactgaagtgaacatattttaaaataaaaaaaaaaatctgaaaccaaacaattttgaccaaaaataaatacaatataagatcaatcatttatgaaaaataatacaatatcagataaataatatgaacactatttgttcaatcaccaaaaaataaaaatccatatcttaaatttaaactaaatctcaaataataaaaacatgtaaataccattttggaccctgtattttaaatatgttatcaattggatcctctattttgttatgacaaaactatttacatattctgtatttgttcgtgttaggaattatcttnnnnntggttatattaaaaaaattgtcaaaaattaagctcatggtcctatttttactattttggaaaatacagggtccattttgtcatttaacaaaacaaagggtccaatctgtaacttttacaaaactcagggtccaaaatagtatttgccctatctcaaattattcaaacagatgtatataaaaagtaggagtgagatctcccaaaatttgaaaaagtaaaaaataaaaacaagcttattctaagaagacatcagagaaaaacaaaattaattgaaaaattaacttgaaaaattaaaaatagaaataaaaaacatctcagattgtggaggaggaagtcactcactgttcatggacatcgacgttgactgcctgaggacgttagggctaggtggtcctgggttggcttacacagaaacacacacatagagagagagagagagagnnnnnnnnagagagagagagagagagtttggggcggctaggattttatgtttattatgtttaaacctaaaaaaactgcttatatattagggtattggacctttattcggttttttttttaatttttaagtttgcccatttgcatcgtttgtaaaccgatgcaaataaagacgatcgacttaaaagcttcacatcttaaaatgatgctaaaattccacacatattttttgcatcatttttgtatattaactaatgtgataatcgatgcaaattggtatttttgtagtagtgtttctccgaatctgattctaatgcttcaaatatgttagtgatatgtctagttcatgtatcaatacaaagtttgacctgtttgcactaatacggtcctagaaactgataccctgattaagaatgtcaacttggacactgggtgaagtcctaggtgccaagtttaatgtcgaggtgctggttcatgtacttttagttcccatgcttgaatttggttgctccatgtctttatggtacaaaatattaaaagatagtcagttgcaaatgagttattgaagtccgaacttcaattttggagttcacaaagtcaaccttgggggagggctagggacccctcctaggttaactgctatgacttgggactactcaacttcgagacattatctttcttgccacatgtcaaacattactgttcatgtcatcaagaaaatttttcgggttcacactaagaatttttatgtacttgcatataattgtgtagtgtgtgcatttgtatgggataaattttgtgtttaactatatacaatttttagtagtggaatttgccatgatgtttcttatgtttaaaaagattatataacaactaaaaaatatacaatacttaaaaaaaaaaagttatacgtgcattgcacgcaactacaacataatatatataaaactcaaaaaaaatgtgagtttttttttttttttaaaaaaaaaggtgtacatataattgtgattaaaaaaattgagatttatcaaaaacaa

SEQ ID NO: 44945 - DNA, 2950 bp, Cannabis sativa
atgcttcttcgaatccttgtccttgacaaaacaaagatcaggtgtgaattcaattgtgacattttgtctttggtgaattgagatatattgataagatttttggaaatggtaggcacatgtaaaatatttttcagataaagaattcaatcagcagtgaatgaactattaccaatgttagaaatagagagttgagaaccattacctacaaccattttttccttccctttgtaggaggtcctctgcatcaaattgttggcatctggtgtgaaatgattcgaggatccactgtccagataccaaccataattaggtggggctgaagaaaaagaaacattggtctgtggagcagattcagttcagggtggaccagcatcttcgattcctgtaaaactgacatcaatatgcttgtagcaccgttgcacagtgtgccctgatctcccataaagttggcaaattacacaggaattactagaggtccctcgacctctgtaggaaccattgcctctgcctcttccacgagtggcattgtgcgagttattagaagttggcggtcgactaatctgggagtatccagttgattgtggtttcttggcttgagcaagattagcttgaggagaattcagatccaatagggcgatggagtgagtaagttcaagtcgcatctcatgattttgcagcataaattggacttcttgaagagtgagtttatctttggagattagattcacaacaatagactcatattcatgtccaactccaacaagaacataaacaattaattgttcttctgaaacggagtttccagcagctcgaagtccatcgacatagcctttaatcttcaacatgtattcatcaattgacaaggagcctttcttggtgtcttgaagggacatgagatgaatcattgaagccttggatcgagtgttgagtagttgctccaatgtttcccagattgcagcagcaaataattcacaatgcacaatatggtcaatcattggttcagatatcgatgacattaaccaagataaaagaaattgatcaaggcgcatccatttatgaaattcagggttacgtaccatgtttgatgaaccaggtgcttctagtacgtaaggatcgggtcttggatgttgacgtagtaaaatatcttcaagatcatgagcacggatggcgggaagaacttgagaccgccaaaaaaaataattgctctgatctaatcttaatagaggtaagaacatggtggtaaaaaccacgataggactgatgaaattgtttgcaaaggtcaccattgtcgcgtgctcttgataccaagttgattctaagaagtagaatctaaaacagagaaaatagagaaagttgagagagaaagagagtgaaacaaagtgtttatcttcattaatgaacttgcaagattacaggctatatattataacagaagagtacactagggagcttaacaacctaacagactaccaacttaactaactaacgaatactgacagctgattgttaatcataactgtcactaacttcctaaacattatcttggatacacttgattttctatttgagaaatcaaattcggcccatttcttcaccaagtgacttttaaatgcttttacatattagtgtttaatgcttatgcttatatgatttgcaagagaaaaatagagtgttacatggaagaaataggtgtcaacaattaggtgttaattgttgaagtaccaacatcggttcaagaaaatttgtgtacaagtttgtaaattttgtcgggagtgattgaaactacttatacataatattaatgataatcaacaataattagtaaaagttagttgggatttggcttttatatataaagaccaatcattaattaatttcaagggagaattaaagaaccaagtttcgagtgtgttagtactttgtgatctccatgtgaattgagagtttcttccaaagagaattgagtgtttttctatgtgagttgagaatttctcaagagatattttattcatatgagagttattttgagagggttttatgtgtagttgagagctatttttaagtattttatttttatgaataagagaagttttattgcttatctaatacaatttacaaccaccaaatgaaaggcataaagaacaattataggaaactaaaagccccaaaccaatctctatttttttttcacttgttttctctcaattaaaatgagagaaccaatgatacacttcttttttttcagcaaaaaaatgatacacttcttttttaatctttgtagctataatttgtacaatatacatgattttttcatcccaccaacaaatatttctagcctcccaaatatagtacactaaacacttgtcacattctctatgaaatttagataacttattatgtacgtgtctctgcagcttggtcacaaaacaccaaaccgagataatttatctgtgggaaattttaatctagtgtgaagaaccaaactaacttaaattcaaatcaagaaacaattgacaatgacaatatcaacaaaatacaattcaaaaattgaggagaaaacatagtagaacagaaaaattatatgaagcaataatttcttaaaatcaacaccaaaaattatacttgttcaagtctgataaattgatttgattcatatggctctactctagttctgaaattttttttggtaattgagcaagaatacaggtacaatgaaattgagaagattctctgtttggtttctctcaaagtgtttatctctctgaaactcttacccaagaagaattctttatctatagaaactttttcttaaaaatttcaaaacacaatctctctccttttttttgtatcactcaatcaatcatcattacaagaaatgtcatttttgccaacacatttttgtgctggcaaaagttagtattgcgctggtaaaatagaatttacctatgat

SEQ ID NO: 44946 - DNA, 2619 bp, Cannabis sativa
  modified_base (1501)..(1508): a, c, t, g, unknown or other
  modified_base (2061)..(2062): a, c, t, g, unknown or other
gtggtaaccaaaccagaaggagagaaagagatccagtgtactttcgaggatcttttgaaggggctttgctttccttcgagattcatcaagtggattttggtttatttgcaaggtacctcttatactttgatgatgaatgggagattccaaggcactttcaaaggcgaaaaagggttgcaccaaggagaccctatctcctcactcctatttattttgatcatggattacatgactagattcctagcttattattctagtaaaaagggattcaaatttcacccctttataagtccctcaaactagttaacctttgctttgtcgatgatttaatcatatttttcaaatgaaacaaaaaatcagtgagttatgtcaatggagcttttactttcttttatgtggatactggattaaaggctaaaatttcaaagtcccttgtttattttgagggtgttaaagatgacttcaaaacaactatcttgaatatgattcaaatggaggaaggttctttctcgctcaattatttgggtgtccatcttcagtcaacaaaatggaagactttgaactgtggtattatcctagacaagttgcattcaaagcttcaccactgggccagcaggaacttgtcttttgtaagtcgtgctcaaatgttaaggttttatgtcttgaaaagtctataaagatatttatgattattaataaagagttgaaatttcgatatatgcttggatgttaaattattgatatttattattagataatttatataaatatcaaaaaattccttattcatatatgaggctatgacttatacctatacagagaactaacatcacttaactatgaataaaatattcaacacatattaaagttatgaaatctttcatcaatggttgctagtacaattcactgatgcctgttcttcggtgaaagtaatctcgattcagattattgatgtaatatgacattttagtaaaggtgttgtatataatagagattatatatgacaatgaccgatatgaataatttttttttatcaaatatgtcgtttaccataaagacctaatttatattataatgatgatcaatagtagatcgacctaaatcctgaatactcatgaactcctgttcatgttattagtttctttgattcactcgttaaaatttctcacagaagatgattcttacaacttatgttttgggaatctaataatgtggatgactgggaacatgatctacaattatagattcttgactttcctaatagatcgcatgttggtttcctttaagtgttaattctggaactgaaaagttgtgcacaattttagatgagatctaaattatactttcactagtgaattaacagtactaaaggataaagaagtaattagaagggtaaaatagtattttgacctaaactaattacgaatcgacacaaggaggaataatcactagaattgattatatcaataaacactatagtaaaactcagtaaatataattnnnnnnnnactaagagttcaattccatatttgtagggaagtaatcatagaattaataaacgtgattacttggttgatgagactcaataaataatctagtttattggagcttagaattataggtccatagtccccaaattgccaccttgaaacactgtcaagggtaaaaatgaagagttgtataatatcattcagaaaaatttattgaaaaatttattttgaattggtaacttagtaattatttatttttgtaataaataaataaattttcaaattaattaaatagggaaaagacaaaatttgtcaagacaagagacaaaagttgtcagtacaaaagacaccatccttatcttaattaggacaaggtacgcgcctaccctatagtaggcatcccttggttttgtctttttgggttaactaattaattcaattagacaaatatttaaatttagaaagttgttaaagatatttcaaattagttgagatattctctcaagttgttgagaaattttctcatctgaaatatcagtatccgaatttggttatagatatttatttaaannattaaatatgatttaattaatggggaattaactattataaatggaagcatgatttaagaaacgaggagatgattttttagtgctatttttaaactacggaggagaaaagaaaaattatttttctctctcaaatagttcttgctcatgtgttgagtattaatcaagaacaaattatacactttatcctaatagcccacaatattcttttgtgtgtggtcgattgatttggaagactatggtgtgagtttctgatcaaccaaaaggatacaacttatgagaagttttgaggatacccagatagtcatcaagaggtatgtattctttttttttttcattttatgttttttttaatgtatacacatctggagatccattgtgttgtggtataatgaaaattagacatacgaattctttagctgcatacctgatttagtaccataaaaccaaaccaacatcaacttattcacttggtccttttggggattataaatttttggatgagtttgtttatcttgcctcaaaaggtgactactgccatcgacaaatattgtagagat

SEQ ID NO: 44947 - DNA, 2714 bp, Cannabis sativa
  modified_base (27)..(43): a, c, t, g, unknown or other
aattttccataattaaacataattaannnnnnnnnnnnnnnnnaaactaagcggtctttacatatgtcgaaagtcttcctgacaaaggtggtggtcaggcagcgagttcctttggtgatagcgcagcataaggtagtttcgctggagaagagaccatgagtatgtggtccttaatttgtggggagaattattggggtatgcaaccaaagtcccacattggctaggaataggaagaattatgggtatataaggatggacactactctattagtataaggcattttgggaaggtgcctaaaattaaaaccgtgagggcttagtctcgaagcggacaatatcacactaatgtggaagtcaatgtgagatagcggtccgacaaggtgaaagaacgcggcccaacaaatagtaaaaaagtcattccactatatgatattctaataaataaaataacaattaaaatttaaaatttttgtcttgttaacttatgacactaccaaatgatgccctttatgatatgaaacttgttaaaagtaccccttaatataatacaactatagagatgtgtcaattatattactttttgttatatttagtcgattaattggtgatgtgggatttcagtgaaaggtaaaaaaaattgacattaattttaaatagataaaatgggctggcattaattaaatacaaatttttttatataaaaattaacattattagaaagataaatatatatatataaaataatacaaataaatatatatagttatataaataaatgctttagaaaatatatttttaaatattaatctagttagaaactcataaaatccattaataaataaaaaaaaaatagaacggtcaaaatttatgaaaataaaaataacattgatttacaaacctataaatcttttggttaataaaaggaaagagaaaaaaaaaaaaaagatctaatatatatataacaagtgagaaattttttaagattttcattgagaaagaaaaaaaaaatgaacttaaaaaaatttaactttctaaacaaaaatgttaagtattcaaaaaaattaattgatttgtttctatttcattacctccaattacatgctaacttaaaagtgaaatagaaatagagattgaaaaaaaataataaaactcataaaccattataaagaatcatgaaattgttacttttgtacaaagtattaagagtatctccaataatagtattttttaaagctgctaaatatttccacattatctaaatatataatattttattaggacatttttcatatatatactaaactgataaaaatattacacaaatacattggacaggccctataaatatttatacagcccaaaaatagaaatttacaaaaatacattttgctttattcattcagtctcattaaccaccttcttcaacaacgacaactttcagcaaccaacctagtaacccaacacaaccgaaacccgaccaaaaagagaaccaccattaattctggcaacttcacttgagaagacgaccagaatcaatcaaaacagaagttgtttcaaattcataaaaaaaatgtagaaaaattactacaaaactaaaattcaactaaaaatctagtttaattcgcataaagctaatgtcctaacttcaacttttagatccatgaaatgcaaattttaaaaagttgaactggagttcccaaacaatccaactcaagtataatctaaaaaaaattacatcaatactatagttaaatgtttatcttgatgcattttcgttgatttttagatttttaattaactgtgaatttgttcatattaaatcgcgaatagaatagtaaattcacatgtagatagagttacgtgcgtgaaaatactgttctggttttttatgttttatgacagttgcataaatattttgctaactctctaaaacttgacacatcaattattacaaattgataacgatacaatgcattttatcatatttacaagtgtttcatattgtcaatacaatacaaagctctttaaagaaacttttataacatgtttagttttattaatatactaaattagttgatataaagttagtttatagaggtctgataattatttctctacatattactataaaggtacaattaattatcgaacagtgtggtaaaaaatactaacaaatagcttcttatatatacaaattcacatttaacatttttagttgcaattaagttgcacgttagttgaataattattttgctactacaacatcatagtattataaaaaatagggctcagaattgtcaaatatacgacctaaacagataaaacacgattgttgtaatattcgtttgtgttaaatatgtgaaattattagttgttctatggttttatgttagttggctcgcaaatataactattgcattataatttccttatagtttctcatagtagactgaccataaatgaattttcaaaatgtcaggaaaggaacgtaagtctatttttcatattttataatgggcaatttgatcaaggaataaattgtgtaaattacaaagctagtagcaaattcatctcaatggattgaaaatatgaagaacttatacacaagttgaaacaagtgctggaatgcaataaagaaaacactcaattgtaactgaaatattaagtgaaagaaggttaccaaccgttcagataaaggacaatctaagcctatt

SEQ ID NO: 44948 - DNA, 1450 bp, Cannabis sativa
gtaagcatattttaatagccatattttttgtgtaaaagtttcttaataataatattagattggaatttgttactaaaatttagcaactatgattgttttttactttcaaaatttagatcattattagaagtttttgtaagtttattatctaaatcttcgagtgtctttaatttatattattcataaatactttaaatagatgaacagcttatttatttaactagtttactatcgagggatatatagtatttttaatgtgtattttcatgaatttgtaaattgctttactcctaacttagccttattacttcactcagatccatatcaaatctaattttcccggaaatctttcatttcctgggaaaatttgtgaacttgatcgttcatattcagagaaaaatccatggcaaatgcctggaaaagagacagaggcacgaatttcgtttcacccagaacgctgttctcactcttctccatcactttcctcttcctaatcttcttcctcttcttcttcacctcttcaaatcgcaatccttaccccagccctaccgtcaatatcaaaaccacattccctttccgcacaatccaacctttcgattgccagaaatgtccccaatcttacccggtgattgcgaacatcgtcgaaaatctgaggcacccgttcctgtactcgctcgccgatttgggaaatttgcctgaaaagccacacaagaacatagtcagattgctcaaggggaaacccttcaggaagccggacatctcagctacggttcaggaggttttggagaagttcagacgtgaaggcagagatgggctttttgttgatgtaggggggaatgtgggtatggctagcttcgccgccgcagtgatgggttttcgggtgctggtttttgaacctgttttggagaatttgcagcggatttgtgatgggatttacttgaatcgagttggggaactggtcactgtctttgaggccgccacctctgaccatcttggaaatatcacatttcacaaggtattgtttgtttctaatgataatttagtactgattaggttcaactatgtagattttaaaatatgcatttcaatcaaattacgttcaacggtaatgtgaaatcctaattaggaaatttttccatgaatgtgaagtatatattgtttcctttgtgcttttcgactttcgacttgttttatggttgttttgaacttttcttcttgcgcgcgggtatttgttaggttgttgaagagaaagtttgcatttttaataaggtgcttctaaaaattagttgggttgggtaagggtttggatattataagtgtcgagtaaatagtagttatgcttgcttaacatatagaagtataattgtcccaaatggagttttaaaataaattgcattaaaatctaatgcgaagttcctaatctaccatattttggataatcactgtattt

SEQ ID NO: 44949 - DNA, 1023 bp, Cannabis sativa
caaattactctattattatttcggctaaaccctcaattatcattcttgtattttactctctaaatttaaattttagtagtaaaatttttcaaaaaattgaattatcaataaatttaaagtgatgatatctatttttataggtaattaccaacatgaattacttatatatatatatattatatatttacattagtatacctaatattattatttaatttttttatctttataattttatttaattttgaaataattttcaaatagtaatattaggtgtacccactaacactaatgtgggggctatagctcccactaacaaaaatatcaccttttaaaaaattaaatataatttttatttaattagataattatagattaaaataatagaaaaaccctatctaataattacccaattacttccaaattacacaccctaagtttttttttctcaataaataaatacataaaacaataagtttgctattctttattaaaaaatattaagttttctaatgtaccttgtattggattgatattttatttattatttatttaaattaaaaggggtcttatgtaattcctcagttgaaaatgaaagatgtaatccctcattcatttttagccatccaaataaaactaatagttatctgaccattgatcaatttagaatagatatatagggacatttactatttcaaaacaggcaaccgaaatcaccagtacatattaaatatatattttttatttctttcttactttcttcctcttctgattattcaataacaatagtatcttataaatttagaataaaataatgatcatcactttctcattttgttggttatatgttattaataacgaattaatagttaaacttaaaaccagtctcgtatattttgttaacatttttgaatttatcaaaccaaacactaggatattatattttttattttaaaaatatttaagtggtgtttgataacacttttttaatcaattttttatttttaaaattaaaaaagtaaa

SEQ ID NO: 44950 - DNA, 1850 bp, Cannabis sativa
gttatctctataatctataactataataaagtaccaaaaattttagtcctctaattattaatttatcaaaaagtcctttaattattttgagggagttaatatctttctctcactatatatattactaaaaaattctctctaaataatttatttctaaaaatatacataaaacaaatctattatgtggttgcttttccacaataataatacatgataaataactatttacttaaataaagagatataatatttatattctcattctctttaataagtatacagcacaaaaaattatgagatattaaatataaataatcaaagataataataaagcaacactataattaatttagggaaattttatagtccactccctaaaattgagtatattgatatgcacttctttcatatgttcgttattttcgatgtttagatggttttaaaaaaaattagaggataatgtacatcgtaatttttttaatttttttaaacattctataaatttttgataaatttagaattatttaatatgccggaaataaagtttacataatctaatatgcctatttcttttattttatatgcatgtgaaattgaacatttgaagatttaaatcagactttttgtatgttgtaaattattttaaatttcttaaaaacattgaagtatgtcttaaattactatatatacatcatcatataaaaatgaaattttaattatttagagattataaacaagaaaagagtgtatatatctttaggggtgtactataaaagtaccttttaatttatgtacacgacctaaaatatttgaatataaaagtctaaatttgaaaataataaagaatataatttctattaatttagatctatttatagtagactaattagtattttaatcatttgaactgatgacactatggataccgtgcccctaaatatatggattgttaaataattctcatcacataatcatttttgttaggttttatttgtttttaatataaagtgttgaataattagcttttttatcttgaactttgaccatatgccattttttttaatattttatattaatttctttttttattattaaaaatccaataaattttctaaaaaaaatttttcctctaagaattttgtttatttaaacattctttatatttacaaactcatattattatgctgccgattttttttcagttaaacataaaaaataaagatgcaagtttcttatctaattaaatatatattaattggccaataatacactttaggttattttttttttttttttaaaaaaaatatatttaattttaatttctcttttaagagaaggcatgatcttagaagtagataatgtttagaaaaaaaaatattaataagcaatatcatattaacttttaaatgataataagaaacaaaaactaacaaaagtattatatctctgtaaatagaagaattcaataaatttttcaacataatatataatttaatagtattgtaagtataggaaacaaaaatactattattttttaaaataattgtgctcaaataattttatgagatcactacactcgttaattaattttgcattagaattgagcattgttataaggcaccagaatgtctaccactacgacaacgtattaccttatatttggttagtaactttttatatttattaaaataaaataagtgagattaatattaaattaaaccaataataatgttatacctcgtaaaactgctaagcactataaatatcccttaacatttcacattagaattacaaacttcttatcacacacttcaaaacaacaagaggaatattttgatagtatacacagc

SEQ ID NO: 44951 - DNA, 1419 bp, Cannabis sativa
  modified_base (898)..(908): a, c, t, g, unknown or other
ttggtaaagataaattccaaaaagaggcccatttccaagcttcgcacttttaacttatttttgggctagacccaacttaaaggcccacctttgaggcaacttaaaggcccaccttgataatgaggaaattacacaaccaaaaaaaaaaaaaaacttttgaataaagctggaaatatgggtaggaatcctaaagaaaaagataaatatgggattaagctattttatgccttattatataattttcaaataatgttatgttggttatacgaaaataacttacattctgattgtttagagtattaggcaaatagtgaaggcttgataaatttcaaaagcatgtttttgagaggagaatgtaaagaattttatccaaactttttttttttttgtttcttgtaacttttatcattgagtttgtaatctttttttcttttgaaatcatctttcatattttatcaaatgtagcattaagctattcttggtatgtgtttttcatttttgaaaatgaattatcttttttattgaaatttagtattttgaatataaaagagtctaagatcaaatagagtattatgctcaagaatactacgactagaattatatgaaaatatctaattatttaatttgttgatcatctaagaaaaaataattgaatatattgttgagaaaaaaataaattttacaattattaataattaaacaaaaacagaaaatatttattgttgatcatctaataaaaaataattgaatattttgctgagaaaaaaataaaattttacaattgttaataattaaacaaaaacagaaaatagttattgatcagtatcaatttttttagtatgtgttttatttatttttaatttaggagtggtgaataattttttttatttttttttannnnnnnnnnnatatattacaatcatgttttacttgggactcgaacttagaacttccaagacatacacccacctatggccacttgaggctacctcaagtggtttttaggcaacaacgtgtgacacccagcgcagacgataatttttcttccatttaacttaaggaacaatgatcttaccattaaaaaaattagaaaaattcacaaatgtattttttttttttttggaatgacttcccgtaaatgtttaatttaaactaatattgggtaagcgtagggaggaatatatgaataaaaagccctacgttcggtaacaatattttgttttttatttttttaatttaaaatcaaaattgaataaattttgaaaacagatttatgttgattttaaaaacatattttctcttttgcttctttctttcttgctcgtttcctcttcaaaagctcaaactattccatggcttcagttattcaacaagtaaaatctcttcctctctttattcctctctctctctctctatata

SEQ ID NO: 44952 - DNA, 738 bp, Cannabis sativa
tactgtgattagaatcataagtattgttttatagataatttggttgctgaaatgttcttcctattttggttatggttgtgtgtttggatggctgctgtaatggagtggaatctatagttgatgttgcaatagcgtcaattggagtagggatgttgctattgaagaaattgttgatattgttatggttttgattgttttgtaaaggaaagatactttcatagaaaacaatatctctcaaatggaagatttggttgctttgtaaatcaagcagagtgtatgccttcatatgctcaagataacctataaaaatgctagctcttgcacggaggaaaagtttatgagagatgtggatgtgtaatgcatatgttaagtagtttaaatcaatattctgttattgatttaaagttctgggatgagtaaactgtggcggcttgttgtgaagtagttcaagtggtgttttctctttaagggtgatagagggaatgcgatttacgagatagatagtagtgtgtaccatttgaggccagtatgctaatggtaagtttgattttaaagccaaagcacgagcagcattgaggatgtgttggtactttcttttaacaatagaattctgttattgtaatatcccgataattttattgatatttatttggccatattttattaaatatgtagttatgtggatattagagtaagattataatcttacttaagctaattacgagttaattagtggaa

SEQ ID NO: 44953 - DNA, 2760 bp, Cannabis sativa
  modified_base (2705)..(2705): a, c, t, g, unknown or other
gctttaggactaatgggattaattcatgcgggacaggttcgtactaatatgcttttaatagtttttgttatataaaaatatataaccttaattagaatttaaagtgtaggggacttatttttttttaaaaaaggatggggtgtatttggtttctacgtataaggtataacatgttaaatattgatacaaatttatatttttataacattaaatataaattaaagtaaaaaaaaaacaaagaataaataagttgttcaaaaagtaaacataaaatgttaaaaatgaaaatatccttattggcttctatgaattatgatgtatataaattagcttaacgattagcattgtgctataaatatacattatatataattaagtaagaaatatatatacaccccttacctctatgtgggtttgccaattgtatatatatgctaatggttttttttttttcccaatatttatataatttttataggctgaaagagatcctactcctatccatcgtgctgcaaaattattaatgaattctcaattagaagatggtgatttcccccaacaggtagtatatgatttacaatttaaagagttgtccttatataataaaatatacaaacttttatgacgtttaataattcttggttgtgttttaataatggcaggaacttatgggggtttttatgaggaactgcatgttgcattatggagcgtatagaaatatctttcctacttgggctttggctgagtatcgtaatttggttccattaccatcttcaaattaaatgaagactagctaagatattgcatgtttggagcaagctaaatgaagataagattggattaattaaatattgatttttatttgtatgtaaattaaattattgatacatattatttttcctgcaacccaacaaaagaattttggatgaaaatcagcataattaaatgtacaatttcaaaaatataattaatacctattgctaaatgtttgaggaaacttagtatatacaatgctatatttttatatctttcaatacagtatatcttttcaaataaatatatagtatatttattatatctataaaagtatgagttaggttattaaaatttggttaagttattaaaataactcatgttgacgctcaaaaggggctaactccgtattgtgtgataagcgataatggcacatgaaaaatataaaactaaagagacaacatagtcactctccatatcgcgataataatagagctacgtctatattgatcttttattatcataaaaaacaaatagcttacaagagaccccgagaaaaaataattaacgagagcttcacctcacaatttttagagagggaaacacatgtggagagataaactctgatcttgtagagagaatgaagaatttgtaaaatgagctagatgagctctccttttatagtgaaggaggtccaattaaattataataaaataataaaaaaattctcttgaaattcactgggaaatcgttgcggagctcgcgaacctattatgaggccaaaaatttcaaaattgtgggaagaacaaaagccaagcttagatccatcttgaaaagagctttctaatgccacttgaaccgtgtcatttggataaacttgagtgagttatagccaaaatactgagcaatatgtagtgttgaatgatctgtcgggttgatgggcggccaagttgacattaaacgtcaacatgggcgctcaaaactctgtttcttggactttaagcatattttgatgagattccaagtattgtgaaagcattccctagttcattctttgactctgatgaagttcttcaccatctcttggtgatttttctcgatgcgcgcaggagatgtccagttgatcaccagtaacaagaaggtgacgactaggtgatcattagtgttagtggctatcggtgggctcgcatatgacacatgtacatgagatattgacttgctgaagtatccaaatcttattttggtagaaaaagtaaactgatgcccgagacataactactgtgtgatggacaaaacattgagctctaggttaaatgtcaaccttggcgcctagtgtgtcatttggtgattctcgggggctaaacaacaacttggatgatattttgttctgattccaagtctcatatgtcgtttttggagaaaaacaagaataatgcttgagacggaatcgtattttgagtaatggaaccacaattcgcatggtatatgtcaacctgggtgcctaagcactactacaaaatgtcaaatttttgtcggtcaacacgtcatactaaaatggttgactgaagcaagaaaaaatgaagattttatgtttcagtggataaccgaagctaaaagaatataattagtgtaagcaatacttcaacgcaaatagagcaactgaggtaaaaagagaaaatttaaaaatattcttttacatttagctttagtgaaaaatagacgctacgttttttttagcttcggttggaaacagaagttaactgttttgctagtgttatttatcgaagcaaaaaactttcatttttttaatgaccccaaattttcacaaatgaaactcattttcttcttcaaacttttgaagccctagcacatccatcattatcctctctccctgccagatctcaatctcgaaggtcacagaaaaaacacatcgtctctctctctctctctcnctctctctctctctctcatatgatttgatcaatctacctctctctctctctctct

SEQ ID NO: 44954 - DNA, 3479 bp, Cannabis sativa
gactatgcttcccgggcagatattccaagtggattccatgtgccaccattcttgtgatgccacgtcatagtgtaaaaattgggataacatgtatatttttcaagctataaacaataataaacttaacaataacattaagatatcatttacatttgtatattttattaaatttaagacaattttcaatggtagaataattacataaaaaaaatacagtaaagattatggtttatttttctatttctcttctttttttaaagaaaacaaaaaacaaaaacaaaagattgtagcttctactcttttttaaacgttgtaatttcattagagaaacaacaaagtacagagttacaagttatttacacaaaaatttgactcgatgacgttgacaacacttttgacatgagataagaaggaaacaaccctagggccccagccacctagactaatggtggtcaacttgggcattgtaaattctgtcagttcgctagttgatagtagtgggcgcctaggtaggcactaagatccaacaaagaatttctaactaccatccttcaacaaagtttaagtgaacaggtccctgtgaccctaaaatgatgaaccatgaagttgatgatgtcacatgctcaacctgagtccaacattagtgttgggtgcccaggttgacatcatgtgctccatctcgcattagttttggttcttattaacttcttatgggcaatttgcttagccattgctctaagatacatgagagacatgccccagccaagttttagaatttggagacgagtctacatgaaatggcaccctagcacccaaaatccctaatgcgcgcacacgttgacatatagtcgatttgggtgcaccatggctagggtttatgttttcgggtacatacttgaacctcgattcctcaaatccatcgaggaaaaacataagggcatgatattttttcaacaacatcctaaaggagcctatatagttatcggtgcccgggttgacattttgacctgggcacgatttcgttttaccaagttctgtctgtgcaaatttgacaaaactgaaatctgtggagcacatttaaccaaaaagaagactgaacctcaatgaaacaatttttgaagatgtttaccattacttgggtgcctagtaggggcaagttcactaacacccatctgctttagtgatcaatcgggtgtaacctagccatctttagtgaaatattaggaatcacccctacatatcaagtaaaatttccaagaaaacttttccaatatcaaggaatgaactaaggatagctatcgcatcattcaagcatctcaaaatattcttaaatcccaagaaaccatgtcttgggctcctaggttgacgtttatgtcaacctaggtgcccaaaagtaaagttgtattgttgtaatcgcttttctacactgcacgctactttgtaaaatggtcacaactctctcaattcgtatacaaatgatgtgatttcaatggaaaatcaaagctatttccaaggcgcatctaagtgtgtctcacccacttgtcgcaattctgaagttttgggcctcaaaattgactcgcaagctaatgtaggatttcccatcaaattttgtgcaaattttcatattatgttattgtaatttaatttgaccttcttccctataaaaggagagctcccctagctcaatttcacgctttacttcctctcaacaaggtcagagcttctctctcttcacactttctccctttaaaaattgtgaagtgaagctagacttagtcattttttcctaagttctcttgtaagacaattagctatgtgtgataacaaaacctcttagtagacgtagctccattactttcgtaataagctagagcatttttcaaatgcctaatcctattagaggtcacttgacgttcaggcatggaatttatttaactaagagctatttccaaccattctagaaaagataaaggccaagaaaagaattccctaagcatcaataacaaaaggtcttatatatactcttgtatggaattagaccaaacatttactgttgagtgggagttatgagtgagtattaattcaatcaaggaaaggaacattgaaatacaattaaacatatcttgaaatacaaaaaagagaaattatatgttggtttgtgaggatggtgtattaaaacccttaggctacaccaaatcagcattctggacttgcgttaatgctagaaagtctacttaagggatgttgataactctaggggtggagaagtatttctagagaagtgtaaaagcctatatggaatcagtaactctaccagtaaggctgaataataaggttgccttaaagaaaataaaggaatttttcagacttgggaaagttcaacatagactttgacataatgctaaatatggaataattactagtgtgactctgtgataacacaaatacaattgtcaaatggtaaagaatcatgtaccctaatacgagtaaaacatatagatggggaattcgcaaaatcataattttatgactaaggaaaatgtgatggtggagaaggttaatactaagttcaacctattagatcctattacatagttaatgccaaatactaaatttgatcaagacataaagttaatgagatatgcactatagtttttatattagtgcaagtgagagtttgttgggattttatgccgtaaataaaacaaaatttcattgtaatcttatttactttcaattaacatctgaattcttatcttgaccttttcatatgcttttttttttaacaagaccttgtcatatgctttgttcacatgttttatacaagattataggtttaatatataagttcttttaaatcctaaacatatagttatttacaattatagtgatttctttataatgggaagtaattgttattacatgcttcaaattatttagtcccacgatttattagtgcactggatttatttgacgtgataattgatgataaggtttacttataattagatgagtggaatgtcttttccaaggtattagtaaagtaaactaggatcgaatgtatctgttacacattagactggatcgatattgataatggaaaagatattataaacttacccttatatcttttctaagtcaatatcacttagttgatcatagatcatttgatatgaatcttgatatgattaaactttaacttagttgtactgcacgagctctttgacttgttcgttaccagcttaccgtagcactagcccatacttacatcttgggaactcgatagtgtaattgagtggaagtgttaatcatagatatgaacatctcctccttctatgtttattagaagtaaaatgatggttacttagagctttggcctaatgcgataaatgatagagcgctcattttgataattacattagttttctaaaatatcatatacaagtagctaagtattttaaggataaaatacagatcgg

SEQ ID NO: 44955 - DNA, 2151 bp, Cannabis sativa
ggcaatgcatttccaaggggtctaggtgcggctcgataggtttcaaacaataagacagaatctttttgatgagaagcttttttggttgatccccagtttggaattttaatgcttgtaagtatacttctaaaatctagaggtggcatttgaagaaactcttccaatgtaaaagtttcacatctggtacccctcatcacctctaccatagaatctgcagctagaagaatagtagctatgtctgaaggaaaatgcctcctttgtgccatcaccaaatttccccctatactagctgtatttctaataaatttgctagcaattttctccatatgattcgaaattttattgaacaccatctcgcctccggagggaaagcgagcttgtttagcatccttcagaacttcaattactttcgaaattgttacagcggctccaaatttgaacccctctttatccatttcaatcatgcagagttcacctatgccttttagatcaatgtattgttgatagtgctctaattccttgtagtaaccagaccctgtgttcccagttactaatttcgtttcagtcccttctccaacattattagaattgagcaagttccgtagctcctcaagactagaaggacgaagccaattatctcttttagaatccaaagacatgacagacctgatttcccttttcaagaactcaggaaatgtacaaatctcattgttacggtcataaaacggtaaactactaacctttactttgttactgtcttctttcttccaaaaggagttgagacccaaatcctcaatatcaacattagctgcaaagctcttgcaaacatcagcaatggatcgatatccggtacagcgacacagatttcctgcaatagccttttcagcttcagaaacagtgatcttagagaaccccggaggagggtccactcgatctgttttctcagcattgacaagagctgaaaagattgaaacacacattccaggagtacaaaagccacattgggaagcatggaaaccactcattctctggtgaattgagtgtaaaccatctttgctatttccaagtccttcagatgttgtgattgaacacccactaatactgctcaagagagtaagacatgaacttgctgtcatatcctcaactttgtcatttactggatcatacttggatagcagcacagtacaagcaccacagccacctggaaaacaaaacaaaaaaaaacatgaaatttcaaggacttcattagatattaccaaatttcccaataattttgttcctgcatacatcagtgtaccaaaaatttacccctgtttttctaattgaaaagattatttaagaatggattttgttatttaggtgccaatactgataaattccaaatctatacttgtgtattttgctcttttcttcttacccaacgtaatacacaagaatctggttcatagtttagacagagaaaacatggaaatttctcttagcaaatcactccatctctagattactacttgttctaatacagcacatggaaaacaaatccaacacagaaagaaaacatttaaccaaaagaaataggaaaaagagaaaaaaacagaggaagaaagagaacccataatcacatcattaattaaactctcaagtctcaactaacatacctaatttacaaacaaatagagatttttgagctagagggaaagtaaagaatgaaaaccttcgccacaactgagcttaacactcttgaaacgagtctgagtccgtaagaaatgaagcaaagtagttgaaaggtcaacagttggaagctcgaacctcacgccattaatggcgaaaaccaaacttccacttcctctttctgtcactgccattgcaagcttcagacacagtttttcttctattgtttctagtatgaatcttactctctcattctcaacaaaatatttaataataaaataataatactaattaaaaaaacaaagaaagaaagaaaatagtgttagatattacaccatcttccaaactttttagctcagaaatacaaaattgtcaaacctccatacatacacgtaaattgaagaaacaacaaagtagtaaccagtaaccacaaactcttttgttttttctttatttttaattgataaacaaaccacaaactca

SEQ ID NO: 44956 - DNA, 822 bp, Cannabis sativa
tttatgggacttcatgattccaccaattatcattctttatatacaccgattgtacacaacgaacccaaaagttatctttttttcaaagctatgtcccaaacatatcttcccatagcatggcttgattaaattttttatgcaacgaaaacccaacccatcagctaccttggttggcacacctgctaccatgatatataacccaaggccgaaaaatcatagctacttttccacaaaaaaagctctacaaatattatctattttagttaaaatagacttgggagaataaatatttgagcccaatatgtatgaattgagatgagtactgagtttataagtacacacctacctgcataagacatatttttaaactccaactttgattcgtgcaaccattttctccagaatactagtacaattagtttttaaaagctattttgcccatataggcataccaagatatctaaaaggtgaagtactttaagtaaaacccgaagcatcaagtatatattgaatatccaagtgagtcatacctgaacaataaatagcacttttagaggcattagcttgtagcccgaagtctttgagaaggtttgaactgttctcagtaggagcatgatagaatgaatatcactttgaaaaaaaaaaaaaaaagtaagatttcatctgcaaagcaaatgtgagtaagtttcaaatctttgcaccgagggtgataactgaaatttgtctgtttggaaacctttgccaacaatcttgaaaggtatttcatgcctataataaagagaagagacgacataggattccttgtcaaagacctttcttgga

SEQ ID NO: 44957 - DNA, 1311 bp, Cannabis sativa
ttttttgaaaaggcatacattattttatttttttttttttttgaacaaggcataaattagcttttcatactatgaagcttcacaaatttttgtggagaataaaataagtaaagggtagtggtttccaaaggcttagtttgattataataataacatttttaatatcaattatttatctttatgtaaatactttatgaccatcagctagatattttgtttctttttttctttaattattatttgtttatattaattaattaagcaactaacttgcataattatcttccaatcatgctgctatatatatgaaattatttttaaaaaatatatattatatatcttaataatgtttttccttttgctttatgatcgtgggttacattgaaaatgacaagtgcatcatgatatgggtccaaaagaggttgatacgaataataagaaaaagtaataattaataaagctttgaaattttcattttgttaattatgtgttttaattgattatatatatagttgattagtgactaaattcattttaatgcaatcatgacgtcatcgtgatgattgtaaaccataaataacttgtggcttaatatttaagttattacataataatatttattgaaatcaagctaaatatccaatatataatttagagatttttttaagaaaaaaggaacaatttcgaattaataatattttgttaagaaaagtaaatatatatatatatgatggttatgatattcaaatatattgttataattttaattttttttatattatgatgtatattgtaattatttaaatattttgcataatttttgaaaaatttataatagtttacaaataaaaaaaaatatatgattcaagtaatatcctatttatatgcctataacacaaaagaggtatgtggataatagattgtttgaatcttatttttaatatgttaaattattttaaattatcaaaattttacaaaatatcttaattaataactacaatattatacaatacatactatcgtataaaaaatttaaaatacaatataaaaatgattaaaattccttattatcttatagaaaaatattaaaaatactattggtgtctagcaccttcttaattgttagtatactattactagtgtaattaagtatcgaatcctatataatttaattattaatcgatcttagcgcacattttaaagtgcaccactgataatcaataacaattctctttctcatttatatatattatataaagtaatttatgtaaatttatagatacacgtacgcacctcatgaccttgttatta

SEQ ID NO: 44958 - DNA, 3322 bp, Cannabis sativa
gaaagaaaatggtcatacaagtacgattgacttagattgtatggatataagaagccaagaaaattaatatggccaaatttacttgtgtctcctagtaaaagaatcttttcggaaacaaaacaatatagcgaacctggtaggaactatatagcactggtttccttttgagatgatgggagtcacagattgtgaaacaaaatttgttacctacaaatcaaaaaataaaatcagttttctaataagcacatcttttaacagctgcatatagccagcttgaagtcagcacttccaaagcaacataaaccattaaaccgataatcttatattgtctagctttttctacagaaaagaaggttcatgtatttagattacttggagaatgagcaaaatttctatttgtgtgtgttgtaattacaaatggtcactaaatttgaaccattcaaaaagctctcaatttcaatttcaggccatgtacgttaaacgaattcccaacttagatgaaacaagagaaacaaatccacctagaaatttagtgaaaactcaacttgacagcatctcagcagcacatgtactctagacaacaaatttccccgtacataaatggatcttacccatcttcgtttattataaattgaacttttgaaccactttaaatgtaagtgacattgttaaattattaataatattgataaaaagaagaagaagcagaagccgaagccgaaacactatcttatggatcttatcttattttattgttttatccaaccaaagtaattctctttagatatcagaatacttacagcactgacaaaaggattatatgcttcctcaacaaggtatgccaaggttgttccagaatcaacaatagtccccccattgcttgatgtagaaaatactgctggatcaattgacaagatttgtccattaacagctatgctctgtagatccaaattgtaatgaggcctgaagtttaaattagtcaaaagataatagagactcagcatttagagatccaacttaattgaaagttatttagcagttaaatacaaaattgacacaaaagtaagaatagaggcatactgggaagggacaagaggactataaactatgcttggctccagaatctcaccaagaaccaatataccccctccattgccatctccctttaaacaatgtgagaacactctgggagttatagctcgagatgacagctgagatatcacagagaattccccttggccaaaaccaaaaatcccatcaacagctttatctgtcttagtcaaatcaccagattgataggtactacaactgttcccatcacaaccatccaaaacaataagcttcaacaaaaaaaatacgagttgcggatcaacatgaaactataaagatagttgtaatatagattatagagggttaataacaaaagttttaagttattatcttattgcagatagagttaaaaaagaatatacaatatctatacatatgttagacttcagacacaaatttcatgaaaaaattccaaaaacaaaaagtctttacaatatgaacaattcatttttgttcttatttggtacttctttctcttatgtggtaccattcctacgagtgtttgctttcacatttcatatactcaaacaactacacaaactttagaagaaagcttacccgaaaacaatgggagcggaggagttagctattaatgattggcccacaatcatgtcaaaatacagcgcatcagttacataatgacctgatgtgccacttccatctccatattgaaatgagtaaacacactgattttcagcagagcattgtgttgatgaggtttgaattgcagaattgcacattgggtcagagcaaccaatcagcttagctgttgatgaagtagtagtgtcaaagaaattcagcttaatctgtaggaaagtcaaagagacaaccatatataagcaccatattaagtaaggtttattaggattaaacaagaaaagggaaatggattttactcctagtccactagtctgggggcaatcattgcaggagttacaggtaacccacaagatgtcacttccagtatcaatctgaacgttaaactctgttggaggagagcctaatttcacctttgtaaaataaagcctaagcaaaaacacgaacaaataaatattcaatctttattaatggtgaaagaaaagaacaacttaggaaaatggagaggagagaacaaggagcaaaactagaaatagaaaccactaagcaaacagagaaaaaatcaaactagtcaacacttacgcacatagaataaacaaataataatttgaagtgacgattgaaactttatcagaatttttaaataccaaaagcctatatctcaaggctcatcagagccaattaagtacaatataaagaaatgagaaagaacccattttcccaggaaacaaaacaagaaaacccaaaagaacaaaatctcaaatttttattttctcttttttccttccccagtttttacaagagccaaacgaaataacagaacaacgcaggaaggcaaatttaaaatagtaaagaaaataaaattaagcaattaatacaataaatgcgtaacaaagaacaaaaagaagaactctaaatgatcaacaaaatctaccaacatgggacaaaacccattaatgcaaaccacattaaaagcatcacagaaaaagaaagaaaaaaaaaacccagttgataaaattacccgacgaggtacggatcggaggaaccaacgacagggaagtcgacaacaccaccaccgccaccttgcaagactcttctaccatgcctaacgccgtcccgagctctgagcgcgctaagttcaacatggtgagtgggtgggaaagccctctccagttggagaaaactggccggaaaagcacagtagacagcggaaagcgaaatgagcacggcggagactgagaccaagatcggaaaacgaaagaccggcggcattctaaagtggggttgagttgaaaggagtttggaaaatggagagagcgaaaactcaagtggcgaagatcgaggtggtcgtggtggtactgctgctagtactttcttttgtgcattggacacaaaacaaaacaaaacaaatagtcagatttttggagagagaaagagagagggagtttagagagagaaagactgtgagactgaatccatcaaagaaagattggaaacaaatataaagaagatgattaactaaagtaatcttattactaataagaaaggttcaaatgtttttgtatttaaacttgagagagataactagactacatgaaaaacctattatgccctt

SEQ ID NO: 44959 - DNA, 1817 bp, Cannabis sativa
gacacaaaacccaacaggacccacgcggctaaagcttacaggctggcaggagggagatgaggcacgtcacgcgcctggtttggtggtgagcctcacgagcctggctaggccacaagatgaatgcgcgaactgttgggatgaggagagtggatccgtgcgagtgggcttcgactaatccaattttttgtttgcttttgaaattttgaattttggctccacttcttcacattttttccaatttagctccaaactttggccaataaatacacctaaaaatatagaaaattaatataaaattaaaactaaacaaaataaaataataaataataaaattactctaaacaacacaaaaatctataaaaataatattaagactaaaaaatttaaaaaataaaataattaaaaaagtcaagaactaaaccaatttttgtttataaaatatggtaaaataactctattttgtagagttatcagccaagtagcttttaatcccagacttatcctgccttgttatctttatatgaatattttctaagtctaaatttaattttgtgcttgagcttatttttttaccaatgcttatatgggtatggttgccccccaagtgaccaaacaaacttttgactcttggtcactagtatttcacaagttgaattttgtctgtctggcttttaggtttaggcgaaccctttgtatgcattttaggtaattaaataacttgctataattttgcaaaaaaggtataaaattgatacaatttgaatgataattaatatctttattcatttattgctcgatatgtattgttactatggtaacatacatttattgaattataaaaagctattacatcatctgtctaatctttagctaattaaaagatagacattttaacgatatattttgccaaaagacattacttaagagcaatgattttgaactaactgtaacttcagagtggtcacctgaccttgatactagttgtttttctaaacctttgagtgagttttgcttagaaggccaccacttaggaatggtgttcgagcactatgcaacttatgtggtccccggaccttttcttagttgttcaccattctaaactagttccatgttttcatcatgtcgaccaagtttgtatgctcgagactttgtaactgcagttacccagtgttaacggtgagaactcgtcaataaaatattaaaaaccaaaatgtaatattcagagattttaattgaagagtgattaaagaaaaatcttaaattcttaaactctcctcagaaaactactatttcattgatctttttttccaaaaaaaaagtcccctttacacaaatacctcaaaaaggaccctatatttatagtgagttctctacaattttgaagtccatcaaaccccttaattgaagattgtcaggtcactttcatactaggtagactagtacctctgatagtctgatgtcttcaggcatcctcagtagcacaaaagctctctcttccacttgtacttgggaagaggtaaactttgtcttaattattaatacttatcgtgtagtcgctatcttgtctatgattttagtgcttaaacaaccctagcctcgatctttgctccctataattatccacttacacattcaagacgttaatatggagcttaagcacacatatcatttgtgtgaggagggaaaaggggtcaaaggaggtgtaaggaggttgggcacgcgggggagtcgggcgcgcaagggagtcaagcgcgcaaggggagccaagcgcacggggggagttgggcggaggctgggcgcgcgggggagtcgggcgc

SEQ ID NO: 44960 - DNA, 3115 bp, Cannabis sativa
attcctttgatatttgttttaaaggtgctatttgagtgtattcttggtggaattaataaaaatgttctcatttacctccaaaaaaggtaaataaagtcttttcttggattaattaaagtgtgtttataacatgacatcacattaattaagcttaattgattaattagtttttaaaaaattaagtagtgaaagacaaaaggggtgaataataataatggctataattgcatggtggtgatcataatgaaatgaagcttctggatactcattttgaagtattaaagtaaaataataacttcaagtatatggatcattaattcctaaagaagttaaaggaaatccacaattaattaataaatataattaataaatactactaataaatactactttttttaattaaaaaaaaaaaagaaaaacaactttaataaattctactttcaattggctttaaattttaaagttttaatcattatattgttgtggttgtttttccttttcgtttttgctcataaaaaatcatgttcacttttggaaatgggcactataatatagtatcatactatagtgtataggaaaattgtgatttcttttgccccactagtatatttttagcacatagaaaaattattatattccaatttattattttatatattgttgtataatataattttttaaaaattttattatagtttttgtgaatttttttaaataatttatagtgctcaatataaatctcgaaacaattaatttcatgggagtataagaaaaactttaaaacaaagtgtttttatgtttttgatatatgaatatgtaacaattcaatttttcttttacataatattgtatatgcataattttttaataatttatgaatagtttatatagtgctgaaagtacataactagttgctcaaagtttgtttattatgcactaatgaataagttagtttaaagcaaacttttgacgtattaaattatttataattttatgaaaattaatgtaattttttaaataaatacaacacaaatcaccatataaaaatatttaagttagaatttttttcaaatatccaaatagaaacactctcctagagagcaaaagtcttcataaatttttattgaatttttatttatttaacattaaaattttaatatgatcaaatcatagtactaattggtataatcaaatcaaatcttctggattttgattcgatcaagtaataacctacttcagcctaattcaattctaattaatatttaagttataattttttttaaatgtcgaaatagaaacactcccaaaaagcaaaatacatgtcttcataaattttcattgaattttttatttattttaatattaaatttttaatatgatcaaatcatagtactaattggtataatcaaatcaaatcttctttgcattttgattcgatcaagtaataacctacttcagcctaattcaattctaattaataatttagtatcgtccaatccaatctaatcaaatttgcaaaatgagcttacactattataaccatcttaatatggtgttgattttgaaaagttattagtttagggccttgctaattaactagttgggctttcatattttttcctaatgcatccttactaatttcacttaggttattatgtttctgagcaataaagctttaatttttaaataaatatcaactttcattaactagaacagatgtgaaatgtaattcagaaaacacattcatttattattatttgaagaaaaaaacacaagaataacacacaaaatagtgaacgcctttattaattgcagatcgtttaacaaaatacattatcagaaaatcaattaaacaactttgataatcttgtacacatacccgtctattggttttaagaaccaactcaaagtctctttgatgccaattattttagcaatctcaagtttgaccatacccaattttcccacggtataagctttccaacaacttcacatcccggtccggtgccaaacaagcaacccattccgaatctgcctttttgctcaaaactagccctatcaatatcaataaagctcttaattgaattggttaatttttttagggtacttccatttctaattaattaaacttatattcttacaaattgtcaaactgagtaagatcttccttttgtactctcttagaaagaatttgtaaaattctccccttaacatccattttgattttatacaaagtgatggacaaaagagtaagatattgcgatcaaaaaacttaattttgacatttctccataaggggtatatcactgccgccatggcagtagaaaaaatttgtcccttaaactttgaaatctttaactcaggacagccaccttaaattagattaaagaagtacgcctaagtgttgccagtccagtcaatgttttatctcagtgatacatacactataaaaaagttttacttgacaaaatttgtgatataaagtgaaaaagttgtgattaattataaattatcattcatatgttgtgactaaaagttttgtggctaaaggtggtagtcacaaaaattaaactttgttgtgactaaatatgtttttagttccaatacttgatgtgattaaaactaaattagtgacaacttgtatttaaaaactgtgtttcagtcataaatatttttttggtgtgactaaaagttatctttactcataaaaaaatttatgttgtaattaaaaagttgtcactaaaaatatttttttttgtagtgatactgctaatatcactcaaaaaataagtattggcgactcccactagtcgagctagccaaatagcaaacataatgaacctgtacaaacattgaattttaaaagtctttatttagtttgcaatcgatcataaaagttttttccttagtttccattttataattttagttactttgaataaatttactcatcaaagttcgctttttttgagacatgaagctttttcaggagcttaagattaactaattagcaactatcacatgcacatggcaacattaataactttaacgttacatttggataattaagttacttgtaactaaaatatagaatatagtatttagatataaatta

SEQ ID NO: 44961 - DNA, 5699 bp, Cannabis sativa
ttgaaacaatttgagtgaacccaacagagaatcgatctcagttgtattataccctattcttgctcaatcaataaagaagatttgacggtgttccagaactggagtagagccatagatcacatcaatctataggacttgaacaagtatatatcttggtgtagattttattgtttaactactttaatcgtttctgaattttattactctgtgcatccctatttttctccgattattatttgtgatttatcaatcttgtcattgctaactgttcgatgattaaattttagttgatttcattctgcacattagtcctaattttcccagaatatgtaatccaactttaatagttgaagaaacaaagcacccaacagagggcagacttatgttaatagctttgcaaaagagatatttccaatttgtttgtgatcaatttttacaggttaagtatcctgtaactattaccaactacacaccacacacaaatcatcacttttattgcagctgagaaagatgtgttacaccttcacttgtatacataaaaactctgaactaaaagaaaggaaaaaaaacaaagaaatacaaagatatataactgctaaaaaaaaaacagaatttgagcaacatgaatgtatcattctcaatgatgaagtcccctaggccattgtcgtcttgctctagttcttcgctcaaagaatggaattccttctaccacaatctccacaaagctgaaataagtttcgctccaagattttttcattgccatcatgaagaaaggaactaaaagtcctgctgcaaatcctaatccaacactcaaataaaaccacctatcaataaaattgtcatcatcatgaatgtgatctttaggagttggttttttatcgaaatcagtaccattatcgcctggacattttacaacgaggggcttgccacaaaggcctttatttccagcaaaagaggaagcctcaaaagttgtcatgtggccattgtaaggaatcttaccagagaaatcattgtttgacaagttgagatgtcccaagaatgaaagtgatgacaagctattaggaatagtacttgagagcctattgcttgagagatcaagagatagcaactgccccaatttcgaaatatcctctggaattgaaccacttatatgattgttagacaaattcaaattcaccaaacctaacaaatttgtcaaatttgaaggaagttctccgctcaagttattgtcagaaaggtctaagttgacaacaagggaaagaatcttggtgtacgttagttctcggccattcaaattcaaaacaacgctttcttcatactctccaaggacaccatcataggatcgaataaagttttccctttgtacttgaatcatgcctttgaaacatccatagctaccaggaatgctcccattaagcacattatcagccaagtctaaaacttgtaatgagctcaaattcgatagtagggatggaagttcaccaaaaaatgcatttgacctcagtttaataattcttaattgttttaaagagcataggaagtgtggtatttcacctacaaatctattgttaccaagatcaagtgtctccaaacgtgacaaatactttaaagatgatgggatgcttccagaaaacttgttgtcacctaaatgcagtgttttgagataaattagttgacccaacgagttaggaattgtaccagacaaatgattcttactgaggtccaatgcatgtaggtctgaaaattttccaaagctaaggggtatttttcctattaagctattacttgagagatcaaggacactaagagaatacatgttgccaatggaatctgggattgatccatctatttggttggtagaaagagagaagaacagcatgttttctaggaaatcacctatgttttttggaataggaccagaaaatttattgttggagagatcaagtaattgtattgttggttctggaagaggaatgggcccttcaaattggtttgagctcaaatcaacagctgcatgttgagctatgttgaatgttttgggtagctggcctttcaattgattgaaggaaacatttaacgagctaagattagagaaaatttcccagaaccaatcaggtacggaacttgaaatgctagcatttgacaaatccaagcttatgacattattttgtgatctaagccaagttggaaatgaagggcctaaatggcatgaacgcatgagaagttccgttactacatggaaaggaggggtccaatttgaactgacagttagtgtaaaagagttggaagagagacgtaagcagtccaacttctccaactttagaaaatgtgtttcagtgatattaccagtcaattggttgaaagatatatcaagaaaaaacaattcagatagttggcctaaactgtcagggagagtcccatttaatctatttttaacaagatctaaatatgaaaggttctgccatgactctaaagattttggaattgggccatgtagcatattatttcctaaactaagctcaacaagattcctaagttgacccaaccattgtggtaatataccaaccaattcattattgtccaaatacaagtagtttagactaggaagaggactctgagaatgacaactatgtgttccttcaagtaattcaggtaaagttccattcaatttgttatatgacatgtcaagccaattaagattgcaaagcttaccaatggagcctggaatccctccttgaacattattctcagaaagatctaagtaagtgagagatgtcatgttgccaattgaagtaggaagtttcccatgcagcatattatcactcaaatcgacaacttttatacttttccatcttcccctgaaaaattgagaacaacttgcactgagattagtattggagtgcagatgcaaagtctgcaaatttggtagctcggcgaaaccaaggggaatccttccatgcagaccaccataacttaaatcaagactcacaaggctgctgatattggccaaccaatttggtatttttgagttgaagttgttatcactgaggtctaaaaccgcaagtgatgttgttgaattaacaaaagaaacagagggaaaaggaccttttaagcgacaagaagacatatgcaactctgtcaaggatggtaacttgtttagtattataccaaacaaatctaaacccatcattgaaaggttgattccatttatcacaagatgctttagagagactagaccaagacttgtgatccattcaagattatcaacatcacctgtatttgaatctaagtcaaggtactgcaatctagagagatttccagtatttacaggaaaggaaccaccaaaccctccattagagagatttagatacctcaaattctctaaggatccaaaaaatccaggaattgggatgttgttgaatgcgatgaaactcaaatccaagtatctcaaggacttgagttttatcaatgaaggccttatttccccaccaaagtcccacctgtttcgaaaatcaactgcaataacttctcctgccttgttacagcctattccataccattgacaacaattgttgctgccattgttccatgatgtgagccggtttagtggatcctcaagaccagttttgaagtcaagaagagcatttctttcatactcagaacaagtcacattcaattgatcatcaccaccaatgtgaatgtgattgtgaagagtctctccaaatacaaagaaaaagataacactttgtaataagatgaaaattaatgataacattgtaaggagtttcatcagttgaacacacttgacaaacacaatgttttatttttgcaatgaacaatcaacaaatcccaacttattattatataatgattaatttgagcagtaaaatttaatttaaaaaaaaatgaatttttaacaccaaactacacggtctttgacttaagtcatgagtattaaatataatcaacaaaaaattattttaaccaaagttatggtaatattgttctatttttataaaggctaattaggatttttgctctttgaagtttgatatgtatcaaattttgttccctgaacttttttagtcattaaaaattcttcctgaactattgagattgctagatttaaggatttttatccaatttcatttaattttacctaattcggtgattatccacgtactaaattatgcttcacagattttgatatctatcaaattatgctcctcaaacttcgacatgtacctaatcacgcctcctaaatttttatctatgttagacatcctttactaaaatttgataaaagtatttaataatctcaatatttcatggaaaatttttgaaagccttaaaagttcaaagagtatgatttgatatatgtcaaaatttgggcgaaaaaatcccttttataaatgtgaacaatatataatcctaaggcataaaaaatcaaatagtagcttatcttttatctcagaatgatttttaaaataataataatcaaccgatcaaattaattattaattttcttaaaaaataaaaatatatattataaaatgtgagtggatcaaaaacagatcaaagactttaattttatttgatctccacaaaagacttactgtatttttcctattaagttattattaaagagatcaatgactccaagactacgcatatttatcggtagaaaatttgggtttagtccaaatctaatctgattggtagatttctaagtttggttgataatcactattatgttctttggaattggaccagaatatttactgttggatagtgatgaatctttgagtcactaatggaacggaaaatgaatcatggattaaagagcaaacaaagacaaaggaaagaggaatgcagagaaaagattagagaaagactaagaggttgtttggctttgtttttcagttttcaaaattatgtttttaaaagtgagaatagaaaatagttttttttatcattttaaaaattcaatgatgtttgagtcagattttttaaaattatttttagatattttttactaaaaaaaaattcaatattatacaccataccatgacatgaacccatcctattccgaaccagacctgacttggacctggactcgacccgaatctggatagtggacccggggctaggtccgaggtcttgggtcgggtttgggttcgaggtctgagtccaggatcctagtccgttgttcggggttcaattcgggtccgtgttcgtgtccgggttcgggatcttggtctgagttcgggctcgggttcaggtcttggttcgggtccaagtcaaggtccgattccagggtctaggtcagggtttgggtcttagtctgggtctgagtttgagtctaggtccgggattagggtccaggtccaagtttaggtctcggtccgggtctagggtttggggtccgggtcttggtctaggttcaggtccaagtctaggttcgagttcgggtcgaggttagggttcgggttcgggtatgtaagtaaaaatgtaaaatataatatgttagacaaaaaaatatttttgaaaatagaaaacaacattttgatattttgtattttctaatttttttaaactcattttttaaaaaatttagccaaaaacacgatccttattagtttttaaaaactattttctgttgttattggtaagctttctgacttccaattccatccgag

SEQ ID NO: 44962 - DNA, 1152 bp, Cannabis sativa
cattgaaataccaaccacacgtacaattattctataactattaggcattattaaaatatggataaatttgaactattataattgtaccatatatttgacaatcctcattacaactactccttaattacctaattagtcctcactatatgaaataattatactttatcatttttatatatatcatataatataatagatacaggttgagaaatattaaataacaaaacctacaaacagaggcagtggcacacagtacggagtaagtagtagtagcagtagtccgctaattgcacgactgaaaaaacaaaaaacgtacaaacaatcacataaagtagcaataataataataagggtggcgaaacggtgcgttttggttgtgaataataatagggccatacctaactgccacgagtctcgtccaatcgattgatcatgtaaagcgcgttactggtgactctagcaacgttagtgatcttcctcttcacctcgctcttcatcttcattcccagctcttcaaacccttcaagacacgtgtcctcgttcgtcaaagccgcgctaacccacgtctgcgcgttgctcatctgccaccggaaagtctcccaccgcaggtgctgaagttccgacagagtcttgctcagctcctccaccgagtccgagatctgctccacgcaatctcccagcgccgatctctgccgtttcgatccgaacgatcccttcgccgttcggcttagaaacttcgagactcggcttgcgcgagccaagctcacgttgacggcggcttgagctagatccctaggcgttctggcgggacccgcgtaggtcgagagtgtacggaggcagaggttcgggtagttggcgtgaacgcaggatgtacggacgagatccgatgccggagtttgggggtcgtgttggtggtggtgatggttcttgccggtgacggagtacggcggcgatgagagaagaacgatggcgaatagaatgaatgggaggagagacattgtgagtagcgttgggagtgtaataatatgtcactgagtgagagtgtttggtctcttcatttgagttttccttttataaataaattaaataaaattaaaatggagaggtgtggcacaagttgagcggtgggttgttttatagtttttttttttt

SEQ ID NO: 44963 - DNA, 3085 bp, Cannabis sativa
ctattatagctacacattttacaaaaaaaaaaaattaaatttttgtatactatatttataagggtaaatacctatttgataccttgtgttttattagaatacatatttggtaccttatgttttgaataatgatcatttggtaccatctatttacaaaaactactcactttaatacccttagtgcatttaagattctaatattccaaaactaccttcatttgcatattaagctgattattatatatcttattatactgatttaatgaaaaaaattgattgattaataattatttaatgaattcaaaatatcttcgtcaatcaaaatataaatatatttgtaaaaaattattaattaactttaaaataaaagaactaattaaaatatatattcaaaacaaaaaaatcagttaaatataattgtaaattatataaatattagaaaaaaatatatataaataatttaattaaataaataaatttaaaattaatgcaatccactaatattctatttcattaattgatttaacttgttcttctttttctacttttcattaattttgacgatttcaaactcaacaatattactatttctgtaatatttttttttttttttttggaaaactgatttgtaacattaaaggatgagaaaaagagtttagttacaaaatcagatgaaaaaggaattgaaactactacaattccagataagatctttatccgttcctagtgccatttgtgctaaagtgtgtgcatttacattgtggttgcgagagacatatgaaattttggcacaagaaaaagttgataaagagtcaatgattttccagactaggtcagaagtgggtgatctatctttggaacgcttgttgattttgttcaccagatccaaacagtctgaatagattgaatgtaaaggcaggtcaactatgatacaccactgaattgcttgaagaagagcttgagcctcagccaaaattggagaaagagcacctgtatgaggagtactaatagcggcaatggtttgaccagtggagtcttgaatcactacaccaaaacccattgttgaacgtgatgtagaaatagttgcatcagagtataaggtgtacatgcccgttaggggaagtggaggttgagatccttcagctgatggagttggaatcgaagtggcaagatgctgctggctagttgtgtactccttcaagtaattgacagcatattcttcaacatcatcgaggggaggggatttggattggaagagagtctggttgcgcctgttccaaatggtccacagcaaggcaaaacagagagacaactgatcctttgatagagtttcgtaacctgaaaggaggaaatctttaatgtcctgagattgatgagcagtaaagagaccagctagacttgtgtttttccaaatttttctagctctggaacatcctaggagagaatgggtgacagtgtcttggccatgagaacagaaagagcaatgaggggaaggaattatttttctgcagaaaaggttagaagaagtgggaagaatgtgatgataagcacgccaaataaagtgtttaattttaggagggatggggagatgccagagggttttccaccaacttttgaaaagatcccgattggaggttgagggagcagaattagaaaaagaggcagaagaaacagcaaagtgataagcagtgttaactgtgagatttcctgaacggtgggagctccaaatcagggtatcaggttgagagatgtcgatagggatagtgagaatggccttgataatgtcatgagagaaataagtgtgcagcttagaaatatcccaactcccagagtcagtgataaagaaggaaacagttgagataggggggaaacatgggttttgtaagtaagagatttgaatcctggaacccagtagtgatggagaatgtcagtggaaagaccattgccaattttggaaatgagacctttagagagaaggtcccgaccccataaaaggctagtccaagtgtatttctgtaatacttgaatcaaaatcaattagaacattttttgtcaaaaacaaaaatcaattggaacatctaattcatgtcatagaaaccaaacattcaaactaaaggccaatgataaaactaaaattaaataattaaatcattcaaaattttcattaactcaattttaactattaacagaacctcatatcaaaccaaaaagtatattccagaacccaaactatattcaaatgccaaacattaaactcaataaattcaaacaatcaaaaaatcattccaaaatccatattcccaaaccaattgaacattaaactcacaaataaaatttgaattgtagatctgaacacaagaacaacacctcaataaaaatacaaatctaaactcaatgtggtgagtaacccccaaatctcatctgaccttaaaaacttagatctggaatctatccagctacacaaccattcttgtccccgtccccattgtcaacaatccaaaatttgggttctccattcactctcgtcatcgaggcagataacccaaaagtccagaacaccaaacacgttaacgaaagccacctccaactcgccatcgcacgacgaccactcaaacccagatatgacattgtcgacgtcttgccatcgccaacctccaccttgccctcaccacaccaccatctcgttgaagaaagaagaagaagaatggggaaatgatagaagaaaaaaaaagaaaaaaaaagtttatagaatttatttatttaaataattttatatttgaaaattaatgtatgataattaataaataatttttttaattaaataaatttaataagaagtataataataaatgagggtagtttgggaatactaaaatcttaaatgcattaagggtactaaatgaatagtttttacaaacagaagctactaattgaccattattcaaaatatagggtactaagggtgtattttaataaaacacggggtaccaaataggtatttaccctattcataataatacttactctattttaagggcggagagtagcgaaacagaaattaaaaacgcaatagcaaactgcttga

SEQ ID NO: 44964 - DNA, 1321 bp, Cannabis sativa
caggatcttgtaatggcggaaagattattgatgaagcacttagatgcacccggaaagtggctgcaggagaggcaccgtcgtgttctcatgaacaagttctgtgggagatatttgagggacaggcgtcttcatcagtttatcatctattcagaagaggttcaagataaatacgaacacaatcgaagattaaggaatccagccaccactgctgttcaacaagccctccatggactttcatacactgtatatggaaagccagatgtgaggcgcctcatgtttgaggttttcgattttgagcaaatccaaccaaaagctgtgtaaaatagaaaaaaggggtaaaaaaaaaggtacgaatccaatggaatagatgggtaaaaaaaaagaataggatatacttacatcaactaaactgaattgaattttgttacatgttattgtatttcataattcattttagatgtgtcaaaagtgttttcttattctgattataatttcattaggcaatcttgattggtagacaatattgctacccctgtggatgtataacaccataataataataataatagactagtggaagaggctgatgcacctaatttggtcacattccgtagtgtttaatatttgtatgtatcactttatcaaaagaaatattatatttgtatgtatcatttgagatatgtaagtttttaatatatataatatatttatttatttgaatgctatttgtcatctaaacttcactacagattttattatttcaaattaaattattttatatcaactaatatgattgaaaaagtatgaaaagaaaaagaattatatgaagttattggaaataatacatagtacataccagaaataaagccaccgctgcagtgacaaataataatgcgtaccaataccataagaaaacccttcaaaaataccaaggcaactcatttatactcatttgtgctgattaaatgtaaattagatattattttacatgtaaaagtaatatatttatataaaattatatataatatttgaaggtaagaaatagtaatacatgatatattattatacaaataatttttaaaatttatcaaagtataatttaaaataaaattaaatatttttttcttatgaatttattattattttttatttattttaatttattaatattttattgttagttatgagaaaaaaaatatttttttaataaatattaaataatttaattaaaataatagggaatgacctcgtatactatttttaaaattttttttttaaaatttatggtttgagtttctaaagtggttgtagcgctaattgc

SEQ ID NO: 44965 - DNA, 3251 bp, Cannabis sativa
  modified_base (1689)..(1691): a, c, t, g, unknown or other
aatatgtatttataaataaaataaagtttgaaaatatttttatgaataatttattttttttaggtaaaattaatatttttatcaaattttttttttgtacttttttttagaattaatagaacattatcatttttatttattttttttttaataaaagggggtaaaattttgtattggtcaaagttcaggaggtaaaaatgctaatttttgacggtaaaagaaatgagcataattatgtaactgttatattttaagggaaatttttaacaaaccgtatatttgaagatgcaaaattagatagtcccaaaaatttaagagataaaaatactaattattctttcttttcatatttatttaagcttcctctctctcttactatattttaatgtttaaatatataaaattaatataataaatgtagccatttacatcacatttttttttacatcttttcactctctcacaattttgttttttaaaaaaagaatttataagcactcattctgtatctttttctcttttacattttttcttactactcacaatcaaactatttcatactattttctttagttaataacattttataaaagaattttaattaatttcttttaaccattactaaatataattcttttacttacacattttctctcatattttgttaacataatttctctctcttaccaaaaaaaaaaaagacaactaaaaacaactatagaataccttaacaacaatatgaaaataactataaaacaacaaaaaaacagctacaaaaaaaaaaataataataacaagttatcaaccccattgcaatatacaaaacaattaatatcaactcctcaacgtatttttgtattacaatttttttacttagttttgacaaaaaagatactatattttttttaatgaatttttttgttaaagcttcatactttcaactctttttttctttctttctttctttttgagttagtcacagttaaaatagtaatttatttttaaaaattaaatgaatagttgcattaataataaaaataataaaattttatgatttcaaaatatggtatataatataatgggtaatatataattaaaacaaaaaaaaaataactagataataatataattttaatatgttaatatttactagtgcacattgtgtcaattaaaaaaataaaaaaaaaatgaatcattgtattttaaaaaaatgtgtcaaaaaaataaattaaacataggtatctacatctacaaagcaacacacatacaacgaaaaaaaaaatcaagagtaacgtaaaaatatataccataaaaatgcccatgaataaaaaaacaactaaaaggtaactgtggaataaaaaaaaaatacatcgggcgagtttactgagttttgggttcgcgggttttgggttttcgggtttcaggttcaaaaaaaatgaaaccgaacccggacccggatagggcaccagttgacgagttggcgggtcttgattggtcgggttgacccggtcaactcgatcaactctttaaaaaaattaatttttttattcaaaaaataatttcttttatttttttatttattaaattaaacatatataatataacaattttagggttttttatgtttcattcttttgattttttaattaatatatatatataatgtaataaaaaataatatatatatannnaatatattaaatatgcgggttggcgggcgggtttgggttcaacccgaaacctggtactcctgaaaactcaactcgtgaacccacctgaagggtaccaagttgaacccgatccgcctgaacattttttttaaaaaaaaaaaattgcaggttcactagttcgggttcagacgggttgctcgggttcgggtcgaacctactcgaaatgttcagtcctacttgtaacccttgaaataatggctcattttactgtttaagggtgcaatttttacactttcaagagagctattatgctgtagaaacattcacttgtaatccttagaagaatattgagaaactcacttgactctggttcttgtgatcttaatatctcttcaataaataccataaaaggatagtaggttactaccaaataattggagtcgaacatctataaaatttcttccattgctttctaaatttcatcataaaatgcttttattgccatatatttgactctgcatcgttaaccaaatacaagatcaacaccattcacttttaaactacttcatactatttttctgtagttactcaaattttataaaagaatcttaattaattaatttcttttagcctttcctaaaataaaattcttttactcacacattttttctcatatttttttaacactctttctctttcaaaaaattaggagcactcctcctatatttttctctcttaggtgattaataaatgtagtattttttagatattttgtagtttattcaaagttcatttattaattatttgcatatttcaaccatgtgttctataattgttttatttttatgtatttttttttattttacaaatatcttttagtataataaaaatgtaaaaaatatatatagaggaattttctaatatagggcctaggggtgtcaaaaaaagactgcatgggtgttttgtaacgaatcttgttttgacacgtcattaagtgaaatttgttttttgttacctgcaaaatactagattattatttttttcttgtatttttttagtttttttttttaacatggaatgaagttaatcattccaaatttctttttttgtttttggggttgagtaattttttgttcctgatttatttttcttttattttttagaataagataaattttcattgagaaaacaaaaagaagctacagcccaaaaaaaaaaaaggagcatcgtcaaattctaggttaggaaattcttgggatgattaatttttcgttttagtttatttatttattttttaagattgagagtaaaagaaaaataaaactatagccaagaaatgagcactgataaccctccacaaaataaaaaacaaccaaatcacgattatagttccattagtttgagaaaaaaaaatgaaacgagatctggttcattgacaaggtttaacgagatctggttcgttgaagagatcatacatcttactggtcaatagaagctagatttgagagaaactagagagtaaagaaataatgtaaggatccatagttgatggaatatcaaatcttgattgaaatttcataa

SEQ ID NO: 44966 - DNA, 685 bp, Cannabis sativa
atattgttcttaccaacaacaccaggaccgccgtgatcggtataatagatgaaaatatagtcatctggtccgctatttacaaccttgccactacctccacttagagcagttctatttccaagaataacagcataaagattttctggagtggcattatcccctgtataatcctgttcaaatcaaataatatatgattttaaattaaaatatatataaggcatatataataaaataatgaacataataaatgataatgaaattagaaattaattatattaactaattaaccttgggaactccatggtagacatctggaccattgggcctgttaatgatgactccaggcttaggattattggggttgaaggcaatatcatcgtacatgaaaactattatgttttcatcctttaatccagcttttttcagtatttgatacgcgtgacatacatttgcctgtatttcacaatatctatccattaataattatatatgaatgttaatcacacttttcatatatataatactttaatcaaaacttcaatgaacaatgaatatattaagacataaatttgattattatacgtgtcccaatattctaaaacatcatggtggtaccccatactcactataacaaagaaaaataggttagttttgttttgtatatagtaagtacctgatgcctata

SEQ ID NO: 44967 - DNA, 2560 bp, Cannabis sativa
caagatgtgtcatcaatgtgcataggttgtccaagcaccttccaaataaggaaagcgttaaaaagaatgctccaccaaaagatcttgtgtctttcatgaattttgctaccccaaagcttgttccacaaagatggagacacaacaatagaaagagctctcgcaagggcctgaattaggtaagcaaatttaaaggaaaaccgaccatgaatttccttggtccatatccagtaatcactaccttcaccagtcggtttccctccagaacggaagggcactaacagtcgcttggtcaaacaactggtttaacttctgaagattccaatccccatcctcctttaacagatcgacaactaagttaaactccaaggatggcataccatttgattttggaaagtggttagaactatgagtcacccaagggtcttaaattctaatatcttttctattgacaataactttacaggctccagacttaagagtctccttagctttaactaccccctttcagaacaaagagtcagcgtctttgtacgtaaaagttaaaagtttctttcctctcaagtacttggcttccaacactttacaacataatgacttggtgcctgatataaaattccacccccacttggctaagaaagcctggttcatttcactagttttaggaatcccaaaccaccacgagacttgggaagacaaagattatccaaggcttttaattaagtacattcctttattccccttttcatggccctacaagataacacacaccatcccatcaattcttgaaggaagcttgttggtcatcttggtggattgcatagaatacactaggagaaaaatgtcaaccaatttaataagagttgcacgacctgccttagatagagttttaattttccacccatgaagcttagaggtaaatttatccaaaataaaataaaaatctgcatccttttgtctagttctaaagagggggagcaccaaatatcttatattgcctttaatgcccttaacccttatgatctctttaatccccctcttcataccttcaatcgtattattgctaaagaaaatagaaattttagcatattgacttgttgacctgatcaagagcaaaaatgatccaaaaagttcccacccttggcctcctcagttgtagctctaccaagcaaaataagataatctgcaaagaaaatatgagaaaattttagcccatttttattgagtttaatacctttaatggtcccaaacttaaagcagcttcaaaaagtctagatagaatttaagcagcctaaataaatagatagggagaaagagggtcaccttgtctgaggccacactttgggaaaatcttacccacagaattgccatttaagcacacattaagcgttgtagttgtaatatactaggaaacccatcttatgaaatggtttggcgctttaaaggtctgcaatacatgatccacaaactcccacctgagtttatcgtaggctttaaccaaatcaattttgattgcgaagaagccttcaccttccttttcctcttgagcgaatggataattttttggataagcatattattgtcttggatgttccttcctgatacaaaagttgtttgggttaagcatataatatgtggaaggatcgatttaattatattagcaatgatcttagagatgaccttataagtaacattgcaaagagaaatacgcttaaactaggaaactttcataggattcgagactttggggatgagcaccacattcgtatcattgattcctctatgcataactctagaagtgaagaatcccaaaactgagtcacaaaagtcttttcccattgaattccaataatgcttaaagaagaggactgacatgtcatcagtcgttggggcttcatcaccacccataaagaaacaagatttgtctgatttcctctctatttaggaccaaggataagtcatgttgctccttactagaaaagtggtccttaaccaaatcattgaggatagcaagatgagcatggttagtcctagcaaaaatgccactgaaaaagttaataaactccggcttaaggctacgatcattgtaccaattcctattcttatctaaaatgcttttaataatgtttcttctacttctaatagtagctgagataaagaaattttttgagcatttatcacatttctttagccacgagactcgcgatctttgctttcaatacaacacattccttgccaacacatcatttagagattgtctcaacttgcactccacatttcagtcttgagtacccataggtagagcctaagttttttgaagactaatctcaaggttcttaatggtggagtccaacttgtcaaattattctctattccacttgagcagggcaatccgagtcacgccaatttttctaaatattctattcagggtccacccatagtcaacagagctccacacatgattaaccactatattactacgagtgtccttagtccacaaactctcaaatttaaattgtcgctaggaattcgacacaaccccacccgagtgaagacaaagggg

SEQ ID NO: 44968 - DNA, 3749 bp, Cannabis sativa
  modified_base (1130)..(1146): a, c, t, g, unknown or other
  modified_base (3240)..(3243): a, c, t, g, unknown or other
aagtttgtaactagttttattttggtattgtatttaatttgttccatattccatacagtatctagaatacaagcatgtaaaatttatatataatttgtggtatccgtaattatttttttcattaagattacaactctagcaaatatactctcaatatattttctacttctttgcggttaatattatgctttagtgcacgttaaaaataatattatgctttagtggattgtgaatgttttggtagtggattaatggtctagtgttggagtttctgagaagtttgtaattggtttaatattagtattatgttaatactagttttggtaataggttgatgatcaagtttttgagcttataagaaacatataaaatttatataagtttttgtatttgtatagttagatttttcattaggaaaatatttttgattatgttgactttagatttgaccaacagacaatggagtcatatttattactaatgcttaccatgtgcacacaataagaacaaaaaagtaaaagagacacaagattttataaaggtccagtccttttagttagcgggtagtgacctactctcctattggttgtattgataccagagataataccactcagatcacaagggttgtggaatctgaagtggctctcttaagattacaatatgagaataaagttggtaaatcccaagtgagggagaagccttgggcgtgtaattaggagggaagatagagttagggtttcagacttagagcttgagagcttttggggagcaagagacctcttacacttcgaggatttagggttaggttaatgctctttatataggatagcttacttgaagataataacctaatattccttaaaaataggaactatcaagcattatttacataattaaataataaatagtaaataggttaattattccttaagaattggggaataactgatatttctcctctatttttgtgggttgatgaagtccaaatcacagcttagcttgttgtccctaatgaaggctgcgttccaagtgcctgccaggtgtagactagggtttgaccaaccatgtttctatcagggtctggccggccatgctcctacaaaggtctggccggccatgctcctacnnnnnnnnnnnnnnnnnagtgcctgccagctttggcaagtgttggccagcctttgcatgtgttggcatgccttagtacatgtatgctaaccttttcacaactttccttgcaaggttcacgcttattttgtcgaacgagccctctttggtctgacaaccatcctttggtcggccagcttgggctcaaaacctagccaaccatacaagctcctcctaaccggctaacatactccctttggctgaccagacatggttctctagcttcttgatggcttgcttaactcctctcacgtgttgcttgacggttctgccatgccttgtaaggagactttgttctactattgacaaggttgtagtacacgtgtccttagtcttgcttacgtggacatgccatgtcagatggaaaaaaattgggataatattttccccccaagtctctattcagacatctggtcagatagggacttcccagctctcgtcttacctgtaatagtctctgtagagcaaccttttctagccaagtattggctttttgtatggcatgcttttagctcttctctctctccatatatgcttcatcttttcttctttgacatctcttctttgaacctgtcagtgacaagttttaagcatttagaaactttgattctcacattaaatagtaccctttttggtattttgatttgcatgatagttttagaatgtataatgcatgatttcttgatggaaaagattcgattttggccttcgttgtcattcttggctatttaaggcaagaagaacacgaaaaacacacattttgattcaaaactaaccttggccagcccaaggggtcatgtttgagaactagccgactctagggtccaatcatgggagttggcaagctttagggtttcaccttaagaagctagatgattcatgcttgggtttggtgaccctagctggttcttggctgggtcatgggaccctggctgaccctctcaaagcttgggaaccctagctggcctaagcgttggttccaagcacgtggcaagctttctgtcctcttttgaccttggtaagaatcatgtcatggccttgtaggcatatacaaccttagcctcatacgtggttctcctatagttgaatgctcaacttaagactcaacatttgtccaagttgttacactggagagtgtacttcgctgatacccagccttgtacaatgacattatctagcaagtacccttgggtacgttttcccagagttttgtctatggcttggaacatgtaaggaaccctgccttttggcttggaacatggcagaattcctagtacgcgcttcctataggaattttgtctagttcctctttggttgtacagtccttgcgtggcctcagccttatggattttgaaatgcacggttcttgcaaggcctcaatgttatgcatttgaactaattttttattcatattcggccttgaggctttcatgttcttgcttttgacctataggcactctgtttttggacactactattgtttagctttaaagccttttactatggacatatgactgtcctggatatcctttattttcttgacatgtaagtatccggatttgcttttctttatgccaaactgaagtatgcctgtacttgacttagaggaaggtttagtaacttatactaagcataaaaatctctatgcataagttttttgtgctaggtcgatacattgtacagtgtgggtgtcccccaagtgagcacgcagacttacggtctctcggtcacttacaattcaccgagtttcatagaccttgcctgggaattttcttgggggtgctaccgggtgtacacatgtggaactgaaaaagaataacttaagaagttgtctttgctagcaagtggttttaacacaattggtcttatgtgtaacaaaagctttgaacttaatgtcttcttttacaatcacatttcggctacccctcctgagatgtcaggtagaggccatcactaaaaagcaatgtgaggccatgttgaaaagtaatgagagaccatgctcaaaagcgatgggtagtagctctttcttatttggctacctctacagggcttaccgtgcaaaggccatcactnnnnagtgatgggaggccatcgctgaagggctttggatactagctctgttctgaattcctgcattgtgaaatgttagaggaaccactatacaagtcagctagttagagcacttactgagatgttctccattcttgtattttagtagaagagacaactccaagttctcattgtacttgccaagcttgtatgcacctcttcttgtaatcttataactcggtgtggaccttttcagttgggtctaaacatgcttattgcaggatcattggtactaatgaatattctttagagcactgagtctctcacgaataatttcctctctttgacttgtttgttgaagcacctggcaaatttttgttggcagacatgctgctttaagttggtttggtcttttcttttttcccttttggcaagggattcttctagcaagatgtggtttacttcttggtcatagtagaccaaaagtatgagagtagagtggcaaatcaggctagccagggtacaggctaggt

SEQ ID NO: 44969 - DNA, 1823 bp, Cannabis sativa
aactcgctgattagtaacgagctggacaattaatataaaaccacggtaacacgcctaaattagtaagtgtaataataaatttgagataaaatagaagaaatgagatttcgataatgtattttagaaaatagagtaaaagagtgatggaatgctgtaaaaaatattgttttgtttgaagtcacaaagttaatttgacttgcaaaatgaaaggtcaattatgaccttagtattacacatgagaaatgagattagtttgttggtgtagggaactgtactctcctacactcgtgaatgagtttttaatttatcaactatttttttgtattctttttaatattttactttattaaataaattgttatatattttttatgaataagatcattgtattgttctatcaactaattataactattacatctcaagttcaaaaagtgtatactatacaccccctatacattaccccttaaaattatttacaaatttctataaaccaattcctatcctcgatagaaattttacaaggcaaaatacaatctaatctcatcttacaatcattttgaatccttcagactgtgtgattcacctgcctaagtttttgttcccacaaagcatcatttcttaccctccaaagattgtagaccacaattgccattattgcaataataatcctttttcgattgctggatatgtttttttaatttagataaccatttcagcagttgtgtaagggaccctgccttcacattccaattgagtcaaacttcagtagctttcaagtatctcttactatatgtacaatcaaagaacaagtgctctaagttttcattgtcttctccacacatcgaacaaagttgatccaaggatagatcatatttaccaattcgatcatttgtactaagtctcttccacataaccaaccacatgataaatctgtgtttcagggtgattaatctttcccaaacaaacttgctcctagaaaccttttcatcaggtttatatagtattcgatgatcaatttgaatattataattctgtgaaacaaagcaatcttgactaagcatagctttgaagttatttttcacagcaactaaacgcttccagtagcaactgcagtctctgggattatcacaatcccaccagttttggttcattagatacacactatgtattaattcgacaaacaagttatcctttttttttagcgattgcccacacatattttttcatggcaccacattccactcttttctaaatcccaaaatattatgttttattagtaaaaatatagtcatcgatcactgctccactatactctcttaatgcctattattattataaaaaatatgagtttttatgttatttatgcaaaagtatgattatttttttaaaaaaattattttatgaaaaaaaaaaatgaaaaatgggaaaaccaagtaaagagtaactaaataggtaagcaattaccttatactattttccctatattttctttttttaaaaaaaaaaaaaaaaaaaatccccactaaataactttttgagaaaattatatttttacaaaattataccttaaaaagcataaaaaaaatgaaaatttgcctagtttttttacttactaatactaagacacatttcccagttaattttttacaatcataataagaacaaaaatctgcaagccatgttttccccaattttggagattctgttctatgtttgatccaaattgtacataattactgtaaaatagttataataataaaaggaaacaaagaaagtatcggtaaaatgatctgggccttggtatagggcctctgggcctt

SEQ ID NO: 44970 - DNA, 779 bp, Cannabis sativa
tccaactcgttcgcagcttcaaaccagacatgtaccagtggaatcgcaatgtgttttctgcaacaatgatgtcgaaactatccttcatgttctaatcttgtgtccctttgcccaatcgtgctggaatagatctgcaattgatcttattccttcggctgcaggtagttttcctgactggtttgcggagttctgggctagacagagaactggtgcggttgaagagctcttgatggtgggatggtccatttggaaatcccgtaatgagttgctttggaagaatcgttctcggtctgctgctgaagttgtttctttcgcacatagtgttcttgatcaatggattagtgctcagtcttctcgtactgagccgctgctttaccaaaatgatagtgttggcagcaaggatttttggtctaaacctgaggaaaatatgatcaagataaatgtggatggggctactttttcagctgagaatgcttatggtacgggtgttattgcaagaaacagtgatggtagagtcttggatgcatttgcttcttattttactggtgaccaacatgcctcggtggctgaaatcatgagtataaaggaggcattaagctggataaaaaagaagggctggatcaatgttgttgtggaaactgattgtttagtggcaattcaagcattaaacagtacggttgacatgccttcaatgtttggtcttcttgttcaagaatgcaaaagtcttcttctgtctttggaaaatgtcaaaatttgtcatgttaaacggtctgctaaca

SEQ ID NO: 44971 - DNA, 2735 bp, Cannabis sativa
  modified_base (27)..(31): a, c, t, g, unknown or other
actaatcagattgtaaagagttttatnnnnngcataaaacccaacaaaaagtgcttacaaaatggttcaagaaatgattagggaaaatactcaagattcaacaatacttgaagctttttggaagaaattttgggctttgaaacttcccccaaagacgaaaaaacttggtttggagagcttgtcaagggtgtcttccaactatgattcagctacaaactaagagggtaaatgtgtctacaacttgtccagtgtgtaactgtcaggaggagactatttaccatgctttagttgaatgtccaaatgctcaactgtgttggaatagagagggaatcgacacactgctgcaacataatgcagcgtttttggactggtgcgtgtcgagttttctggtgttggactcagaccagaaaaaaagtttgttgatttgctcttctttgttggtcaatatggatggaatgaatgctaggaatgacaaggtttggaagaacaagttgataagtccagaaagtatagttttttcatggaaaacttaccttaataaatggcttgctgctcataattctactgagatttatccatgtcctggctttgtgttaggtgatggagctgagcaatggcagccaccaaatgaaaataacattaaggttaatgttgacggagctatttttgctggcacgaatcaatttggaattggttttgtggttcgtgatgcacaagcgttgctaattgaatgagttaccaaactttatcaacgatcgaccacacctgaatttgtggaagctttgggtgtcaaggaagctttaagttggatcaaagacaatcgatcttgccaagtttttcttgaaaccgattgcttagtgtttattcaagccttgcgtagttcaattgatatgatttccatgtttggtcaaatggttaataattgtaaggctttattaaaagaaagtcaaaatgtttctatttttttgttaggagatcagctaataaggtggctcataactttgctagagcttccttattctatcctgattggagcttcaacttggggactgtcccagttgatttgctacattcgttggtagttgaatttaagggttaataaagttatgattttccattcaaaaaaaaaaaattacttaatatttcaattacctaatttaatttccagaattaattatcaaaatattctgataattaattttggcagagaccatgatggaaggtctcacctatataaatataggattttggtccccgaactcactactcatttctgtgaaacacaataaattcatgtaaagagagtaaagagagcttggaagcccgatcacctacatcaatcgatttcttttgcagatcaaagcttctgtgagactaaagctcaaagattcaatggctggaagtatttctatccttagttatagtgcacatatgttttattaattccgcaattcatacaacaattatatatgtttcatttcacatataaatacaatttacacggtcacttaaaaaattaaaatcacaaattatgtatatgtactcaaaataccacaatattaatcacttatattatataagaatacaaataaaacataatacatatatatatgtctggttgcaggagattacaatattttgttttgcttttaaaacacatgatcacttttaaaacagaaaatatattattagttaaagagaggatgtaatcttgaaacaatcaaatacgtcatgattaagctgttgtgtgttcatattctggtcaatttctcgttgaaatgtttgcaaagccaactccgtaggaaaggctatggccaccgcaatccctttctctccttccttctccaccgacacaagaaagctaatagaagaaaagcaggtggctactccaccgaattttggcaaaccccaaccaaaatctatctgatcgaacccaagacgagtattgtcagaaataatgaagtttccaggttcagtgaacctcggtcgacctctaatcaccataagatctgcaactgatttcatgtactcaacgttcacttggtctttcgctttcttgatcaactccacaacgtcacccaaagagcttttgcacaaaacttcggctttcgacattgctgctgggtatgcaaaagtgttgccgtagtatcccaatggcaaacctaatttctccatttcctctttctttctacgtatacttgttaagcaggaaaaacgaacaacttcatttttgtttagattaagagcgattgtacgacatttccagagacatgcagtgagtaaatcaaatcgtgaacaagtttttgctaggtgtggtggaagttgttttcgaagggagtttatttgatatagactgaaaaagaatggtcgttgaatgtggttgtttgggtccagcaccatgtttgagcattcggaaataggagacacaagtggtacatcttcgaattcaagatgtgaacaagtgattcttggtgggtttcgagcgttaaagatgtctcgttgccaaacaggttggatagatggaacatgtgcaccacgtatcatttctgccattgtgttcaagaactgggccaatccaaatccgtcgcacattgtgtggtttaagcttagcgcgaacaagaatccaccacaagttaaacgagtgacctgagaaagagccgtacatttcaagacataaaataaacgtacgttttatttttttttcctacctactcttgtttctttttttttttttt

SEQ ID NO: 44972 - DNA, 1648 bp, Cannabis sativa
atatccaaccctagaatacaccaaacccaactaggaatacccttatcactatacccaaacaccaaaagtaaatatacaatatttaatatttaatagagtttgtcaaatacgagcgagaaaatagagaattcattcttaggaaaagcttatgcatcaaagtgatattataaaaatatgaggtcatgaggcttgtatttgtagatcattagattgtacaacacgagtcgtgagcccatcatttttacgtgtaatacttatgattttacagtttaatttaatgtgtgaatcatgtaacttaaatttaaactacaaatatgaggttgccatttgataattggtagtggactggtgcataaaccagttactggtgttgaaattgctggttttgcagcagaattgacacactgaaattgttgtaaatatgcagcaaattgtgtcaccatttggatagttgtcttgactttttaccatgtatatagctatttcggttagaccatatgaaccacatgaggcaagagaatactttccaggtttgatttgctatatctttcaattattacaaaatagtgcaaaatgcgacttttattttttaattaaacattactattagacatccagtaaaatgtctaacaccagaagagaaaagatcttataagtagttcgtgctttcgtataattttttattataataaaatatgtcgagattgatattgaattttatcaatagcaaaagcaattaatataatactcaattgttatgggtggcacatttaacatatcttttacaatttctctttatctttatatttatatttatatatattatataattaaagatgtgctccgtgggatttgaattaacataaaaaaaaaactatagagtaatctccataaaatagctgtattaatttgtagttctaatgttaaaattcccaatcataaatttgttacttatttctatttgtttgatgggaaattacccattataccaactattccaattgtttgattatggatacatattttagtatttaataatggcatttattaaattcacaatgttcacgtggtcctcctgataaatgatactgttcaatatgtgaaacaaaacaaataccatgttttgtataccaaaggcaaacgttttggcagtcctagaaagtatagattacactcttcaaactcctattcacacagaaatatacaatctccaagatagagtgtacaaaatctacccataaatttagactgatcctgtatttagttacaacaataaactatttatatttattatcttataattcattttaatagtcataatggatctgtatgatatttattaaaaatataaaaatgttcttaaattacaatattgcatgaaaaagataatatataaggtgtggcaattaaaaacattgacgattcgtcttcaaacctttccagacttttctctctcgtctctcaagtatgaacaggggctcgttttcttccccagcacgttcacaccttctctctgcaagtttccacaaggtgaaacccatgcccagctccagatcgttcgatcatggtggctccgattcctcctccactgagacacagcaaagctcgacccgtccaagccgagccagccgtctcagatcggaagagc

SEQ ID NO: 44973 - DNA, 1271 bp, Cannabis sativa
  modified_base (56)..(71): a, c, t, g, unknown or other
ttatgtgtttagttcatcgtttttgaagttcaatattaggttgttaaatcaacatnnnnnnnnnnnnnnnnaagatcctggataaatataattccaacaccagacccaaccccaaacgcatacctcgaacctcgactcagacccgaacccgaacctagatcttggacccagatactggacccaaaccctagacccagacttggactcagactcgaattccaaactcggaccccaaatcccaaaacccaaactcagaccccaaatctcagacctagacctggactcgaacaccgacccgaccccgaccctaaccccgtccccagaccctaattccagactcagacttttacctaaaccctgaccctggacctggggctaggtctgaggtcctcgactgggtccagggttgggttcgggtcttggtccgagttcacgtctgtgtcgacatctggggttggggtccgggttgcggtctggggtctggtttctaggtctgggtccagggtccgtgttggggttcgagtctgagtctagtgtccaggtccaagtttggggtcagtatatgggtcggggtctgaggtctgaggtctgggtcggggttcggccgtccggggttcgggttgggttccagggtctgggtttgggtttgggtttggggtctgggttcagtgtctgagtttggtccgagttccagttcggggttcgggtctgactccggtgtctgggtctaggtttgagtccggttgcgggtcctggtctgggtccaaggttcgggtccaaggttagagcttgggtttgggcctgggttcacggtccgaggtttgagtctaggtattggttctgggtttgtgtttaggctaaggtccgtggtccgaggtctgggtacggggtccagtccagagtctagtccggggtaggatgggttcatgtcatggtatcgtgtagaatattgtaaaaaaaattcaaaaaacagttttcaaaaagtgagccaaacaccattaaatttttaaaatgacaaaaaacttttttctattcacagttttgaaaagacaattctaaaaatcaaaaattgaaaacacagccaaacaacctctaagcttgtagacacccatttttttttttttaagatttctaatttttattgtctaaaatatatgaggacttggacgtatgtggtcagctaaacctagcttataattttttgttggactatttccctctaaattttagttcataaaatctattaactattaatagtaaaatcaaacttt

SEQ ID NO: 44974 - DNA, 1606 bp, Cannabis sativa
tcaataataacagtataataattacttaaatagctataaataattctcataattaatcatgattaactgctaatttccaaattaaacttagcggtctttacacctaagggcacggtgaccaaactaattctagaggcagagtcccgtagaaaaacaagatagatgttggagtacaggagctagagtctcgaaaagaaacacctcctcctagtgattccaataatcatgacgaggatattgaagaagtgcatccattgtcagataacagtggcggaagcctttccactaatgatctccaaagaagattaaatgccaagaagaaaagagccaaagctgaaaaagcaagaccctacaaaaatgatttgagaaatcacatcgacgatcgtgttcgtagaagagaatccttaagtgacaagactcaatgcgtggaacgtaaaattgaggagttgatggatatcacagaaaagatttttagaaaacaaagtggtgccgtatccgactctgaagaagaggacatggagccttgtgtgaggagaactattgaggcaccattgccagagtgtttcaggatgcccctgatggaactgtatgaaggacaaacggaccccatggaccatttgtccaaatacaaccacatcatgaatgttgccaatgctagtgataatgaaaaatgtttatgtttttcattgacattaagtaagtccgcagaggactggtggaagaggttgtcttcgagatcgatccacaactggagagacctataggtaatgttcagaaaacaatttatatcaaccgaggactatgatttggaagctagctccttgaccagggtcaagcaacaacaaggagaaagcttgatgaagttcatccaacacatgatggatgtggctgctaagactaaagtcactgatgacatgaaaatggtggctttaacatcaagacttacaactagatctttaatatgaggggatcttcagcgtaaaagggaagataccttgagtgaattcttgacaagagcccaatgattcataaatttagatgacgcttatgcccaagcatatggagtactccccgcaccttccactgaaataaaaaatgcccaaccattgcagatgacaactccatccatttatccttcgtcaactgcttttactactcctacagtatatggaccaagtacttctgtacaaccagttgtacagactaatttttccaagttcgaacttgtacaaaccagatacaatatcgctcccagaaaaataaaccaaaaaagcagaagtttcatagtccaatttaactcattcaaggagtaaaaggagtacgaagggtccgaataggatctttactattcattgcagccgcaccatctctctctagtgttgagtattcttggtagttcttctcactttcatctttctttctgaattgattatttgaggtaattgaattttatatattagttttgaaatttttttttacttatctgatttttttgtttaatatttttaattgattatttaatgtaagtggttttataatttaatttaataagctatttgttatatatatatatatagggatatgattttgtcccgtgatgtacttt

SEQ ID NO: 44975 - DNA, 1171 bp, Cannabis sativa
gctgtttctacatataaccacaacagaaatctctattcctaatatctcacaaatatattcgaattgggcaaagattgttcatgtattccacctaaaattacagcctaaattcattaattctattaaattcagccatggaaatacctgcaattgacgatcaacccgagtttttggatcagtcatgttatggccatgagtattaaaactcaaagatgaaaagaagggcacaaaaaatgcgtcagccatttccggatccaataccctaaccacctctctcacctcaccgtcttcaccatccccttcatacagaagcgaacccatcatccaatactcaacgctatgttgcctcttcaaaccggagttcacaggccacggcggccatgtccggctagtcaccggcgtttgttccaagctccggcgattaagcatcccaacattgaagcgacgaggaagatcgtacatgtagaccctaagaggagagttggtagcacaaagagatggtgcaaccgaggatgactgaagcaaaggaaagaagtatgatctgaggtcgacggtgcctatcgaaatggagtaggagattaccagaaggataacgaagacgaaggctatagcggcttttccgtacattttcggtgatctgatgaggatgttagtctctctgtgctgagtagtacggactatgctgccattgattttgttaaccataataataatcttgtttgggctctctttctcttaccttctttttctttccttgcctattgggctacgtggtgtactgaaattgagcttctcttttctctatttttatttattttatttcttgataattaaaatcaaaacttgccttgaaaacttagcaaagttttattctaatttttaaaatttaaatgaagtcaattagactatgaataattgtgtgaccatgtgagaacaatttaaaaaaatcagtccatttgagaataattaaggaaaagttagtaacgtgtatactgaataggaataaataattaggagaagaagaaaaccgatcccggaaaagtgcaaatcataataatggagattaagaatggaaatagcaattattatagtcataaaacgatgcatttagttaatattaggggacgatccatctaccttcgttaaatgttaattttgattggtggactac

SEQ ID NO: 44976 - DNA, 1631 bp, Cannabis sativa
atggatcaatcaggtacacatacctaattattatatattattattgagttctatgttatatacaaattgatcttgggtttatcattaatttttctaacatattaggcaatgcacccgaggcgatctaataggcttaccaaccataagctttctacgctcggggttgacagtgaggatgtgaatcctctactaccttagaatttagagcaaatgtatgctacaatggaagagaaaattcggcagcaaggggatcatattagaaagttgagagagcaacaggttcgacctgcccatgttcctattcctttgacacctttgtttgtgccacaggatgtaagaaatcgtttggagttgttgtacgagcagttcaggaagcaaaatcgaccagtgtttgagggtgtccctgatccattgaaggcagaactgtggatgagcatgataacctccatcttcagctttatgcaagacgagggtaatgatcgtgtgggctatgccatattcatgttacaggagaataccgtatttagtgggagattgtatcccaaagccaggacttgaatacaatgacttgggatacattctgaatttgtggaagacttcatacatgtaatatccgcttttcttgaagggtaattaattttttttatacttagtttattttgtttgctaatggagataatttatcattttgaatatttatgagtttagttgagtatatgattttttgtttgtgacaataaaaatttcttttatttttattttattttgagagtatgtataatgttagataaataattaaattattggagataatttaatatttaattatttgtgaatagtattataggtatattaataatcataatatggctaaatatattgtatcagattatttaattttattattattatagaatatggagtaggtacactattatatatatatatctatattttattacttttttaaaattttaagttattgatctaggatattaagattagagtttgggaatatatatatatacgatacttatgagatacttttagggtttagaacgcataaagaaattgaagggaggaggttgtgagcagagagagagaccgatagagtttcatgtgaaacttagagagagaaagagaaattttaattctgaaacacttagagaatttctgggtttgtttgatcgctttgaatagcttttctacgatctaaggaagctaatggtcatgaccaaacgagctaagagcacaggttttgaaatccaccattttcatgaacattcaagcacgttcttgagcaatctcgggtttgagttgtttcttggttaaaataagattgtgtttaagcttaaagaatgaaagcttcaaggccctgaacgaaaatctccattgttagactctatttttaatggtacactggcgacgaagaagacaacgactttggaatgattgtgtttgtacgagttcatgttttacgttaaaaatgttcgtttgagtacatcatatgtgttagtgtcaatcatagtgataaatgattgtgtttggtgtgtcatgcaagtaaaattgacctacgtgttgtgtagtttgacgtaagatttcattgttaatattaggttatgcttgaatat

SEQ ID NO: 44977 - DNA, 1106 bp, Cannabis sativa
tttttaaaaaatttactggtgaccctacaaatattgagagagcaaataaaataaatattgatgagagagactacaaaagtagtagactataattaataataattaactttgaactacaaaagctatttaagcttctaaagtcttgttgtatccgttttgggctttaagttttaattgatgcaaaaaaagtgtagcaatgagaagaatatttcataatagttactaaaatcaaaagatgtgtaatttaatatttaattgtattaacaaggatataatattgtataataacattggactactgatttatttagcatttttctttgttttatttttatttaaggggaaaaaaaaggtatgtgtagcaaagaaagcatcttcatgctaattaaggtgaaactattcatttttcttctctaaaaaaaatgttgactttttaattaaaaaaaaagaataaacatgtgacagtagcccttgcagttgtgattcacacatgtgagatgtgactgagtgtgactatatctcattaatttgaactcatttaattaatcaatctctaccaacaacaacatatcattttcaattaaataattactcaaaacatcagtgttgacctctactttcttagtcaatttgcctactatggaatatattataaactttgacctaattaaatatacgatgcgaaaaaaccaaggtggttccccaaaaaaaaaaaaaacaaaagagattttcaaacaaatcacatgctataatatgataaacttctattttataataactaattacaataaacaatgggattattgagagctatttttttaatgtgaattaacttacatatacttgcttaattcttcttcttttttcttttatgtttttattaaaatcctaacttaataactactcgttatttctttcttctattattgttttcagttacgaatattaattaatttattataagttagcaaattagaaaaaaaaagtaacaactttttcaatttgatgaaaagtctaaattataaatatatatatatatataaatccatatatatatattaaattaatttgcggtataaataattaagtttaactctcagttgtaa

SEQ ID NO: 44978 - DNA, 882 bp, Cannabis sativa
gaaaaaagaaaaagtgagggatgtggtagaagttataacaaaaaatacacgcaaagccttaaatatatattcactcactcactcactggatcttctttctcatcagtagtagagtatataggagagagtagagtagtgtagtactatatgtactgtacatgtgttgaattatatataaatatatatatatatgttggcattggatgattgatgattagtagtaataagtgctgacacctgttgttccttgtttgtctctctttgttggattccctcagaatcatcataccatttaccattatttaccatttacatttaccactaaccatacgtacatattaattttagaattgtgatatatatatgttagcgatcgaagagaaaaaaactgtgtactgccttgtactatactacttcatctgcatctgcatgcatgtgtgattattattattaatattattactacctggtcctgtagctacctacatatataagatatagcatttagtattacttattactatatattctaactttaaatctacatatataattttgttaatttagctgtaacttaattatcattattttttgtacaaattattatattaaattatataaaattaaagatattacaccaaagaaagtgttaaataggtttagcattttcatataatatatatagtacatacatatagtaggaatagtaacattaatattagaagtaggtaataggtaataggcaatactgttgatataaggtacgtaggtgatatatatttgtttctcaagtctcaactcatgtcatcaatcaatggagtagaatattatatatgtgtggaaattggaataataataataataatagagagagagagagag

SEQ ID NO: 44979 - DNA, 1093 bp, Cannabis sativa
tttaaaaaaaaatgagttacttatattgtacgagaagagatgagtactttagactttaaagttagagatgataacttataaacatgaaaaatctcataacttttaagaattattaatgtaagtacgttaattagttaatttgttctaaacccaagaaacgtcatcgactcgattatcaaaatttttggatttttttttttaattagaagaagaaagaagatcatgtagtttatatatatataaatatatttataattaatatgtaaaaaaaagaagaaggcgtagtacggcctgtttaaagatgtatttaatcacatgcaaccatttaataagaacgacaaaatactacaactccaaaaactgccacatcagtattctgtctcctaaatctatcaaactcattggggaacgtagccaccatattacatcaaatttatttattttattatgtttcctttttctaattaatatactagaaatgccaaagggcgttggtgcttaatattttattatgtgttaatatcgttattggtctaactaagtaacaagtctcatatagtttaacataatatcttttagaaagtatcactagccaattgcaacataacatgtcgagaaaatgctagagaccactaatgtgcctaatatcaatgctcttaatatatttatactatagtttgtgaaaaactgttagtcatcgacaatagatgatgccaatgtttgtacgtacgtgtaactcaatatagatttttcatttttttgttttgtttgttttgcaagactatatataattagtggattttaatttcttggtgatatatatgtatagcttaatatatataaatataataatttataactatatatacgatcccaaagatataatgaaatgctatatacccaagaatgggccttggttagaggttttctgacgcagtacacagtgggatccaacgcgattaataatcttacttataattattaactaattaagattattatttgtaggaattaatgattaattgtatatcaaaggtacgattcatatcaatgatcaatgatcaaatactctgctacctagtatatatatata

SEQ ID NO: 44980 - DNA, 1046 bp, Cannabis sativa
tgaaaaaagggcataaaacccaacacataggcagtgcaaccaaagattcttacgtgatttaattttggagtagtgccatgcaacttttcatagggtgtttttaggtcaatgactatactaggaatcctattgatcaagtaacatgcagtaacaagaacttccccccaatagattttccttaaaccacaactaatcagcaaacatttgactttatttaacaaagtcatattcattctctcagcaacaccattttgttgaggtgtgtgcttcacagttcgatgtctaacaattccatactcagaatagagcaaaccaaattcaatgttaataaattctaagctattatctgttctaagcactttcagtttcttatcatactaattttccacctcagtttctattcttcgaatttttctaaacattcattcttggtttttaagcaagtaaacccataaatgcctactaaaatcatctacaataaatagaaagtagtgtttacctgagtgtgttccaccttagttcttttatttttttttccttattcatttgaaacaccctaattcttactcactccacaaccactaccacgccacctccattaacaccaccaccatcacacaacgatcacaactattctcactgtgactactaccatcacaccacaatcactacaattaccaccaccatgaatatcttttctaaaccaccacaaccacaccactgaaaccacccccaccacaattacaccatcaccaccgtagttactgcaataaccactatcactattataatttttaaatctatataaatacctataaaataaaaaataaataaaattcagaaaataaatcttagatctatttttttactgaatatgagatttaagatttaagatgtacactattgtgatggagagtgacagaacatgacttaccacaagttcgattgaaagtgtcgtcagagctcggaagaagtaggcgtcatcaaggctagagaagaaatgggtgtcgcaaacagtggcagagggaaggggggcatgtggggtc

SEQ ID NO: 44981 - DNA, 1611 bp, Cannabis sativa
gatgtttaggtacgtgaatcgtaagtttagtaatcagtacaaggcaacaattggggctgattttctgacgaaggaggttcagtttgaagacaggctgttcacactgcaggttggtctcttccttgttttgaatacatttctttggtgatcaattttgagttttagattggtgagcaatcttgttctgattgggggatgtttatctgtaaatctgtttaggtgtttttatttttgttagtgttgactctttccttgtctatgatgatttgaattgaatattaagctttagcaaattgaaggaaattaagcttttcccttatgcccttgatgaactaaagttgaatatttagttttctaatcttttcacgccatgttggctgaggtataccgtttaatactgcttttatctattatacttttgggatgggaaaagtactggcagttttctaagcattgacagaaatctttaaatacagatcatgccacaaagagaaaggttttttgttctcttgaactgttgttgttagatcttttatgattgatttacaaatctttggtatattgattaggctttgtttaatttagaagggcattaagtaaaatttgggatatcttttactaaaatagtttctgatttgtgtagatttgggatacggctggacaagaaaggtttcaaagtcttggtgtggctttctatcgaggtgcagattgttgtgttcttgtctatgatgtgaatgtaatgaaatcttttgaaaatcttaacaactggcgggaggagtttttgattcaggtaatttttattagtttaatctgtaaatattatctaaatattggagcactagttgaaactggcttttggaattgattttcaggctagtccatccgaccctgagaactttccatttgttgtgttgggaaacaaggtagatgttgatggtggaaacagtcgggtggtaagtatttttatcttctttgtgtttatgccacaatgtactgatgctttgtttttacttacaattaggttttgttattctagaatgtgtttttgcagttgtttcttagtgtgtcaatccattttcatctttgttataggtctctgagaagaaagctaaggcatggtgtgcttctaagggaaacataccttactttgaaacatctgccaaagaagggttcaatgttgatgctgcttttgaatgtatagccaaaaatgcactgaagaatgagcctgaagaagaaatgtaagtacattattctgatcacttataaagtttataaaaaagagatttgtgtctactgtattacattcaatctactgttgaaattttgaagaaagatagctcagatctagtaacggagagagttaactaatgtttgagaagatcagaaataagattatggattgcaattagtcataaaagtaaacgttctttgcttaactacttgcgatttcactccagctcaataaaatcaggaactacttttattgaaaatttactttgagattctatttgtgtcgaatatatttgtttaattatgtcatcctctgcgtatgttcacggtagtttacattttttaagcttatcttggcatttgtttgtaactttgtcgtga

SEQ ID NO: 44982 - DNA, 2938 bp, Cannabis sativa
aaaataatattaaccttaatatatataagtgtaatttaatatggtgtcatgttttttaatttaataattaattattaaaaattattaaataattataaagtatcactttataatagcgttaaaaatcactatcactccatcttaataacaacactcttgtataaattgatggtaggcacttggcagttagatattttgttaggaatacgtaacgaaggggagaaaagcacattcattccaattaatttgttatccattattgaatgaatggtctaagaataatggccatagagatagactcatcttactccaatatcctaaagctccttgatgtggataaatgaggtaacaagtagtaacgtaagatatcgactcttattagttttggaggcactctctttctcttatgagattttcgttacgcatattttcgttaattaaattaatagttttttttgttataaataaattgtagaaataaataaataataaatgattaatgatactggatattttatgtagttttgtaagggatattttttggatacagaatacaatattagtatttgaataataagattttttctctcaaatttgctgtctcttttctcatcgattctgtccctatttatagtaggggtgttcaacaaaatttacaaatggcctaactcgaataaattgcccaaaccaaatcgaataaactgataaaaaaacaaactgaaataatacaatgaaaattgaaactgcccaataaatatattgggtggtttataaattattctaaatagcccaattaatccaaataaatcaaattaaacagatttatatattatttttttaataaaagtgtatataatatattacataaattatatttattagttaaactattttgtatttaaagtttagatattttagtgtttaacttaaaatttagactttagtaactaaaagtaaaaaaaaaaaaaaaattaacgactttctctttccctttctccatcttacagctcgcgctggtgccatggccaaaacgagggaaaaagtgcagggaaaaatcgttctatctactaagaaacggaaaaaatgggggcctgattcaagttctgaggctcaaaaaaccagatctatggacgagatcctgggagtcgaatggattgaattctctgacgaagagaaaacagaggatgcgatacctgggcaagcttcgatggaggaagatcaaagaagagaagaaatcagaatggaatttgcacaattcatggaagctaaacaatttcgggaggctaatagacaagcttccatggctgtatctcaaggtaagaaagtcattacccctatcatgagatctggtaacattgtgaaaaacctggataacaaattttctgaatctgtaatgaaacctaaggtgaaaataacatttgataatatagaagaggaagtggccttctgaaaatcttcaatggtttactatgtactaggagccaatcctcttttagcggtgttggagggattcattaggggcacttggaaggacaaagtagataaaattggaatgttatcatatggaattttcattttcaggttttataatacagaggatggagacagtgctttgaatggaggatatgtattcttcaataaaagacctatgatcatgaagacttgggaccctaatgtcaactttaagaaggaagatattaaggcaatccccatttggattcaattggaagagctagagataaagtactgggggcaaaaattattgtttaagattgcaggccaatcggggaatccattaatggtggatgataccaccaaggaaagggataagctgaattttcctataatccttctcgaagtgaagttgcatcaggaatttccagatttaatctattttgagaataaatatgggaataatgttacaatagcagtgaagtatgagtggaagcctatactttgtggtcattgtaaaggcatgggacatgaaactcaagattgtagaaagaaagtaagtaagaagcaagaatgggtggtaaaggaagataatagagaagctaggaaatgagacaagcagatacatgtagataatgatggcttcaagcaggttactaaaggttggaaagttaaaggaaaagatgttcacagtactatggacactgtaaattcttttcaagtgataactgagaataatgatgaggggagtaaagaggctagttcgagctctattgagatgggaaaaactggaggggggagttacccctcttccaaatggatagaatactcagttggaacgtctgggatctcaaccaattgaaaaagcaaaatgcagtcaagtcattgattgcaaaacaaaaggtagggttggttgggctccttgagacgagaataaaggcccataagattggtgccttatatgttaaaatattcacaagctggtgttttacgagtaatagtgcttggcacaaaggaggaaggattatggttgcttggaatccacacatgcttaatgtgaatatagtttactgcactagtcaacttattcacttaaatgtggcaactgtggataatagaagttctttttatgttactttcctatatggatttaataaggaggaagaaagaagtagtctttggagagatttatgtgccctggattcaaaagatcctaggctaatcctaggtgacttcaatgaaattttgtccaaagaagagaggattggtgcccgagttaagtatcactcttcaaaggagttcataaattgtgtagcaagctgcaatttggaggatgtgaaatatagtggaaattttttcactttgaataataagcagcagggggaagacaaaatatactccaaaattgatagaatacttgccaacaatgcatggatggatgcatatcctgaagctgaaagaagttttcctcaatgaaggagtcttt

SEQ ID NO: 44983 - DNA, 1127 bp, Cannabis sativa
accttatggcataaagacttagcagatattgtaaattgcttgatccacgtgtccttatctggttggtccgcgtatattgggtaaaatcaggggcaacaaaaagtattagcggcggacacccgccggtattggttcgccgctaaaaagatttaaatgcaccacgcatgaattttcctgcacttattatcgtcccactaataacggtaggctgtctgccggtattaacctaagcccgcctatattgctattagttttatattttttttattttccaatttaatataccctaataccggcagattcttttatattttcaagtataaaaaagttatttattttaattcttttaataatttttcacatatacataattttaaaaaaattaggggccatagtacctcttgtctctgtcattgtcatttccaaattgattgaatatttgttttaagtatttttacataatacactaaattgttttttaagaaaatacaaaatacgttatactgaaaaattttatttttacgatttgaacttttttatttataaaaatacattttagaaaaataataaattgttccatattcttttttggttttttatagttgatttaaagttaatatgagatttattttcttattattgtttgttattttatagttgatttatagttgttgtgaggttgatttctcgttgttttttaatcgttttcttgcacttcatttttttttattgctaaaaaaattgtatttttgtaattttaaaactttaaaattgtattttttgtttgaaaattttaatttgtaaaactgtaaagataaaagttaggtcatacaactgtaaataaaacctttataaaagaatagggatttttttttttttttttacattttaaaacagtttttttgtatttatatagaaatatacggatcaacctaaatcgcaatccaaatccacatatatagcaacccttgcagcaaccactggagcaaccaaactgtaaaaaataaaaaataatattaaaaaatggtatatggggtgattcccctaaaataactgcaaataatatatatatttaaataaaaaaaaaaacccttgttattagtaccagtaatgtctagcacttccta

SEQ ID NO: 44984 - DNA, 2112 bp, Cannabis sativa
agctctcgcttccaccaaccgtcttttagtcaagaggtcacacacgtctcttagtcttccaagccaaccatgggctccagtcgacatgggtcttgttgttgcctcctgaccatggggtcgtgaaggcaactctggtgttatctctaggatgaactccagatcatctcaggatgatccgctaagggagtgatcatccagagtgttgtagtggctactccccttaaagaatcttcattcagatcacaagtatgaagagaattgaactggttgctcaagtttaacttctcttcatttactcgagggaagtaatcatactactagccatcggggcaatgtgcatagtaatgacacaactcacccctttcatatcggaagtattttcgagtgtgaagtggttcattggtcctaacccaccaaatctcatatcctccattttcaaagtaaggtctttatacgcctcggttatcttgagtggcaggtcccttcccccatgtagggtctcagggcttggcatcatgagagcgctgagaaggactcggtagaggagtcttgttggttctctcaatgttccgaggtcattccatatcaggtggagggcccattggttggcgcccatgagcttgagtcctttcgagctcttgcttgagggttctttccctccgggaggtctccacgcctagtgtctacttagtgcttgccaagttaccaagtgtggtagttgtgttacgtgcattaagggtttccccttgagcactagttcccacatgaccagttagttgatagggagtttctctcacaaactcagattgaaagacccataaggggagtattgagacaggttagctctctgctgttcctgctcaactcgttggctctcgatgttctgccagtttttaacgaaccagtgttgaaactgttcgtgttggttgtcgagagagtcttgcaactattgttgtagatcagccatagtttgggtgagctaggcaacccgaggatcgacctcctcagggtcatcaatcaatctccacgtgaggctcctcaggaggtgggatctggtcattggtgccagtccccagaagcttgtggtggccttggaaggaaaggtgtagagctggttctaaggcctgctcctggcacctggggcacaagagtagtcccagttctaactccatcaactggcgtgtccctagttatttggccacaagttgggattcctctatcaacacttatagagcgtgttgcaactatcttgctagtgactttttagagtagtggctctcaatgaaagcaccaaaatattgactaagaaattcggacacagacttccaagccacacccgctcgctagattggcgagaataaaaattttgttaagtaaaagtgaagagagacacaacaatttatagtagttcactccctgtattgcgacagtaatggagctacgtctacttcgagttttttatttctcacgggatggtaatacagaaaaaaggctaattgtcaaagctctaatttctagagagagaaacgagagagagagaagctctaaccttgtggaaagtgtttagactctcaaaaatagactaagggagctctccttttataggtaaatgacgcccacaaaaataggaaaaaaaatacaagttggctatttttgactgaatataataatttaatggtgaaaattaaattctaaagttgattgtcaatttttgaagtttgggtcacgacggcaggacccactccgggtaatttgaaatttatttttgtaactcccttggaggtgaaatttggggctgacagcttccgaattgtgattgaagtgtgatacataacttgatatagcattgaaatatcttctaaacgtatgttgaatcatgtcaatcaaatcaacattgagtgagttgtagctattttactaaaggttgttcatgacacagcacccaatttgacatccagcgcccaagttgacatcccagtcccaggttgacatatgacatcaatttggactctgggtaagtgaaaaaacatccaggggatatactttatgattcctaagtgatattttgatatcacttagtctgtttttgtattctgacgaagttggtcacca

SEQ ID NO: 44985 - DNA, 2696 bp, Cannabis sativa
  modified_base (472)..(476): a, c, t, g, unknown or other
  modified_base (598)..(598): a, c, t, g, unknown or other
aaaataaaagtattaccaaacggcacctatcttttttattatttttttataagtaatattttacagatattttttaaaatttatttttctaagttttataaaatgtgctatttaattattctaattaaaatatgacactaaaaaatgtgttaaacactaatatagtacttttttaagaattctctttgtgttaattattttatagttgactagaaactctaatgatgtgacgtctatgtgttcaccaaattcatttattctttctaatgcatttaatgaattttgactcaaaaataataataataaattaataaaaatagctagattcttttattttttaatggttggattctaacctttctagtgatagaattttataaaaggtttgggaccctataatatatgatacaaatatttaagggtttttttttgttatttttatacttaaaaacaatttttttttgtatttttnnnnnattctacatagaaatccctattaattgcaactaacactgaaacttaaattgtaacaaaaaatcgtataaaaacccctattgcaattagctctgcaaccattttagaaacccaaaccgtaaanttgaaaaaaaaaaattaaaaataatatataaagtaattccccaatatttaaatcaatttttaatacctatgcgttataataagagacaagtatatatagtggctatgaaaaaaggaaaattaactcaaattaaaaattacatttttgaaaattattaaaactatttttttagggtagagcttattttgccataccaatataaatatattaatgatataaattcacagttcacactgcattcgcatcatgttatatagtatacagaataattaatatgaatgaaaaagtgttggttttctaaatgatatataaaaaacataaaaaacatggatgatattctttaagtactatttgacaagtcctctctctataatggtatcttttataagcttgagagagtcttcaatgtcattacatagctggtgaggatctggtattctatcttcgtccactgttaaaacaatagtcatcttcttcatgtaactttgaaagttaaccatcaactcctgtcaagttataataatgtattaatatgtatacatataaggtatatatttatctatctatctataataccaaatttgtgtaaatgaaaaagatgattaaagagtaattaatgttatacatgtggttggccataagtagttgccgcaaggaaagctaagttgtgaccgtaaatgccaatttcctgagttggacccactatattcgagaaccccattgttgcacccgacagaattttgtgaaagaaaatggccattctctgtgttacaatcatatataaatatttataaactagaatcagaataattaattaaaaaaataaataagttaaaatataagataatcagaaataatattttattatattttttactaaactatccgaaaaagtagaattttattttgtttacattaagaaagataattgaaaataaaattggactaaattagcataagtatccaaaattttatgtttgtaaacggcataaatctaatgtttatttttagtggcataagtatccaatgtttgtaaaactgtaatttttctctaattttgtcagtacactacagactctgttatgcacatataaggcctaaattcttcattattgggtctagatagaaatatgtagtatcagttacttcaaaatattcttttaattaattcaaaacagaaatactgacgaaactggaagaaaattacagttttacaaacattggatactttcaccgcttacaaacataaaactttgggtactatgccgctatttacacttaaaaaatataagtgtttgcttatttgtttttttaatttttaattaataaaataaaaaataaagtagtatagaaagggatgtatgataaaaaggagaatttttcccttttttcttaatttaagtgaccccactaacttcatatgagaatcaataccttcttattccctttttaagtaaacatacatatattgtgtataatattatatttgataagacccttttgctttctatatcataaattacacactaaataaaataaatacatgtatttttccttcaatattaattagtacgtacatatgatcaaaaatatcaattaggtagtggtccttaaaaataaatgcaccgaagagtaaactattaggtattatatatggttcacatgcatgcataagtgtgaatatagaattaagtgcgtaccttgatgccaaaaagaagaaaaactatagcggaaatataggaagtagaaagagcttcaagggagtgcttctttcggtcaatttgaagtttgacttggcgtatataatccaaagggtcttccttcaaatcaatggttagtgggattagaacatatcctaatttgtttccccactctgcttcaccgtttttttccatcatatcagctaaatcctacatttattcaacactataattaattaacaccaatatgtatattatatataggagctggtgaattaatattaaattatatataaattattattagttaggcataaatagtgacctgaattcctggggatggtctaatattaacaagcaatactgatctgaggcggatattattgggaagattatta

SEQ ID NO: 44986 - DNA, 3320 bp, Cannabis sativa
tacaaattgtttttacgcactctcttcagtattggaaccttgttgtggccccaaagagcttcgattcttgccttgcaaatacaataaaccgtaacagccaccatacaagtatagactttgcgcctaaatctgttttcatttcaacttttcacccagttaagcagcccctgaattcaagtactaccacccttaaaaccaagttaatctttaattaacagcttcaagaattttcttactataacagcaatcaaaaaataaatgcttacaagattccactttatccctgcagattatcatctgaatgatcaagcttcacacaaataacaacaatggaaaactgatattgcataacttccatgagagaaaactatttttaacagatgttatgagcaaccttcttccaataccaactcgcatccctcatactcccaccaatctttatcttttatataaaccgagtttacccatttaacccacaagttatctttttttaaagaagtaacccaaacatgtttttctatagcaccaatttccacaaggcaatatccttgaagcctaaacctccttgctttgtaggcttgcagagacctgaccaagccactttttcgagccctgaagactcctccttttctgtccaaaaggaagggacaacaaatttgagctgttagagagtctcacattgataatgtgttgaaactaaataccatatataaaatgtatgggctacagctactccactcatcgccaattaacctcattcaccttatcttaaattttaacatgaacaattttctttatagttcttttcggcataatgattagttgagaccaataagcattaaggacagaattaataagaacaattcttccagcataagataagttttgagagctccatgttctaattctagtagacattttttctatcaagcactcaccgtaagcaaaggacaactttttagtacaaattttcatgccaagatacataaaaagaaacgaacctctagcaaagccagacaagtctatgattctttcagcctccacaaaattcttacctcctagagaagcttctgattttcttttgttagcaccaagaacaaaagttgtccaaaaacaacttcaacccctgaagaaataacaacatggcaactttaaaataactcttacaaaagagtaaaaggccatccgctaaacacatatgtgtgacattgagtctttgacgtctcatagggaaattgaaataagctatgttggtaattttatctaagattttggaaagatactccatactcatcacaaacaagagaggagacattgagtctccttgccttaatcctctttttgattgaaggtatccatgaggagtaccattaatcatgaaacaaaatctaggtgtggagatgcaaaccataatcagattaatgaacttatcttgaaaattcaaggcctccattattttcaggataaattctcaatcaatagtatcgtaagctatttggagatcaattttgaaaaggcaagcaaatttagcacctttccgttcatagccacacacaaaccaaagtggctttgtgagcgatttttcttccctttacaaagccactttggttctatgaaataatactcggaagaacctctctaagtctggcacaaatcgtttttgtagctattttatagaccacattgcaatggttgagaatattcccgtatgtatagccacaaagtctataaattttgctacttcaaaggataataacattgtttaaggtgccatgacatattatggcatgatggatgaaatataagagctagattatacattgttctgaattgcccttttaaaatatgaataggtagacgtcaatgttggaattaggactgacgagtttgaatttactttgattgatctaaataagaaaggaagcaagaacgatcctcgtcatggctacgtaccaagcagtgcaagtattttacataccagatccagataatggtaaatggtctattattttatcgacgccaaaatgaaagtttgtagagaataaaaataatggtaaaaatgatcatttaagtcattattgtttcattgttggacaacaggtcaatgaacaaatttaggatgttcatcatgacattgacatggacaatgatgaatacagaaaaaatgatatcggggaaggaatttaagttgactgtgatttgatccaaaagaaatgatatcgaggatttaacgaataaaggagagtatttcaagttctttgacctagagcctctcaacaccaacaacgacaaaaataagcaaaaaaattgttgacaaattggtagaatggttgagtgcaatgaatcataaatcttagatgttcttcacttcttggaatgtcgggtaagtacaactacgtactatctaaggactatttaaaatttaatttcatttttttaaaattaaaacataatactttcttattgatttcttaggaaacattgaatgcttgagaacgtttgtgcagggaagattattcattttggatcctttaaaaggacataaacgctacaaagatacttttcgattttccttttcaagttgaattttattaaatttatactaattaattgaatctaatataaattattgaatgtagggcatttgaaaaggtcggtgggtggttccaatgagttactgaaactacatcttcggttattacaaaataattgaagacataggtagaaagatcgaagacgtagggtatttactcactcgatttccatcttcgactccacctatgtctttgattattttgtaacaactgaagagataggcccctcatacgtcttcaatgtttttgggacctatgtttttaccttaatagtcttcggtagcaagatttttttaacagaattaataaactagtctaataactgaagataaaatctaattttctagttgtgaaacctcgtgatagtcatttgctctcgatcattgctcctaacataaaaataacataaaattatacaaatgtcatctcctctcggtctcgatcaatatacaactaacataaaaatattcttattttaaatgcaaatataaattattttataaaacaatgtgttttaaagtaaagttgaccataacaaggtttcatgataaattttttgaaaataaaaattattataagtaaataatattttcatttttaagttttattgcacacacctaaaaaaaatagactaattggccaagacaatacctcgatcaaccataaaaaatgctaattttaggacaattaaaccaaaataacattttcatgcgcttgtgggttgct

SEQ ID NO: 44987 - DNA, 1336 bp, Cannabis sativa
ttaatgattgttattgtattggattaaatattaaatatcttcaagtcttcaaggtcaattcatacataatatatgtatcttgtcgacatgatattatgtatgttttaattgattaaccttatgtgtggtagataatgttacggtagttgattatattgtccaagtgggagaatgttagaagtattattgtagactaatataaccataagcttaataccataaacacaatcattaactatgtgcctaatgtttttcagcaaccataatgggatggataataattatttattatgttagaggtacatgagagcaccctcaaaatataattttcccattaaattatagtatacaattattgaaccacttaagccccattagtaaataaccaattagggttagaggggtgtgacatatatatatgtgtcttaagtgaaagggttaaggttaatggtaataggaagtgaagaggggataactccacattgtgctcttctccaatcttgagttttgtgttgttttgtaggtgattcttggattcaaatggctcacatggatggctcaatgggaggtatgtgtgtattattttggatgttctaaataaagtattgatcttggattaaatggttatgagcaatgatgattaatgcttaatgtgtgtatggatagctcataatctatgtaatagtttaacaccattgtggaacattttgccccacattacagtggaaattccaaaagtaggaaagaaagaaaggacctataccatacaaagaaaaaaaaggagcatatccccaacaatttttgtagaggttcattgttaagcgagtaacttatactttaaaagtcgaaaacaatgatagaagtaatagaaagagctgaaggaatgtttgagctaatggaccaaagagaagaagagtagaggaagagggagattgaaagtaagagaaggcaaaaagaaggaagagttgctttgatctctactctacctaaaggaaatccccctctgcgtacatgagaaaagagctacaaaagctctaacatgaagattgaacataatcaaaggggatacgtggataagaggacgagaatagagccagatttcaaagtccaattcaacgtgacaactacttagatttttcaagaaaataaggaaaagtcaatattaaaaagccttacaaaatgttagcaccactcaaaagaagagatcaaacaaagcatagtgcttttcacaatgatgtggggtactataccaatgacaatagatctatgattagacgaatatagatgataatttaagtgggtggccttcaacaatatgtgaaaaggagccaaggag

SEQ ID NO: 44988 - DNA, 913 bp, Cannabis sativa
aatacgattcatatataagtatatttgtctttttgatatatttacattttgctattaattttcatagttttgtatattctaatgtatgattttaaatttgtgtaggattttctatcttagaaccaggtgggggcgatgagtggagtatttggttagattatgatggtgatgatggtccatccgtgctagaagattaaatgttgtagcaattctctagctgaatgggggagagatataacagacaacttcaaggagcgtcttatcaagtgtaataagattttgaagtgcttgaagagccgacaagaagaagaatctgtgaagaaagataagaaaactcaagctcatttgtttaaataaaagaaatactctggagatagcgatctaagcagttgtggcttcaagcaggtgattaaaatactaagtaatttcatgctggtgctactactcaaaaaagaataaccagattttgagcttgaaaatgaggaaggggtgtgggtaggctgggaaaatggcttgaaagcggttatgaaggcttatttcaaagatttgtttgctacctcagatacgaattgggaaagagttattgattgtgttcaaacatgtgtttctaaggatcataatgtggggttgctagctccggtgactgatgatgaagttcggagagcattgttccaaatgcaccccaataaatcaccgggtccggacgagtgtaatcctagattttatcaaaaattatgggatgttattggtcatgacgtggtgtggttagttcaacacttttttttacttttgatgagttccctaaatttttgcaagagactcatattgtgctaattctaaaaaagtcaagacctgaaactatgagtgatttgagtctgaatgctttatgcattgtgatttacaaatttttttt

SEQ ID NO: 44989 - DNA, 3486 bp, Cannabis sativa
atatatatatattaagtgttttataaattctatgatgggttgattaataatagtgctaatgctaatgctaagtacagttgtaccaatagtattcacttccaaacaccattgtcgtggttttcttcttccactgctgcaaacaaattcgatgttttggtgccaatttctcacatttcaaggatgatatgaaactggatgccatactcctagggctttcggctgacatctatcgaagaattgagtttttttaaaacactacgctaatttgtggtggtattggatatgcttcgcggagggatttctccattttctacgaagtcaaaaccatttagtgaggcatttttatgtagggagtccatttcatagacgatctggcatgtggggaagaaggtaaaccagtggtagtttatatgcctcatcagtttcaggatgggatttcaaaactaggtaagaatggctttacctttattgagaaagtaatcgttttttgctccaaccttgataaattattagtatatcttagattagaatagataatgcattatactagctaaatttagtttattgattgagtttaaatcataatttattatttatgaccaaaatgctttatgttttttaacttatttgaatattctatgtacaagcagtgcatttgaacacaaatcttgagaagctgatcttcaaaaggctgtaagaggttatctagtactcatttgactggattgagtatcttaagagattacagggtttatggtgcaaactcattgaatgaagctattaagtagttgttaactcttaaatggctgaaggaatcttctatgcctctaggtatattatgaaggttgatatcttagaagctcacaatttaaaggggtctaaattttgaggtaattagatctaatttattcaactttctaacctctcagagtaccatccttttcatggatgagctttgttggaatttttaaactaaaatctacagcttttgtttttgtccaacacacttcaaagaaacaaaattaatacaatatgcaaaatggtatttttctaattttattattttatgcgtccacaaaataattggtattattaaaaataacaattgcaatatttgtttcaggcccaaacacaaagagcccaacaacaaagagtcaacacaagtcaaagattctctttccactcaaaatgggtcatacacgagcagcccaacaagaataaagatcaacccaatattctctctccaatcaaaggtcaactctttttccttttattattaattttggcccaataacaatatataccagcccaacctaaagaaaccctaatatcctaatataaaagattcattcttgataaaatcctaatatttcactatttggcagctgcactatttccctctcagagaatttcaaacatgcttcttcttcctcacaactcacggcaacactaataatattctatggttttggctttctttctttctcttcttcttctatctaaacacaaatggcagctaggatttatgtggttattttcttttcttcttcttgctacaaccacacataatttctagggttagggttcttaaatttttcttcttctcttctaaatggcagtaccaaaatagttagggttttctaggttttattttcttactcctattttgttctacccgaaaatactaaacccagaaaacacaaccctttaatctcaacacaccaaaactgaaaatagaaagaacacaaaacacacacaaatacaaatacaagaaataataataagagtgagatgagagaatacaaacagaaatggtaaagatggagacaccaatttgatctccaagttcgcccaataataccggctacgtctacgtcaatccctcaaagcttgaatccatgcatcaacaatcatgttacaatttttgatttacaactttatgatttctcacttattttctctctttttgataccaacaaatctctctttgttttctattacatgaacacaccaacaacattcttgaaggatctccctcaagctggctatgatttttctctgttgttgtctctgtttttctatgttattcacttctaaattgagaagaaaaaatatatccttttatagactgatctatgattctgatctcgggaaaagccctagtgacatatttgtaactatttcagttataattgattttatcttctttagtctttaatctttgttttgttgtaagttgtaagggtatatctgtcattttagaaccctgtgaatagtgttatgacacttagggtatataagtgaatctgtaccaacaaattccacccaaattctcttatgtacccaaggatagttgatgatgctatgagggcttgaatgaccccaggggttaacaccatttgtttatccctagtatgttctgtttgaacttagcaagagttaatagcttggtcctcatgtctgtgacaccttgtgtcaccttgtttttctccctcgcatagattaagtcataaagcccttccaccaaagtttggctttgtgactttctaattgcaagtttaacacctgttgtcctctttaagttccttaaaatctattttataatcaaccaatgtatcttcccagtcattaccatatacttgctgacaacaactatagtatatgttgtatctggtatggtacttaacatgaaatacatctttgaaccaatcccattagagttgaggatctgactcatatcctctttctctttatttgtcttaggacatctttctttttgtctaaaggtccacatatgtttctcagcactctttcccttgggttttggaacacaaagccaagtcttttttttactcaaaaagtctgtatcttgatgcatagcacagttccacttcttagcattctggcactttgtagcttatccacaactttctggtatgttcttctgtcctggcaaagcacttaacagtgcatagtcaatgttctcattccaaatgttgaagttatacttaggattctgtctaggtgctcttttagctctgtctctagtcaactagtagtcctccatgtcatctgcccgactttccctcaggtttccttgttccacatgaacgatgttctctccctgttccacctgaacagtatttctccatgttccacttgaacagtgttttctccctattccacctgaatagtgttttctccctgttccacttaaatggtgttctctctctgttccacctgaacagtgttctctcccatttcctcctgaacagtcttctctacttgttccacctgaacaatgttctttccttgttcatcacttataggtctttgatcaaagttgattgagttacctgcatggttagtactagggaaagaacctaaaacatttggtttagtagcaatgcatggaaaaatattttcatccaatattacatctctactattaatagttttaaaacctttttctcttacccaaagtct

SEQ ID NO: 44990 - DNA, 772 bp, Cannabis sativa
accctagagacccgattggaggcctaaaatgtcacaatagttttagttagtactcttagtgagattgttgagataagttggttttcgaattaccgagatattttaaggtgctcgtggttgaccaaatgtcctagggttaaagttttattaatggtcaagagatgtttagtgctgcagacctgatgtgtattttgacttacttttgtatatagctcttttgtaaaatttttgtcagaggggatcctcaaaacaaaattttagcaatgtgatcatggtcatagttatggttttatttaagtgaagtttttattatcatcacagattttattaaattgttaatctcctattataaaactatgttttaaaagcacgcatgtggtgtccctaagaattaggacattataacttggtataagagcagccatgattttaatagtccagaagattagttggatatgtacatttgttgtgaaggcgggtcgactcgtggtatagtaagtgttatgtgtttatttgttatttgattaattacttacttgttatgaggcatgctagaaaagtaacataacaataattttgatgcgattatatgtgtgggatgtgcttattagcattgatatctggttgaattctaaatggctggaagttgtggattgcatgtgcatttggttatgccacactactataaaaaagggtttttcttcaattttaaagtgacacataaacaatttgtgtcagttgggttaactaacgcaataaccgtagacacaaa

SEQ ID NO: 44991 - DNA, 2288 bp, Cannabis sativa
tttatttagaagaactataccacatgtaaatttatatcttgagtttgtttgtttttttaacaagtattgcatcttatgcaaattctatagatgataaattgtcctgaaattttcttattgtataaatttattctttacataattagttatctcaaataaaaattatatttttttagttccctccaaaataatattactaatttatcgagccaagattcaaaataatatagattaatttgtccttggtcattatatatatgttcaaagatgagatacaatatatgtacattttccttgaattaaatagaaacatcatatataatgagtactataatatttattaaaaaatttatagatgatataataataattgaatgaaaatataactgcagagatttttgccatctgagtttggaactgacccagcaagaatgaaaaatacaataggtgcagaaagagtagtatttaatgacaaaatggaagtgagaaaagctattgaagaagcaaatattccttttacatatatttcagctaattgttgtgctggttatttcctcggtggtttgggtcaaccaggtcactatcttccttctactgactttgtgcatttgcttggagatggcaacaaaaagggtacaaataatatatataaatatatatatattagctataagaaagtataagcctaaaataaattcgaaaatccatactcaaatcatgtctttctatttttttaccaattaaatatactcttaatcatcactactaaatggtaaaatattgataacttatatacaactaaatataagactaataagcagtgctataattttaatatatgtaagacatttatatagggataattaaattcctggtgtataagtcccttaacaataattatggacaactttctaaaaatatttatttatttatctaacaatttacgtgtataaaagctaaatatcgttcactacaagaacatgtatataatttaatgtaaaacatgaagtacataaaaatgatataaaatacagaattaaactataaacatattgaatcgaatataactgaaaataccttcaactattaattcttttaattttgattcttcgatctttggatctacgaaagaaaactaaaactgacgttactgtgagtattcggacttttataatcactctaatgctcttagattgaattaatattttcacataatgaatagtgagtttgggaccgatatcctatatttatatatgagatactctattagtatctatgccacattagttgtcgaaaattaaatcggtaatagaatattgagaaatttgcagctaaactcctttaagtttcaatttgtatacacttaacccattaatctttcttttaagtggaaaaaccctttaacttaacttctacttgcaaatctaaagtattagttaaactaagaaacgaaacgcgctttacgtgcggttgtattttatttagtgataattaaattaaaaaactatatcaaattttgtattttaaatttaaatattttttgtacataatttttaatagtatgagtaactattctactaaatcttcattttttttactcttaataatgtaagaaaaataaattatgttttaatgtcttaattattctaattatttgaaactaataaatgattattttttaagtaattaatttattataaatatacattattatacagttagttttcaaaatatatatagatatataaaaatagataaatatatataaaatttattaattcaaaaccgttgttaacatcatatctcacttgttgtattcgtcactacattaaaagttattgtcattaccgtaatttacttgtaatcatcctatccttctaatttattaattaataataagaaaacagatacaactgcatctaattaaaaataaattcaaatgataagttttagatattttcaattaaagagatatcttcaaaagttagaattcgaaaaatcttcacacaaaatataattctcaaaaaagacaattgaaaaaattattgtcatcacaaaataaatattatgtgataaatatattgattatttttcaaatatttataaaataaataaattaatacatttggtttagatggatatgttataaataattagtattttaattaattttaaaaaaatattaacaattattattgtatgtattctttaaatagatttaattttcttctcaattaattattataaattagaaaaatattgaaaaaaatgagaaaaaaataaattag

SEQ ID NO: 44992 - DNA, 6755 bp, Cannabis sativa
ttgcagttaaaattctgcatagtccacgagtcaatcttattcagattattctgatacaaattagggttttttctcttaaagattttttcgttcgtttttcagtacattctgaccctatttatagtaacatatggtgccagttaattataatcagatacaaatcctataacaatatttcactaaaattgtgggccttaattacgcaccacgtaaataaatgcggttattttttgaaaatcatacaactgtgatttatccgcatttaatgggtcaatgctgacatggatttagatacgctgcaaagtgtatcttgctggggcatctcactaggagcttttaatagcaacaataatcctggcagcgagctggagcttttcccatgtctctccgaggttgataatgtaaatttcgttgtttctacaatggaagacatgacactccatatgacaatcgctgttccttgcgacaaggtgaacttcagtagctaacatcatttgaatgtcaacttctttctaagagagctgacttgatagagcagtggatctccttaaagatgtttggagcttattagtgaaggtaacaggagtatgccttcctatagcgagatggatgcctcgctatccgtcactcagattcttccagttgttatacttagtgaatataatgtatattatacgctaagtgttctaacagccaacatgtctcgtcatcacctttttataggtagcgaggttgatacctcgctatgccttactgatgtcatccttatgattgtgtcttctaacgcgaaatagtttctcgtcaatacgtgaattaatattcgtacatccttgtctcgctttagactatatagctagcgagttatagatatgatctattaactctgtatttaatgagttattccatttaatattctttaatataattgccattatattcgttgatttgtattctccaaggttgacagccgtcttcctctgaagttcttgccgaattttgggtataacaattgccccttaaaaagtacttttcagtgaaaagtgctttttaaatgaatactgagggtatttttgtcataatctattttgaaaaaatgcatgtcctctgatttgggcagttttgttgttcgaggcacatcagcatttaataactatcttttccacttccttttaatttttacccgttggatcaattatctccttaatttgacgaagatcaacccaatggtataaaacgaaaaaacgaacaatcttttcatcatctttgccatttcaaaaattttctcgagcttttctgcaaaaactcacctagattttttgaagctttacatgccatctttgtctttgacgtacttcttgcgagttttgttagattttcttttcgacctcaagcattcagagagatcatcacaccgttcgttgtaccgtcgattgcaggaccattcatcgcgcctaaaattgatttcaaatagtaagtgattgttctttctctatcttcttacatgctttttatttcccacttctgggttttatcactagtttcttagttggcacttttgtcacctcatttggttttagctattttaggctaattttttttgggaaatgtttagggtttaggcaggacgtaggtttttgggtttctcaaatttaccaacttctggtttgataaatttcattcaggaattgggattgctttctttttttaataatgtcccaatttggttcagaagtttatcgtccagaaactttagaaacagagtgccccaatgaacttgccatcccgtataaacccagtaattcaaaactcaaattcaaattagagatcaatgatgcaaaaattagagaccacttggtaaaaccccaccaagatgatattgctagtccccacagacacttcttgcaagaaattatagaaggaaaatgtcatttcttgcgagacgttgcttggcctgagccccccagtctatcatatattcctttggctaggcctttatttttacccaaagtcacgattacttttgaaccaggtgacctgaactttggaatcatgacttccaagcctcaaaaatcaaagactccacatgacccaaatgtcaccttcgagactgaactaatagagtcgaaggttcgagccaatggagactacgtaggtaccatcctaaagacatgtggtatcgtgtacaagagaaactgttgggttaggtcagtagctactggtgagtttagttgttacccactagaacgacttactcgcgaagcatctaaggggaccagtggcgaggccagtacgagtggctcgacaagggtaggagcttggagcctcgaacacataagggttgaagtaattatcccctgcgagactactacaaggacttcctaaaccatctcgaaatcgccccattctagatggttcttatttcatacaaaatcctcttaagtttgaaggttctatacaaaattttgaactaggagtaccccacatctttggaaatagaatacctctactcagtgaaggcagtccatgcgaggaagaatgctgcagggggtttttattatctcgagactcacacaggcgattgtaagatcattgttgtgttaccaaacaagactccattcaaagaggactttgtctggacaactagtctttagccaatcgacacaaccaccttcttcatgataggtaagtgattacttgcccaagacttggttaaattattccatgtcttgaattctagctttgttgattttaattttgcttctgttttcgacagctgttaaggcagattttcgttaactaaatttgagcctcactgtagtaattttactcagaaaaataagagctataaaaataaagataagaacacaaggttttttacgtggtttttgcagttaaaattctgcatagtccacgagtcaatcttattaacaattctgattatttttcaggatttctcctctatgagttttttccgtcccactttttcaacttgtctgccactatttataattacatagtgtgcagtaaattacaaacgttgatagtaatctttacaacaattattccctcaaatcatgggatttgattacaaattatgctaagtaaatgcggttttatttataatccacactactgtgagtatcccgtttttattgggccgagatgaatgcatatttaaggatatacggtaagccttttatcatggagatgcctcgctaggaatgaaactgagttaagtctaatggcgagctctgtctcatcatatgacttcccaaaattaatattgctgataactacattttctggtgccgagatgatctttctcgcatgcatgccatcctttagcgagatagacgcctcgctgtttgtcatcttgattcaccaaattttttatacttagtttgtataccatgtagtatatgctaagtgtttttatcgttatcgtttctcttccatgcgacgaggttgaagccttgtcatgcacacttgcactcacatggtttctcgtcgatacataagttagcagtttgtacatttttatcttccagaagactgtttagctagccgagttataaacatactctagaaattatgtttctaacaagttgttccatgccaagtgtacttacgatttcgtgtttgagttcttcgttcttcccagctcaaaacgtatcctcttccaatgtgcttaccgaattttaggtataacaacagctgtctcgaagagaccaaccccaactctcgagatggctgagcgacgcaggctcttacttggtcctccatacagtctccgatcggatgagttcctcttgaacgaggttaacttgaggtccgtggatcagctcactgagaaggagtttacttgtgattacaaatatcccaagtattcttcttggcaacaggttccagtcctagccaatgaggaatctcaggattatgtggctcgggcacactacctctgaaatgcagtccctcgggaagccgaagaaagagcatcccgaggtaatcaatgtggttggtcacccatagtgcttagggccgagcgtactactttagtgtattttcaggatagtcgttataatttctacacctggaatcccatcctcatagatcgcatttcaaataggtttgatagtttgagttccctacaaaatcaaccatctcgtataaacccaaccattcaaaaccaacctccaaattagagttgaacgtttctagggttagggaacacatagtgagaacccaacaggaagatattgctagtcgctgcaggcatttcttgcaagaaatcttcgaaggcaaatgctgatatttgcgagaagcagccgtgtcagaaccctccagcgtgtcctatattcctgtggaaaaacctttcttttttacccaacgtaacgattgcttttgaaccaggtgacttggatttcgaaattatgcctcctaaaccacatacctcaaagactccccaggaccccaatggcacctttgaggctgagttgatagaatcgaaggtgcagtctctctcaggctacacgggcgagatgctaaagatctacggaatcgagcttgggcaatcattccaagttagataagtacgagagggtgagttcagttgtaacccccctgcacgcttcgcaagcagtaactcagggaccaatggtgagactagtaccagtggttcgacgagtatgggcgcctggagcctttagcatatcactgtaggggccacgcttcctcttcgttactacttcaaggactatataaaacacatcggagttgccccattccatttgaatcccatcttttacaggatcctcgctagtttgaaagtcttatacaaaattctgaactggggttgtcccacaccagtggagattgagtacctttactcagttaaggtcgttccgtcaaggaagaatgccacaaggggatttttctatctcagtactcattctagcgagcctaaaattattgtagacttgccaaataaagtatccttcaagaaccacttcttctggatgtctggtctttcccccatcggcatcaccacatttcgtgaacttcgtaagtgattgttctcttcttgctcatttacatcaatctttgttttttatgaccaatgttttgtctgttttgacagctctattgacgaggcctactcctacccccgagatggttagtaggcacgggtgcctgttaactcttccctatggtcttcggtcatgcagcttccttttgagcgaggctaacctgcaatcggtgggccttctttctaatttggaatatacttgtgattacaaaatgcccaagtattcttcttggcaacagattaccgttctgcccgaggaccaagcttgagatcgattggctcaagcaaaataccttcaaaacactgcccctcgggaatccgctgaaggagcatcccgaggaaatcaatgtagttggtctcctactgtagttagggctgaacgtaatacattagtaaccttccaagactcccgccttaatttttatatttagaattcccttctcgtggactgcattgctcataagtttgacagctggtatcctagattcgacgtccagagtaactgtaacgaggcatataatggtatagctgagtaatacggtactatggaagatagggtaggtcacatagatgagagctgggatttagaaccgatcaagccttttgatatattcaaaattacaggctgtagggattttagcggctattatggtccctctaccccttcatctagtgatagctcgccttctagtgactttggtaaatcccgtaggtggaaaattatattcctcccgttttcattggcctttttaataactataacagcttgtcttgttttgcatacatgggttatgaagatatcatggaccagaaggggaagaaaaggacaaccaaccctggagtccctactgctgccaaagtggatcctcttaagaggtaaaggaaaatcactggccgagcccatcaatcttgaggtttttgtcaatgagatccaagaacaagttcctcttccagtcgtttccgatgtcaatgctcctcgtcccgaggcaacctccgctactgcttctttgagcaaggccattgagaccttgtcggccgcaacaggggaggctaggtttgaatttgcccaagcatatggagtcgcatgttggcgcaaacttcaaactcttcttccccttgatcgagatttcctaaatcttaggagtccaaaagagatgcttccaaggagcttggattgtcacttcatggtatgttggctttgttattataattatattattctttttatacctatttcatattcatctatttgcaattcttcaggcttcttttgcttcttttgcttccaatccactactctctgagcggcttgaatacttggagggcgaggtccacaagttattatcccaaggcaaggttatgagtaagcaccaggacgacgcccaataggaaaatacccgccttaagcaagaagccaagaaagcgaaggaggaagtcgagaaggtaacaaaggaaggcaagaaggtaaaagaggaagccgagaaggaaaaataggaggccgagaaggcaaaagaggaggcttagaagattgtcaaagcccaagccgatgagtttgagaagaagcttgctaaaaaagaagtcatggtcgtagaacgaggggacaaggttggtttttgcactgtatatcgggccaggatggcgaacactaatatggacaccagcttcttgg

SEQ ID NO: 44993 - DNA, 2003 bp, Cannabis sativa
gaagcataatgctaaaatttgggagaaatgggactgtctgcagtgaaattccattttggctgtacttctttgcctatgttgttatctttcatggtgcttatattatgttgttctgttctgttcttttctcataatttcttaaatgtgagacattacaataaaaaaagaggaaatttttagtttcatggtctctatacataaataaacaccatataaatatattcttttcacataatttcttgttaatggaaaagttacgaagtagaattgtagatatctacattttttctgtgaaaatcataatatattttactttggtcttagcccattgtttgtcacttggaaaaaagctgtaaatggtggggacctcgtctacgtggatgcattggaaccctggaagcacggtggttggttaatgggttcaaggattatgctctaaacaggtatcgtaaaaaaaaaatgaatttcatgtattgttctaatggtcacaagccaaatcatgtaaattcatctgcttgtatgtttactgtatctttaggtatttgagaactatacctcacacacaaaatggtagaaagaaacaatagccgagttacctcaattctgtattgttttaggaaaatgtacattcttgctgaaatgaaagacatgaatcgacagggacaacatgcatgggatatttagaccaagattcttataatcttcttactgtcaacatgcagtttctgttttgactgatgatgttcttagctttactttgttgtgatactttgcagtgctttgagggatcgtagatttcctcccatacatgccaaagaattgccctctttggagtgtacagtttctgtattgactgattatgaaaccggtgacaaccatcttgattgggaggtatgtgtctcttcattttggatgttaccatgttcttactccagaaactttttaaaaaaactttaaatttaatttctatttaaatcttttggcagtaatatgtgatttgtgtactttagtatatgttcaaacatttaattcctactgctatatatttgaatgtaagaactttagtcctttgatgggtttggttattctgtggtgattggatcaatctctttattcaatatgagattagcatgctcacataatatactgacacatatttattcaatataattccatggtacgggagatacgatttctaatgaaatccttagttttagcattacttttgcttaattcagttttgtatatggtgaaggcccttttcggtagcttatataagtgtttttttagaccagggccaataatgtttgatggatatttgagtaaagcttaatctctataagctttttcgtactggtttagcatcttaatcaaatcaataacagtttcaatctgcttggatataaccttttactgattttggtttgttctataaacgcgaagcaaactcttatgttatgttcagatgtcatgtttttctttcttattctaaactaactatatgtgattgttttaaacagaactaccatgggagaacgcttcaaggcgccttgacttgttttgctgagcccaaatcaatgctgatcgatccattgcaaaaatatcccagtcaaaggaaaagcaacaaaagaagttgagttgattgcggaaacaagaacaagagtctgaaacttaagagcttgcagtatggcatttgtattgtatgtgccgttttgtacaggatcattaaagaaaaaaatgcaagtgcaacaatgttgtctctgccaacaaaactcatggctaatggattataggtatacatatttactatatttgtgtaattaattattatgctatgtatgtataaaactcttgatagctctatcataagaaaaaagattaaacaacagacataaacacaaacacacacacccacacacattcattaactactaagtagaaaaatggattttaacaagttaataattttgtctactctcaaattctattgcactgtttttttt

SEQ ID NO: 44994 - DNA, 1251 bp, Cannabis sativa
atttactacgtggcaagcatgcaagaaagaagtgggttcttttcacgttaataataataattaatataaatggctatatatatatagataaccaaaattagcgtcaaaccattattattacatacataatttcatcacactaaaatattttaggctgaaaatggcaccaagaaaatccaacaacataacaccaaagtcctcaaaccaagtctcatcaacttattcttgttcgagtaacaaagggcgagtcatgaaggactcgactcagctccactcagcaacaaagtcgattgtgaagagtgacaagggcaaagccacaacaagtttcaagaagagtttcactgctgatgagtttgtcgacaagaccactggtcgtttagggtttaaggaagaggctagttttactcgtacggacaagtacaacaacaaaaatgatgggtttgctcatgagtttgaaactcaagtcaattcaaacatgttgcttaccctaataataataaacctagtactactacgaaggcagataacaacaactatcagatcacttattatgatgattattactactgctagaattactttatatatctagggtttcttctttttggctatatatatgtttatccttttaatgttgaaaatgttatctaatattgtattgttttatcttttcgtgaagaaacctagctatcttaattatgtatgtatgtatggtttatttgtggttttttttttttcttgtgatatatatatttatatatagctgatatatttggctatttttgtgtttcgtaagatatattatcgcacttaattattatgatcattgaaataataatgatatttgtctcacccaataaattatttaagaatatatatttatataatataaaatgataaatattattgaattttatgccaaatgaatcaatgatcgatatatatatataggatatatattaattactcatacttttttttattaattattgttttatttgatttttattcaaatatatattttctcgaacaatcccatgtttttttgtaacaaacaaacaatcccattttaaatatttaatatgcaatatcgatcgacagaaaaattaatattaattaatttgaaggataaattaatacagtaattttgtgtgtagaacgaacgataactttaaaaaaatgatagaaatttattaaactattttttatttaaaataaaatataagactaataatataaataaaatagttt

SEQ ID NO: 44995 - DNA, 2187 bp, Cannabis sativa
tttgaacagtgatcagcaattatttatatctataaataaatatatattattatatcaactagctagttatgttgtgttaactctagctagcttgtatatatatgtaataaacatttatttatatatattatcttgagttcagtgtttctgttagaagggatataaagttgtcaaaatgaaaaaggaaaccaaaaggggaacaacaaaagtagtaaagaaaattggctaattccagcgtcagcttgctcttaaaattaataaactatataaatattacatacacactatttataaattatatatatatatatctacataacatatagtttcacaactaataatactatatatcaccattaaaaaaaaatactatatatcataattaatttatgctccaatggacttaatcaggattagcaaggaaagtccaccccactaatacttcactcacacatatatacatgatgtacaaatatataaatatctttgtacatatacatgataaatccatcacaaacattatcaattaaactatactacttctatatcttcaactttgatttataggtattcatcaagagtaaaaaatttatcaccaaatgtacttctcctattaatgttttttaattactagaaatttttggtctgcgtagattgatcagttaaagttaaatacagcatgatgcatgcatatgtatatatactaatattcagtatatatgtatatatatatatagaaagctattaatatagatataatttggcaattagtcaatggatggatatatatgtgatatgggcaagttcttggcgtgaagaattatttttggtgggcggggttgtgagcggcacgtaaggactataaattaaggacttaaaatataaagaaattaattaagccaaaaaaaagtacccttaaactctacatatatataataacaacaatagggaataaatataagaaagcaaagtatatatatctgatcatgggttcctctttctttaggtcacctttctctagctatatatacgtagtgcatcataatcatatatatatatatatatatatatattgtaggagagaagaagaactagcttggaagaaactgctagcgaagtgtacatggtcaagtattctaagtaggaaattattattatgttaccgaccttacaatataaaaaaaaaatagtataaaaatatgatggtattattattattaatattaatattattatgtattatacaccatttgcctcacaagtcatctatgagagtggagacagagaggtttatttgtacgtagcttctcagccactcaatataggagcatgtttgttgcaactaagcaaccccaataccactctaaactaatttattattattaattatacattcaaaatatatatatggatgaatatgactgaccttaattaaacataactatatttattattactttttctgttatttatattgaatattatgacttagcttaatttaaaatggatgttcaataatattgtgtagagtgtcaaagttataattcttaaaaaaataatgcttatatatattattcaacaaggaattgatgaatttcctagagaaaattcaaatcacaaatactaaaaactgtaggaattatagaaaagaaaaatccaaattatggtccatgttaatattagagaggtatatatatggccacgcttacttaagcttttctccattttattcctttatagaataagtatataattatttacatcttttgtcatgtatatatatgtgtgcatatatatggtactttttaaaaagtgtgaagctaattaatttataaggtctccaactgtcactcttaaatacagtagacttgcttgatcagtcatgttcctacaaattttatatttaattagcataataataattttacagcaaataatgttttttttttttttaaatcaataataaaatgtagaaagagaaagatatagaggggtcgctgcttagtgctgcttagtgtataagctgactttgtaagtaataatagtgaagtaagataaaatattacacatatggtatggttctggaagaaacccaaaaaacaaaaatgaaattagcatcacaagtggggacctgtactgttaattagagttaagtcaccaaaaattaaattaattatgtatatatat

SEQ ID NO: 44996 - DNA, 880 bp, Cannabis sativa
catttatacatttggattttggagaatgatttttctcttgtttttttcagtaccgatttatgcccttttcttttaaactaaaatggctattttgtttgatacactaaaatctatgtttttacgagcaaaatattttcatttggattgttcagaaaaaacaaatatatatttccatttggtatgaagcattattagaataggaaagaataaaaaaaatatatatattactaggttttgtcaaaaacaaaaataataaataaataaaatattactaagtggcaaaacaaaatacacgtgtaaaatgtaaggctgttcttgtttgacacgaagcacacaaatgagtatatacgtgcctatgcaacatcgttgacttgtaagttttcattattacctcgtctaatcctaaattaataaaatatcaaagtactcataatttgcactcattaatttaagttgaatttttaaaaatatttttttgactttcttaaatgttttatttattatttacagcataaaatttttatttgtaaaaatataattataaagtttaaaaatgataaaaatgtatttaatttagaaaaagtgagaataactgaaaaaaaaaaaaaaaattaaactcaagaaaattataaatcaataataaataaactataaaattacaaaatataattagaaaaataactttattttaattataatgcatatatttaaataaattataaaacaataaaaaaaaaatattattttcactaaaaatattgtcttataaataaaagagagactaattagtaatttttctcttcgaattttgacatgtactaaattgtgttccctaaacttttttagccgttaaaaattcccctgaagtattgagattgtt

SEQ ID NO: 44997 - DNA, 2138 bp, Cannabis sativa
aaataatcttttgttcccaattctctatccctaccctgtctaaccataatttggaaccaaaaaactatagcaagtgctcaatggaccaaaccgcatgtttcaccattcgagctatcccttttgggttagtttggataaagctattgaagaaaagtaaatgtgttttacactattgatacacaatcatataaggattttagtagttttttctgttatataaaggcctttggcgcttgctgttatgtttcttcttggtcttgcaacctagcaatggcatgtgtcaccagcttgcaaataattgatgttggccgacgagaccaaaagagaagtatggtactcacaaagttgtgttaacaatgaatttgctgccattcaacgttgcttattcatggaaaaaaattgcgctataattgctgggtgtgctatgcatcaatcttcaaattgatatgtagccgttaggcaattatctctaagagttatattgctaatatatattgctttcctaaaccaaaagtttcttctcaaatttgggtagccttttttcaccaaattataatagcacattacaaacctatgttattttattagggttatgtctttgagaaatttgaatccttaatagttgcagtataacatgtttaacttctgtgaacttttcataaatgattattttctgttctagtttgagaaagctttaattttccaaatattgtttcctctaatatttttattatttagatactttggtttgtatgaatattctattaaatataaattccttatctctagtctttcttatctctgcttactacagtatcgacaaatgagacggaaagagcaagacaggcttgctcggatggatgtagattaccaacgaaggaaagaagaggcggaattcatcatgcgaagggaggaaagattgaaagctgctgaagaacgaacagcaaaaagacgtttaaaacgtcagaagaaaaagcaaaggaaaagggagaagaagagcatcacaaatgcagatggggaaaagaataagaaagaagaatcttcagaaggagaagaggagtccgataatgaaggaccgaaatgaacagtttgtatccaatactaagttttatgtcttcaaattttctttcaaacttaagatgtagcatatttgtagcaagaagaacaacaaattcatttgatgttctggatttttgtagtctaaattctttgaccccttcttctttaggatgaaaaaagaagaagaaattcttgttcttttttgcagccaaaaaaaacaccacaaacgcagttttatactcttctccacttttatctattaatgtaacaacattcttatcttcctaaagaatgaaacagacatctaattaccagaagctagcaatgatattgtaagtgcaaaagctataatccttacaaaaaaaccaaaatccaaacccaaacctcctccttctttcctatccgaattactctccactttctccattattatatatatatattattctctctctctgtatgtgtgtttattatataggaggaagatggagctagaaaagatagtagctagagaatatatatatgtacatatacttttgagtgatcgaggaatgagaaagggtttaaatatatatatagagaggtgttgaattaatgtagctaattattagtgatgacaaatacagttaaggctgattttttagagcccgaatgcttaaaagtgtctaattacgagttcactagctcagtcaagaccatcgttgatgtcatacaacaactcacttctattttctctcagtttggaaatacctttggcgattctcgcgtttccaatgccgtttctgattgcctagatttacttgacgcctctgctgagcaactcagttggacagtctctgctactcaaaatcctaaaggtatttttcaccttgttaataaaaataaaaaaaaaagaccataaaaatagtcactctctcactaatccccataataatctctcaaacgaagtttcctttcctccctagatagttcagctttatctttcttactctgtttttgtactttgtctttgtttttttcgcttatagccaaaaacccttttctttaatgcaaatctctcaatctaaatttataacatt

SEQ ID NO: 44998 - DNA, 2576 bp, Cannabis sativa
  modified_base (34)..(68): a, c, t, g, unknown or other
tgtttatttcagtgttttagaattcatattaggnnnnnnnnnnnnnnnnnnnnnnnnnnnnnnnnnnncctggtaaaatatatccaacaggacccccattccctcttttcatattagaacatatatccttaaagcttgaaaaatcaaaagaacaaagagaggaaagtttaccgttgattagaatcacttaaaccttgctatattccccctgaattgcagaaaacaacttgctttactctaaaaccctagctgaaccgaagcaagaagaaggagaggccaaacctcaattttctaactttctttcttttactaatttctccactaacttaggttattactatgcacttaattcatcaaataaaacaatggccagctgcccaaaagaaagggtgccacctagccaagccttcaaaaagactaaaataccctcactaaggtttttaaatggcaaagtcgcataagggtaaaatagtccaaaaccataaccccgccaaaccccgacatttaaatgtctatctaaatttccccatatttctaaaatactaaaccataaaaaaagtgaatctatcgaccaaacgttgcgttccactgttaccggacataaaatataaaagatatgaaatttcacatgtgacataaatagcacacctaaaatttaaatttatctccataattacgtaaatcaaaattaaaagtccatttacgaaaattaaacactaattatctgataattcttatattaaagttaatcattacacatattattaaatatatatgtagaaaaatttaatacaattttattgttcaattaccattaaacaaaaaaaaaaatataactttttctatatacaatttgaaattttaaaaaataattgcatgtgaaccgtgagctgtttactagtccatatctatatatatataaatgagagatatgatgcggtaatatgacagtctaaaatctctctaattaatattatttattcactcttttaaatttataaatattagttgattaattaaaaaaaatatgctacaactatcaatctatatatatatatattcttattgtaaaaatattatatatattcttatttaaaaaaaaaatcacagaaaaaatatatactaatcttttaaaaatatatatttcattcacctacaatcaattatattattatgtcaaaaaattaaaataaaaaataaattttctacaatttaaaaaaatatttataatttatactaataaatcattatctgtttatttattttttaattaataagttaaaaaatatatatttatgtgtgtatattatatatatcataagccattaagatctaaccatcatctcatagcctacaaggtcattttcgatttcaaactttttttttattattgtgttctcaattgtttttaaacttttattttattgttttgttctcaattgtaaatacggtgatgacaacgactttcaatatagtagtgattacaagtgagatatagtgataacatcggttttaaatatatgtagtagcaactacaagtgagatacagtgagaacaacgattttgaaattattatgagttttctataaatttattagtaattttttaaatcttatttttttcatatatattatatgaaaaaaaaatatcaaaatttgatatttaatgtagttttaaaaattaattgtcgctaaaataaatacaaccgcacgagaagcgtgatttgtttcctaatttcattataaattagagaatgaggttaaaatttgaaatctttgaagaggtgtcgtaattactcgcttataaattaatacctttccttccaaaaaaaaaaaaagaaaaaatcatcaatatatataaaagtaaagtatgaagcggtgacgtggcggtctacaattcttctaaacacatctatttattttcttattttttttaattttttattcatactttttttaaactattaattaataataataaagattttaaaatttataacttttaaaactaaaatacattcaatctaaaacaacttataaatctatctatgtaattattattttattttaatataagtaagaattaataatctaaacctaaaatgtatttgcatcttctttagtggctctttatttttttttactctcttttttcctgattgttaatctttctcatgcgctcataaatatattttttgataataattttaattatgtatacaatgatgttagagtgatgcataaaaatcgtatgattttattttataatatatgctacttttattttttttattttatgtattactttttgttcattaactctcaatatgccaacatgcatactttcactttgctcttaatttttttgtagatagtgtgatttctttgctttattatatttgtaacatattattattttatgtattattcataagttaatctttttttttttgagaaaattataaaataatctcttatttttattattgttgaccgagattttcggcaaccagtttaataatatatgtaagaaagctgtaggaagtttaatgcatgagatttttacgtggttggggc

SEQ ID NO: 44999 - DNA, 764 bp, Cannabis sativa
tgggccatgcttagtttgggcctgttggataaaacgacgtcgtgggttttcatgatctcgcgtgcgccgtcggctgaggagaccaccagtacgggcctggacccgaagtggagtagcatgagtgggccgtattgttgggccaacttttggagggtgcggtgtggatagaggcccaattggtggaggttgcctagaatcgggagtcttagtggtgatggtggtaagtttttgtgtgtagtgtttgataaattgaagatcaaccgtttgatcagaaaaattatgaaaatgatagtgatgatgatcggaacaagaaaggaagagagaaatgaagagtttgacatggtgtgagtgtgtatatatctgtgagaatatgtgtatactatattgatttatggttatataggagagagtatagactgatcttactaaacaaaatttataatttttgtttttaaggaaaaattgtagtttatttctgtcaaatgtttgagaattaaatacactatttagattgagaaatgctaaaggatatgtggtcctagcacccttctatgtatcagtatcgttattggtcgaactaagtatcgggtctcatataatttaatataatagtttttaagaagtattgctaactaatcaaaacgtgacatgtcaagaagatactaaacactactggtgctttataacaatgctcatttagattgtgctaaaataacactgacaaatattatatgagaacaaacggtcaaactttaaggaataaa

SEQ ID NO: 45000 - DNA, 2601 bp, Cannabis sativa
ttgggaaattccaaattcctgactaatctcgacattcccaatgtctaactatattgccccactataataaaatactaagatgtgattcaactaagccatacaccgcgttcctttgttaccgaacactgaacatgcaaaaatataaaatttctatatatgacatataaaatgcattctgaattcaaataaatcatcatatattaataatttagaattaataactaattttcataagtaaaccctaataatctgctaatttccaaatttaagctaagcggtctttacacttctgttctgatcgcaacagttgagggcaattcctttttaaatggcctactaccccacactggaagcagaccctagcttgaaacttgccctgattgtgcctcttgcaccttggaaatttgggataggtctaccaattctcgtttccaccacggtggaaaccttgattactctgaaacctcttattcggttatgtagctgatgaatcgggtcttttcttatagtcacctaggtcatttcccctatcagaatcaacactagactttttccgcaaatctcttcttacactatttctcttatgtatctggtctttgccaccctcagcaacaagggccaactccactatctgtgcagaagtccgtacaaacccaggttgtttagcaacgaccaccacgtctcatgaaatgtattcattcaacccccaaataaatttagcctttctagcagccttagtagccacttcattggaaccaaagttttctagtcgatcgaactcagtggcatactttgtcactgtcatactgcgttgagtcagtcgtataaactcttacgcttttgctgctcgaatagactcattataatatttctcgtagaatagtgcccggaaaacttctcaggtcatgctattcaagtcatgaccctgtgatacaatttcccaccagatgcgaacatcttcacgcaacatgtaaatggcacatctaacccgatcattattctagacccacatgaaattaaaaattattgttatcatattcatccgttgttcttccttgagtggatcagctccacctctcaaacattggtgggttctacttcctgaatcactcacaaaacaactctagacgatttcccacgtccagtggcactaccaaaggtgccgaaggatcaggattaaggtttggagcaggctgaacccgctgctccctcgactcttgaattttcttgccttgttgttggatagtctcttgtattgcatcatataattcctcctagtgtggtggtggtggaggattctcgccctcaccgccaaccccgagcctagaaagcttgcagttacccctaccggactgcctcgggtgcataatctatacatatgcagtcatattaccaagaaatgacaatactaataagtatttccatatatttactttcacaacaacctttactatgccacaatcaacatattccaaatgataagataatttacaaataagctaacaattaaaacttactgaactataagtcaaacgagtcttttgtaaccagtgtacatttcaaataagtctttaggatctttaaaccttggtcactctgataccatgttgtaacgccctatcccaaaggaacgtcacctgtgtgcttttacaaatacttgttttacaaattatataaatatataaaatgtgtgactaattaaaaatttataatcaaaataaaaacacaacttttataaaaggtaactgttaatatttacggggactccctgtttctaaaatatttaaatataggaccaaaacttttttttttacaaaataagtttatacttcaaaatacgttccaaatggaatatcttgtccactggactgtggcactacagctgatatctaccctactgcagagacctcagactcatggctgcccaactttaccttttcctttacctacaccatttagcacccgtgagtcacaaagactcagcaagaaaagtgattaactccataaacattattaaatccaattaatcataccttgacagcagaaacgcaaatataacacatcacacactaacatgcttatacaatttcatattgttaatcacacaatctcggtacctcattaagcacccttaccacttgttaatcacgagctttatatgtcactatcgttgcttgatatagcgaacaataaataagaaacctatatggggtttgatgagtaattactcataacgataatgaccatttccaatcctcaccactcgttatccacgagctacgtatgtcactatcgttgcctgatatagcgaacgataagtaagaaacctaaccataatttcaggagtagttactcatagcagtaatgaccatttccaaccctcactactcgttatccacgagctacgtatgtcactatcgttgttcgatacagtgaacgataagtaagaaacctaactgtagtttcaggagaagttactcataatgctaattgagcgtttctaacccccaggttcataactgaggcataacaaacacataaataggacctcaattataatcgagactatatgtaccgccctgtccaacagggacgccacgt

SEQ ID NO: 45001 - DNA, 829 bp, Cannabis sativa
tcatttaacaaaatacaaggtccaattagtaacttttgtaaaacagaaagtccaaaataatatttaccctagaatgaaaaatgtagaccaccaaaataaagttgctgctttgtttgaaaaaaaaaaaaaagttgcttcttctgatgggagttgcaccaataacgttgatgcaatgatagtagtttgtttgtactttgtataagtatatccaatctccatttaaggccgtgaaaaaattgatctctgttcatattttgacgccacatgtcataaatgtagtgacttggcggtgcaatctgatggtgcagttccaaaacttatctttgactttgaccaataatagcttaaagtactgctacaggtcaaatgtcctaggtcaccgagtaaaccaataggaaacgtatttgactaattagttacaccattattattttattgctaaccagttacaccattatttttaattattttgctgaatgtaaccaaattaactaaaagttcatcaacataattcatactataaaacagttacactataattgtgcctactccatatttcccatgttcatgccaacaaggataatcaatgttgcttcaatattatcaatctgatcttgttacaatgttattgatcctttcaactatatatcccagtatgggggataattttgtttcaagccacgtggaaaaagaaattgtcatcatattataggtgtttattgaacttagaaaatttttcatcatgcttgaatgcataaataaccttttaaatttttcatcatgcttgaatgcataaataaccttttaaatttttcatcatgcttgaatg

SEQ ID NO: 45002 - DNA, 3279 bp, Cannabis sativa
  modified_base (3179)..(3179): a, c, t, g, unknown or other
agtataggctgatattatagtaaatcatgctatagtcaagaacgttcgagaatcagttatatgtgttggacacgagtttcaaacttggtacttaggtgtatgggcgcctaattgcaagttagattatatgtttatattttatacttttcttattgagtctgtcgactcacatatattagatatgtttcatgtgtaggtaaaaggtcaggactaaacaacagtgaatattggagatcatttaagattgtacatatctgaatggtaagatttggagtgttcggatcttcgggacaatatatgttaaattttgttagtcattgggctacacttttgttatattgcattatgttcacatttgaaaaatagattttgggatcatgggttttgtgaatagtttgcatttaaaatgtaaatttatggaagtattttaattattataaagttttaattaaacatgattttatattaaatcctttgattactaaaagttagtacaataattaagaaaatacaataacatgcctaaactagtagggccctcgttatttcaggaagcagccaaatgacgtacccgtgtataagagttatgagtccgtagagaaaggatctaatgaaggcttaaagtttgtgcgttacaaaatggaccaggaaaaggaataatggtcccaaaatcaactccatggccgaattagaaatataggtccatagactttgatttttgctattttatttcatttaataaaatagttttatcgttttctaaatttatcatttatctaatctatttatatttttatctatttaataattataaaaaattaaatttaaatatatttattaatgtcttaatcaataaataaatcattatttctattttcttcttaaatttgtccaaacttagtgaaaaacaaagtattattttagatcagttaacttatttgagaattctaattaacttattaaatcaattaatcgagtctacaaggcagtattatctaagaaaatgtcaggactatggaccaatgaaatcaaactcctaataagtagatctgaagtttaccaattaaatgttctaacttattaatttctgctcaatccactatagattcaaaattacacttttaattacatagaacactctatataccaatacaaatacgttatgaattattcattatttcaatctaaatagtcaatgatcatctatagacgtattacatcaagtatggacaaatttattattttatctttcgacgtattttatccttaaaacacttaactccttataaatgatatttcggtaaactaatataattactgaaataagagctcttccatttatctcgtttagccaaactttatggaaactatcattttacttataaatagttatagaagctatagattccatagagtatccaagatgtaagtgtgggctagttctataggtaaacgggtaaaaacaagtcaaagaacctgtatagtataattaagctaaagcttaactatctcaagattgagatcaatcgacctaagatcaactataagtgacgttgacttagaaaagatacaatagtaagtttatgatatcttttctactatcaatatcagttcactacgatgtatagtcaatacattactttgctaataccttagaaaattctacttctccaagtgtaagcagaccacatcgttgattatcacgttagtgtaaatctagtgcactgataaatcgtgagactaaatagtttgaagcatataaataatataattatgattatttttcattgtgtagcaacatcataatcatgagtaaatatatgtttgagattttataaattttttatattaaacatataattatgaaagtaacatgtgaaccagacaatataaaatgaattgtgatatttttattaattagtaataaaattatattaaaataggttttattaagagcatcaaaccccaatactctcccccaactactgttcaggtgtcatggaagccaccaacctttggtgatctttaagttaaatgtggatgcagctgtggatgctaataagaaaataaatggagttggaactgttgttcggactcttacgacaaagttattgttgctatttctaatctattattggtaattttgcatcacataaaatggaggcaagacattttttcacattttaaattgaatccttcaaatacaattgccaattgctcatgtcgagacaaatgcattgttagtttcaaatgctttgcgagcacttttgtctgcaattttttcttttcaagttttaattgtagatatttttaatatatatcctatcttttttttcctattgtgaatattctatatgacaatcgtacaactaatatgtttgctcgcagattggcaaaatttatgttagagtggataaaacttactcttagttgaagaatatatccctctacttatatatattctattattgtaaatgacttattattttaatttataaaagtatgtatttctctaaaagaaaaaagtgacatttaataaaaaaaatctctaaattgtgaccaaaatattgttgaaaaaaaaaaaaaaaatagttcatttgctctttacaatatgtatagttcaaaatgttgtatctaattaatttatttttagtggttctatagttatcatttgctctattaagtgtattaaagatccattgtaattttttgaataaaagttatcatttgacattaaaaaaaatcataaaaaagcattcacatgcttttataatcaaataatatattatatatatcatcattaattgctctcaaaatattggcaccatcatttactatttacttaattagctagtcttggctgcctacccacgtaaatttcaatatatacttattacaattacaatagtattgttattgagtattggtacccaacaccttatatatatggtgtttgataattagttaataatatttttttaaaatattttcgtaaattatataatacttgatacttaattacactaataatgataatagtggtgtaacaccaaaaaaaaaatattagatatcaataatatttttttaacaattattatataagcattgttattaagtaccagtggtgtctagcactttctcgacatgttgcgttgcgattagctagcgatactccctanaagctattatattaaattatgtagaatccgatacttagttcaaccaataacaaactggtgcgctttagcatttttcttatcatatttatgaatgttgttc

SEQ ID NO: 45003 - DNA, 5611 bp, Cannabis sativa
  modified_base (564)..(595): a, c, t, g, unknown or other
agtattatttagggcataaaacccaacacagcttactcggtattttttcttacggatcacgagactactgactgtcacactactaataccattaaatttaacgaaatattcttatattcttaaatattttgttaaaccaacgaaaatcgttagatagacacattaatcactactcatagtgatttgtttataatctttagatctgaatctaatagttaatacaatgaacaaaaatattaaatacgataaattatttattcttttaaaaatatacaagaaataggtaacttgttggtgacttattgtatagatagtgatttttcttaaaatatatatttggttttaataattgattattcttagttttttttttttttctaaaccatgaatgattccaaaatttaatcattgaatattttagtgtcctttttttatactttttgaaaaaaaaaatactatttgaaaaaaaaaatactatttgctttatttattccaaacattatctatgtgatcatgacatattttatgcatatatgaaaatatatacataataataataataannnnnnnnnnnnnnnnnnnnnnnnnnnnnnnnataataataataattttttatctatttgcattatatcctttgatcaaaataaatcgatttctttgcccaaaaaattaaagaattaatatactcaatatcaagtccacaaataatattcttgacaaaaaaataaataaaattcacaaataatataaaaaaaattacaaaatatggccaaaattttgaaaaaaaaaaatttacaaaaatactttaacacgaattttttttactctttgaagttttttatttacaaaatacatcttcaataaaaataataaaccatttttttgttgttttataattgtattatagttgtcacgagattatttttttgttggtgtttctgagatgttgttttgatacttccaaggttatagaacttaaggatgaggtctcctatcccatttttgacaattttagagacaatgctcgaagaaaaattgacatttgaatgatgaaaaccaacgaaccaggttgattgtcaacctgggcgctgggccaagcaccaggtcaacctgggcgatgggctcagttttgatgcccttgtgattgtggttttatctccgagtttgcttgtattttcattatttttgatgatggagaaaaaatgctttgaacactttttcaggaaactaattcaaaatagcctaggttgataatttgtcaactagggcactgggcccagcaccaggtgtcaacttgggcgttgggtccaatttcaagccacctgaaaatttttcttggtccccaaaaatagttaaatcttaatctttagtgaaaatggagaatatgctaggaattatttttggaaaaaatcctcgaaattggttcgggttgaaaaaatgtcaacctgggtgttgggccagccttaggtgtcaacctaggcattggtcccttattctggcacccaggacgggctgcttcttccccaaaagtacttatttccccatttttgatgaagacaaagaagatgcacgagtcagatttttgatctgatgcttagaagtggtctgggttgatagattgtcaacttgggcgtaggggtgctcaggcaccgggtgtctggctgctcaaaaatgaaagttctctgaatctgattctaatgcctaaaatatgttcgtggtatgtctagtttatgttatgatgcaaaattcaacccatttgcactaagactattccaaaaactgaaaccctaattaaggttgtcaacctggacgttaggtgaaaccctaggtgtccaagttgatttttgaggtgttgattcgtgtattttttattcctggggcctggacttgaatgcttcatgtcttcatggtatagaatattgaaagatagtgagttaaaaacaacttggcaggatctaaacatccatttcagagttctcgaagtcaacctaggtgcagggctagggacccctctcaggtcaacttgctatgattcgagactactcaacttcaagatgtgttctttctttccatatgtcaaatattgatgtccacatcatcagggctacttttggtgtaaacacagacttctatcgtaatcatgatgaaaaaggtagctcaatttgatctaaaaatggatcaaatggatgtaaagacaacatttctccatggcaaacttgaattgcaaatatacatagaagaaccagatggctacaaaagtaacaaactagatcaggtatgtctattgcagaaatctctttatgggctcaagcaagtaagcccccagatagtggaatttaagattccatgggttcatgatttacattggatatacaaggagtgattatagtccatatgtgtactataataatgaaccaatcttgttattattatatgttgatgatattctcatcatagaaaagaaaagagatgcaatagactaattgaaaatgcaattaagctcagaatttgaaatgaaagatctaggggaggcaaagagaatacttggaatagatatcaaaagataaagagctgaaaaaatatcactatcttagaggaactacatatagaaaattattcacaaattttgtatcagtgaggcaaagcttgtcagcacccttttagcacaacattttaaattgatacaaggacacacacgtaagacagaagaagagaagatgtatatggatatagtaccctatgcatcatgcgtgggcagcctaatggactacatggtatgcactaggcttgacttggcctatgcactaagcatggtcaacatattcatttcagatccagggaaagagcattggtttgctgtgaaatgaatactaaggtatctaaaagggacaatagatgtaggacttatttacaacaagtcaaaagatgaaactaaagtgaatattattatgttatttctcactatgcataaagcagagacacaaggaaatcaattataggatatgctgtcacagttttaagttgatgtgttagctagaaatctaatctctaaaatgtggttgccctatcatcaactaaggctgattatatttctgcaacagaggccataaaaagaagcaatttggctcaagggtcttacaaaggaattggggttcaaatcaaatgaaataataatgaattgtgacaaataaagtgcactgcatttcatgagaaatctaatattccatgagaggtcaaaacacataaatatcaagctgcacttcatcagagatatcataacagaaaatgaagtgtctatgaagaaaattgggacaaaagagaacccaacaaacatgatgaccaagtatgtgagtttagctaagtttagactttatctaaacttgctaaacatcttcaagtgctagttaaggaataaagtccagtccaatcccaagtctctatggctaagtcctcacttaatgatcaaggggggataattgttatgtttggtcactaattaagggacatttcctaagctacctgtattaactgtctgttatgacagttagaaccagttccaaaccttataagctataaataactactcatttgtaattctaggcaccgatagggaatctcagagagggttagtgagctatttttgagagagaaaaagaaagaaatggaaggttacaatgacatagtgtgtatctcatcactatagccacaagtgaggataaattgtaattgatgcaaaacttctttgagtcttgagttcaagtattcattgagtgaattgattttaatgcaactatattcttagatcaataaagattctaaagccattggagttgttctggctggagagtaggcttgtgatgtaaacttcatcatcttgttcaaacttggttaagatttggtgttctgttttacgtctcatgtattttgttaaattcagttcatctttttctttttagcattgcacttgttctaattcacattgcatggtcttgtgtttttatgaatcacaacactaactaattaaaagaatataaactttcgtagcatatgatttgaacggtactactacttgttgccttgtacctttacacaataaaaattgctaataacattttaggttggccgatatcacgataaatattatataatttttagtgtaatttaatatggaatcctaaatatattttaatactaacctttatttaattttaagtaagtactattttaaatcttgtattttataaaagttactaatttgactctctattttattaaatgataaaataaactctgtattttttaaaattgtactaataagatcctgaactgattttttgtcgaaataaaacttaataataatctgatgatgttatgataaaaatggttattctgtatctattcgtgttaaaaattattgttattctgtatctattcgtgttaaaaattgattatatttaaaaataaaattgttaaaaattgagcttagagtcttatttttattattttaaaaaatataaagttcattttatcatttaataaaatagaaaatctaattagtaatttttgtaaaagacaagttatttatttatttcttttttggaaagaagcaaaacacaagttcaacaatcgtatttatccattaatcttggttgacaattgtcctgtttgtagagtatttatttatttatttattttttttgtcttttttcctttttgagaaattttatcttattatgtgagaaaatgataagagatttgattcacgaaataatatcccacaactgctatcccaaccaactctttgtcacttaaataatcacaactttcatacattacataatacatactgtaaaacccataattatttataatcatggctttcttatcttcatactctccactatcccttcccaccctccattcttcctcatcttcttcagctccgagactactcctcacttcttctccgacattaacgccattaaatcactacttcccaacctcccaacccctcaccgccatccacacgccgttaactactacttctgatccccacaagtggagaaccaatgtctcattcttttcttcactcttgcccaaaaaaggcaaagacgctacagagctcaaggaagagcttctcgaggccattgcccctcttgatcgtggcgcagaggccaccccagaagaccaggagagaattgatcaggtttcttattatttttttttatacttaacttttgggttttattgatttttcacctttgaaatgaattgcattacttaaaatgtatggagtaattgtatggtgtgtgtgtgtgactgtgtgttgaggaatggaaatattgttcatgtttgaattttgtatctgattgggggctttaaggatatttagattgccaacataagtgttagtaagcaaaagcatacattatatttttggaggataattgttttgtatggatgataatcattaaatctcttgtgtgattttttttatgatattaaataattaggattgacctatacaaaattataaaaggctgcatatggttctggggtcctataggcctctttgatgccccatatactattattgtataacatcttttat

SEQ ID NO: 45004 - DNA, 2000 bp, Cannabis sativa
atttatcataatcagaatcactaacatccgtgtttaaaaattcccatccaccatcttctatgaactgctcaggatcatcaatattggttttcagtataggacgccatctgagatttaatctactttcataatacttaagatcagttgtgttaagccattctttgatgccatccaaagatgttgaaggaatagaatcaattataaatacacctagcttgaaatctttaaatattgcggtcgtatcgaaattcttctgcccaaggccacctctctcgagattgactgtttcaatctcggtaagagtgattaccacaaatggtatctctatcagctcaaccaagcagcttgaagttgtgactatgaaagctgaggccttgtgaggtactccatgaaagccaagctctctcggttgtccccacaaatcattaactttgttcacaaagttttggaggtccatattagttttgttttttcaagccctctcccgttgctcttcctcgatctcatctagatcataggcgaatctcttcccacctcttaaagtttggaccttattcatcacctatgcatagaattgcacatcttttgtctttttgtttcccaccataatatgattatgtaaataaaaatacaactgagtgatcaattccttctctgctagctggaaaaaggcatgtttaatgttgccaaacataacatctactttttcatttgcccttgaagtagaataacgcaaatcattggtatgggcttcaagagacctataggagctgttggagctgtttggtatgcatgttttattttatgggaataggtttatcatgacttagagagtgatgaagggaatgataaacttagaaaagcaacattaccgtgtttggttgacattggaatggaatgtgacaattttatttttatataataataataattttttttttataaaatactaataattcaatattttaagtattcaaaataatttttatttattattttttcatataattttataaaaaaattaacaataataaataattataaagagtaaatttatatacaaattaataatatattttataaaataaaatatataaaaaaaataaggaaaatacttcatatatcattttttaatttgggggaattacttcatgtattaaatatttatatatatatatattagtattcatatataaaaaatttaaaatttaaaatgcaaaagtttgtgtctgcaaatagcattgaaaagtgaaaactacatttttattgggttttccttgccagccaaactaaagcccaccactttcacttagccaacattaaaatattaaaaacctaactaaacatagtaaactttcagattcccattcccacttctcccattaccgcatactagagcttcctaccatgatcaccaaaaggaggacgaatccataagcttaaattttgctcctacaagctgtagtctctcttgagtaactgaagttaccctttcagctttttttgactccctagaagcaacttgctgctggagggtcttagtttgttgtacaccttcatttatgtgtcttgggtccttggagcggaatgaaacttcttttagataaactgatccctgaaacttaagagaattagcgtcatggggattgaatggcgttctaggtacattgaatatagttttgacgtagtaattcctgttactagagttgtgcagaaatgattcaatctaatgagaaaccgactaatctaatatcaactgactgtcaaaaattagatatctaatcatgattaaattgaatcagatgatttgaaaaatccaatattagatcagttggttggatgacatgtaaatctaatgaatctaaccgatcaatccaatccaatagtcatctaataccatataatattaaaatagaaaatatatattataaatttataatattaaatatattatattttaaaaaccaaaataaaaaaaaaacaaaaaataaacgcatgag

SEQ ID NO: 45005 - DNA, 2099 bp, Cannabis sativa
aacaaaggtgtctcatttctgaaaattttttaattcttatactttctctcgtgtgctttttatatatttatatatatatcagatggttgggtgtaccttggaggattgcctaaaacagttcacggaggctgaacaagtagaaaattaccgctgttccagttgttggcatattgctggaattaggttcttaaccgctataggagcagatgaggtacctcccaactttgatcagttatttctcattgtcatcatgaaatgacataatcttgtctcaattcacttgattgcataatgtgatcttgtttaactattaaaaatagggggaaaaaaaaggaagaagaagctttattggtcaacccaacttgcttttggtggcctaaagttgactctaaagtttcttgcactttcttacatatattcattagtctgctctgctatgatgtaattgtatactttgttctttttttgcattgttttatagacaaagatcaagaaacttgggacatgctccgagcaagatttctgcgactgccgaaaatttcttcctcaagatacatttccatggtcaaataagttctctcatacgctgaagcaaataagcattgctcgttctcccaaggtatgtatctgtagtgatgttttatcttaagccagtgtcagcctaagaaatcagaagtccaaccaagacaacattattatgggggctctaatggaaataaatttttgtataggtatttataaagctgatcttaatctaatttattgataaattatattatttttataaattttgaggggccttggcctgctctacctatagatatacatccaatgtagctcttgtcatcagctggcatcatagacatgtgagatactggtgtgttgttgtgtggtattcagtggtttagggtggctgttggactattatgagtgtggaaggaatggttaaatctgtaaaggcttttactaataaggaaggtattttgtcccatttcaggacgccttagtatagactctgaatttttttttcgtcaaagtgattgattgtttcgatagaaaaaacttaaactagaatcgcataaaatactattagagcatagattgtttcttctggttaccttcatatgacctgacacccaagaaggggtagcacgcactgttaggctcgtgtgatttgctcccacaaggtctaggtttgagtctctcttgacatctacatagcagttattatggttttctaaatattataagattagacagggaaccctagtttcaaactttagccatgagagttttgaggatttctgggtgttaaaaaaacttggaacctttccaaccagcttattgaaacccaagttagattttcttattaagtttaggtacatcatttctggctaacaaacttgtaattaggtagtttttaagttccttatataaggttgccctaactgtttgattctgcttgcagattttgtgcattcatctcaagcgagtttcctttaatgtgtttggcgaaccctttaagcttcaggtaatgcaattttcagttgtcttggttcccaaacattttttccatgaaattcaggaaacatttgggatattttagtgcatgtgtgcatgggatattttagtgcattttttagaaaacatttggtcattgtatttgattgcaaagctttcaagtactctctgtcttaacagccaagtatttgtttgtaatgtgattttcaagttatgctgacttaatactcaatagcttttgaatttggttgcttaagcatctctctaggtttgcaatcctcatagatatccactaatccattaatcctcctcatatgtcttcatttatgttttatgcactacctcatatgtgctcggagtcaatgctattttcttgttttaatggtttccttattactgttgtagggtcacatatccttccccttgattttggatcttttctcattcatgaccagtggagtggcaataaaggctcaaaaagcaatttttcaaagagggaaaatgcaaccacatcataaacgaccaagttttcatactggaaattttaacatacgatatgatacaagaaatcttagtat

SEQ ID NO: 45006 - DNA, 3923 bp, Cannabis sativa
taaaaaaaacttctcattccaagcatgaagtagcttccaaatcttttccttgaagttactgaataattattttttattgttgcttgaataagcaggtataccgaggtaagattcatggcaatcacatattggcatatctaatgtttgactgaaaaaaagtctttgcctcatccttcatgttgagagaaaaagacctgattgacttttgcgtatttaacaattgtcctgacgctcggtgataaacatcaagaacatgtttgataaccaaggccgaatttaaattttctttacagaacaaaagactatcgttagcagataacaaatgcaagactgaaggggcatgtctagtaagctacaaaccattcaaatgtcccaaattttcttcatgattaagaagtcttgagaaaccctcaaaacatattaggaagagataaggagacaaaggatctccttgtctaaatcctcttgttggccaaacattacccacaacttctccatttaagagaaaagaaaagctgttagaggagagacatcgcatgattaatgaaatccatcgatggtcaaatcctatttttgtcatgacagcagataataatcccattccactctatcaaatacttttctcatgtccagtttgagagctgaataacctttgttaccttgtgttttatgctgaagatggtgtaccagcttaaagccaaccaagatgttatctgtgatcagtctgtttgaaagaaaagtgcttcgagtttccaaaataaccattgggaggacctccttgaatcgcaagaccaataccttggatatttgtttgtaaatgacattacaaagactgatagttctaaatttactaattgttgttggttttttgacttttgggataagagtgattaaagacttattcaagatgctcatgtcatggccttcatttaaaacaccaaagaccaccttagttacatccgtaccaatatgcttccaattatgttgataaaacatagctgacaacccatcatttcccaagcttttgtctggactcatcgaattaagtgcattgaagacatcatgttctataaatggcagcaaaagatactggtttaacccttctgttattgttgttggaatggtcagtagaacctgatctaatgcatttttgtctgagcctgtagccgtgaataaattaccaaagtagaagaaaatgatttcagtcaacccttcttttaatgttactgccacaccagctaggttttgcaaggagttgatggtattatttgactttcttaaagaggcataagcatgagaaaattttgtattttcatctccacattgtagccaatttatccttgacctttgttgccaataagtctcctcttgagcaagcaatttatccagaatgtcttcattttttttcaattctgccattgcagtagctgttctgacagttgcattatttaggctagcaacatctcttttagcctttgagattttatgcttcatgttgccatattttttttttgtcccattgttgaagagagttggtgcaaacctaaatattatgacaaaagttgtcaatagccaaacctgatagctttattccaagaattttgtatcagttgtgttgcttttggatcatcaaaccacatcttctcaaacctgaatcttgagtgtctaatgagaaatttattttggctagctaaagcagttacatctactgaaatttccctgtgatcagatgtaaagtagtccaggtgatgtgttgtaatctgctcaaaggtttcatcccatttgtcattgacaaaacaccactctagcctctcctttactgcatctacattatgccttcctgtaatccaagtgtacagatcaccttcgaaattttgttcataagggtacacctatcaagatcttttcgaaaaagatccatttgattctcattgcgcaatgcaccgccaagcttattgccatttgataaaatttcattgaaatcaccgataaccaaccatggcattaaaagagcaacatctttacaacgttccaagagtttctaagtatgtattcggttatggatttcaggtgctccataaaaggcagataagtgccaagtaggcccattgttacacacaatgtaacaatcgaaaagatttgcattgaaattgaggagagttacatcaacattgtctttccataataaaagtaaacccccacttaaacctatcctagggacttcaagtctattattgaaatttaaagactgacgaaaacgaaaaacaacattacattctaatttagtttctataataaataaaacatgaggagtttgctctttaacaagcaaacgaagatggcgaaatgcgcgtgggttccccaaaccacgtgcattccaactgaagattttcatggctggttgggaggctgggaaacagcctccgcaattttttcaaagctaccagatgtatccacaatagattcagaagcaatctgctttaagtcatcattaagagacaaatatgatgttgaaattgtaggtttgggtcccctacatcgcttgactgtcttccatagagacatgttttttaggttttctattacacactcagtttggtgagcaattttccttgttgatggcatcttcaacaatcatataaattatcgattctgttataagagcagtactatgtgggagtaatgggactgtcatggattgatgattacgattagccttagaatatgtgtttggtgggtaggtagcaatagagccaatagagtgaccagtagtgggcatataaatgttggtcagatcagattcatttggtgaagaagtctttgtcaatgaagatttagatgttgttgttgcagcaatttctttagcagcatcctgaactccatgatgtatggtttgttggtcttgttgatgcttgttttttgctccaaaaccaaatgttaaacatggatctgaaggcctcgaattgttggttgttagacgtgatgcatgattcagatttgctggtgcaaaaacaagtgatccttgttatcgagatgcacattcctttggtgaattcgtggatttgtggcagtttgtactgcatttgttgttgatgattggccctgggagttttctgcaatgtctgaagcttctccaaacatcaatttctttgggtgtggttggtttctaagttgaagagaaggtattgtattattgagagtatttatttccaatcgagtgagtaagggccatgcgtttcctttttgaaaaattcgttcgatattgatcataggcagaagttggtagagcagcccctttcaattctggtccataggctagttcaggttcaataccattttccataagttccatgaaaattgcacctttttggtaaggatgacccaagcatccacattccatacaccactcgggaagtctttcataacgaaaatccacccagaattttccttgatttgctgcatctttatgtttcggcctcttctcaaaggctttgtaacatcaagtttcacacgaatgcgtaagaaaggtccccatctttcacttagtgagtccgtaaaaactttccgaaattcactaagaatgtcagctaaagctttagccaatgctctggttttacttaaaaaagggtagcctataaacttgtacccaaaatgggaagtatttgagatcagtaggcataacattctgtaatgcagttggcttgtagaggatgatggggtggttttaaaagtgccatggttcttgagtgaggactctctctttgtctccttcacaaccaaaggagagtgtgtagaggtcaggttgtttatcaccaattcacacaggaaaacgcccatcccagtagacattcatctgtttttgaagtgtaaagaccgcttagtttaatttggaaattggaagttaatcatgtttaattatggaa

SEQ ID NO: 45007 - DNA, 2009 bp, Cannabis sativa
taaaaattaaaaaaatatttttttcttttttatatttgaaaataatttttttttttttttttttttgcatttttatagaaatttctatggtaattaatagagcaacctaaatcgtatagaaatccacatagaaaccactagagaaatccctttgaaaatccaaaccgtaaattttaaaaaaaaattaaaaaaataatacataaagtaatttccctaaaaaaaatttactaatataaatagcatattaatagaaaatatcttaaaatttattatagtcatagctgatattatacaagtgttattttataaacaggcgaaatttgtccatgaaaagaaagaaagggtatagattgcaaatattacttattttataaaaattttattatatatgtattataaattatttaaaatttttgagaataaataaaatagactaacatataaatatatgtattactaatatctttaattttgtcgtttcccctttcttcttcttatactgatagcgataggctatgtaattgattacctgatagaacatattcacttttttttttcaatcttctaacacatttcacatatttactttattttttccccaaatttgaaggttaccttatcttacagttacctatattataagtaattggttaacttcaacaaacttgttattatcttagaagtaaatagttacctatattataaggaaccaattattatttggattacttgttggcatcttagtgataaccaattaactacattataaggaaccatttacaatagggataaatttgttactatctcagaggtaaccaattaccaaagaaaaaatttagtcctagttaccttttttttttttctgataacataaaaaaaaatggtaactaggatatataagactaaattttttctttggtaattggttacctctaagatagtaacaaatttatatttaaaaaaaaaaattatatgtataacttgttagggtaaattgttattaatatttaaaagaattcaatgaaaaaattgttttaccatcgagatgtaatgtataatcttttgaagaatttgtgtattttttttttctcttcgaggtatacaatatatccttatgagattaatattaacaatttttctcttgcaaaaaattttggatgccactagttggttattcaaataaagaccttaataatcttgtaaatctaatacaacttcatcttcacattactatcaagaacactatagttagattactaaagtgaaatttcatataccatgcttaaaattttactcaatatctaataaatttctccaaataattttataccaatctatacttagcttatattaacatactcattctaccactttcaattcaaaaaatatttctctctatctctcattctcttgctgtagatctaaagagagccctcgaaacccctgatctttgtttccctttaccaccaccagaaccccgaagccctaagttcttctgtcaccacatcgtcttctcccctctctctatccatcgagagcccaaaagcactgacgagaaaagcatcacctcaccattgatgacccaagctcgccccaccttgcagcctttactgtcacctccatagtcaatgagccgctatttcaaattttagatttgaatttaggttttagattcaattgtgatagttttggttatactagggtttcgaggagtagatcaagatttgttttacttttgtttttttgaaaaaaaatcatctttattaattgtaatccatagtgattacatgattaaaatctggagtaacatcactactcttgataacacgatcagcaactaaataggatgctcgagctaagaaatgagcaatactatttgtggaacatctaataaaattgacattagtatctcacaagtcatttaacaacatcttacaatcagaaataatactcccaaagtatgaaaccataggaatagagctacgtaacgcttgcaccacagtaagact

SEQ ID NO: 45008 - DNA, 1092 bp, Cannabis sativa
gtgtacattgtgtccacgtagatgcacacatggacagtcgaacatggcacttaacatttaaaatggacggaaatgttaaattactaaccgaacgcaagtattgggggttttaccactcaaatttaggttttgaggttaactgaaaccaaaataaaaattttaagggttttgacgccatttatcccaacaattaataaatatggagcttagttgaatgaacaattgcaattttactaaaatgatgcattaaaaattaacataccaagacataggattaaatagctattcatgtctcaagaaattaacttataactaacttaataaccatcatccctgatattagttcagttaaacaaaattgtaaaaatacaagtgagagagagagagagagacagaaataaagggaagtaagacaaatcctataggatgtgagtaataaagcctttttgtctttcttctctttcttcaaatcgtgcaattcctcttcaaaaattctctttgtattttgttttctttcctgcaattaatttctctataaaatggcagctaatgatgcaatgactgctggtacttttcttttgttaaccaataagggtacactttgtttctcttaaattataaagcccaaaaacgtttttttttttcttctttttggcccacaaagtttggaccacaaacatccaactagcatcacttaagggctactgcaacttaagcattgtctaacaaagaaatacaaggctggcttttagtttccatgtcatcaaaaattactcgaggatgttacaacattctgttttagcaatctcaaaatttttagcttttgcttccaacttgaacttccaaatttctcccattgcatagaaatctaaagcaaaattagttatttaattccattgaaaatttaaaaacttaatagacctcaagatcagattaacgaaaaaaagatagacaacaacttaatatttacaaacaaacaccacattcacaactttttttttattattattttatgaaaaattaagtttaaacgccaaataaataactctatatcatagagttatattaggttatttttagtagtatttttag

SEQ ID NO: 45009 - DNA, 1065 bp, Cannabis sativa
gaaagtcctaaaatggtgacatgattgagtcacatatcacgagcaagccttagaaccttcaataccagcattcggtggcaacagacaagtggggtccaatatcataacttgtggcttggctgcagaaaaagtaacttcgtggacagaccccaaggttggcttgtctgcgctcgcatatttatggactagagtagaattaggtggggaaaattatccttttcaataacaatgtcagaggaagtagttttctttttgctagttcccttcttcttcttggtagccttgggttgcttcttagaagtgtctgcttcagaggcacttcactttttgccttgcttgatcgagacattggggctgtaaaagagattttccaagtcatgtctacaaaaataaaacaaagggaggttaaaatttgtaaggtgaggataaacgtaaagtggcgagatcaaaactctcacctaattaatttctagaagtgctaggcgaggagggattgctattagaattactaaactccctagaacaagtgatcataaagagatcaagagaattaagtgaagacatatcctaatcccatctagcagccctatgcatatttgaaacatattggtgatcaattccataataagaacaattactagtcaactaggcgtggaattttgggtaccaactatcaagcctatgagcaatcaagtgagcacagtttctagatgaaaaagttaaaatgaatatttttaaattgtactaaagttgtgggctcattcctaagggcagtaggagacaatccgtaaaagcaagaagttttaccgcgtgcagccctttcttcaacctcagtaacttcccgcgtggttatgttatttaagtagtgggtagtcgctatcctcttcttcttcagacattgggatctgctgccaagtcggttacttggggtccttaaaatccatggtacactgatccttttttagaagaccacatgacctataattgttgtcatggagcaagaaatctaccactcgcaaactaatgggtcggttcaccagaatttaatgtcgcctttgaactact

SEQ ID NO: 45010 - DNA, 4269 bp, Cannabis sativa
taacaaaatacagggtccaatctgtaacttttgcaaaacacagggttcaaaatggtatttacccattatgtatattaggcagtatttaaatttacaaaattaatacttacataaacataaaataataataaaaatttaatcgaacactattggatagatgtaccaattatgactttccatgtaaaccaaagatgtaggattgaattgaaaattttcaaaagtatggctctcactacaataaacacacaaaacttcctcaagatgacccatagatgaggaaacattattttgacccatgctcatagtcttcaaagtatttgaaatagaagctacttgggcagccaaatcagtaatgacatcaacttcaataacaccagcaaccttcccaaaggtgctccggtagtaggccactggtaattgttgttagaaattctttcaataatgtcataggcctcattataggacttagcaagtaaatgcctatttgccgaagcatcaccaacattcgagtatgagcgtttagactgttgtaaaatgtttccatttagatgcaatgagaaatgcaatggtgaggacatttcggcaaaaattccttgaacctctcccatgcctcatacaaagacttgtcttcacatttttgaaaggatgttctccgttatctccttctggagcttagcattcttagaaaatacttcatcaaaaaccgctccgccaattcttgccaagctgtaactgacatagaaggctaggatttcaaccaagctcgagcttgatctctcaaagaatagaggaataacttcaacctcaaggcattctttgtaactccaggaaatttgaaagaattactcacttccataaatagacaaaaatgaaggtgaggatcttcagtgggtgcaccaccaaactatcccacggtttgaagcatttggaacataatcggcttcaattcaaattgtgaagcctgaatttctagcctcactatgcttggattgagctcattgaaaagaagggttgcatactatcgaatgatttgatctctatcatccgccatgatcactagattttgaccattgttaggggccagccccctctgaacttgttgtccatctctttggttatccatcatttctatttccccttgtgctctttgttgtgctcttcttctttctctgaatgtgcactcaattttaggatcaataggaaatatatcaagattaatgaattttcagtactcgttcatgtactagagtaaacttaaaaaagaaaaatacaacccactcaaacaaggttagaacgtcaaaccagaaataaattgcaaaatagttgatgatacacaatttttaatttcaatccttgataacggctctaaaaacttgttgtgaaaaatatatatacgcaagtgcacataatcggcaacaagtaatataatgataagttgaatattgtctccacagggattataaattaaaataaatataaaatcaactagctaacaacttaaagtcttttgtaaaaaaaaaaaacaaatagatgattgatgaaagtaaaataaattggtaacaatgaaaatatgctcggaataagacgacaactactgaaaaattaactgcaagggaaagtatcgatggaatggtagacttgaatagctgattccccctatgttaaatttgtccagtttttacagcattacttactttagcaaagttgcacagagttaatagaattcacaatatgttagtgaggtttttccaaaactcactaattcagttctaccacttgattcaatatattcctatattaaatcaagttgtggaacatcatttacataccaattctcaagttatgcaaggtagcaaaatattcctatcttactaactaagaacaacctaaacatggtaattcacttacatcattcaagttgtaactactagatttagcctttccaaaatcaaatctatacttacaaccgataagtataattaaatgacaataaactcacttgaataaaaaaaaaaggctacattgccaaaatcgtgcttaaaattaatcatacccaaacgtaggggtttatagtcactcaagctttaataaaattagctcatacttactttaactacaataatccaaaacagagtataataatccatggctacaaatcagtttttctaaaatttagaagaataagaagagtagaaatgaataaagaagacaaatcctataaatgtgagtgatagggatcttctgtccttctatatgttcacttcagatcttccttcttttcctccttccttttttgtactttttttttgcaattaatttttctcccaaaaatggcaattgagttaatgttcttgatgatggtggttgtcccttgtttagttcttaggttgttagggtacaatacaataccctaaaatagaaatccatttctttcaattattggcccactagccttgatctcttctctccacaacagcagctggaatcaatttaagtgactgccacatgggtgctgatgtggatggacaaaattctctttgtaactttgaccacgtcagtccagaatgttgagttgttataacattctattcagcaattcttcccgaattcagctttaatttcccttttagccttgcatcatttccatttcccttggcacttcaactttctttcctaacacaaacaaagtttaattaaataaacacaactaaatataactaatttacaacagtcaaaagtcagtacacttactaaaaaataaagacaacatctaactaaaattaattaaacacactttcattactcttttcataataatttcagtttgaatccactaaaaataactctataccatagagttatcactaagcttttgttctagttgagtttacttttctacatgtggcctttctaaaaatataaaatttcctatctagtatatttagaagtttagttaagcattaaggtggcatttggttggaagtaatgaaattgaatggaatggaaatgaaacaattttcatttcatttatttgtttagttgcattttaaagtattggagtgttctttctactattttagtgaaatgactattttattttgaaatggaaggaaagaccattacaatgtaacatgagaaaaaatttaacgatttccttatcaatttttttatgcattttaaatttgattccattccattcctattccttttccttttcccgttctcatttttatttttatgttttcattccttcaaatcaaacaccacttaaagttttcaatataaaattataacatttttttcaccatttatttgttgctcttctatattttgcttttgttccttcccattcacctattatcttagtttcacacacgcacacaaaaataataataaaaaaatgaaagaagtgaaaagataatagatatggagcaaagtgtaacacaaaccaaactttgatcattcacgtggaaccaacaactaaactcacacaagcagtgaaagtaaatacacaatttaaaagccattgaaaggaaataggactgtctacttgctaccttttgtagatgacatgtttgtttgagaagacagaagtagacaaagtgaagtcaatgctaaacataaaatatcatgctgaaggtccatctaaaaagattcttgaaatggagatacttaaagatagaaaacataagagattaccggttactcaaagggattacataagaggtttagttttgacaataccaaactagttgcaactccaattgctcaacattttaaattttcaatcactcaaagcccaaagatagctaaagatatggaatatatgaagaacattccatattgtggtgtagtgggaagtatcatgcacattatgatttacaacaaaacctgatctgttccatggaatgagtttaatcagcaggtacatgagtgataattttattatatagagttatttatttggtttttaaatttaatttctgaaaaatagtgatgattcgaggttttaattctttatttttaaagttaatgtgtatctttgtagctagtaattttaagtgttttagacgctaattgaaagcaaatgattattttgtgctagttttatgtgtaaaaaaggaatcaagtgatccatgggaaggttataaaaggaaactgggaagccaaaatgaaagaaaaagctgaaataattggtagatgctaaaaaatcaggaccatgtatcattcttgaggattatttgctgacgtggaagaaaggccagcatg

SEQ ID NO: 45011 - DNA, 2055 bp, Cannabis sativa
attattcgagattgagaagtccttaagctgactaaccaatacctccccccgaatttgaactagcttagagtcttccaattgcactttttgattctttctaacaagtctagttgaagtgtcaggttgtgtagtttcccaaccacaaactcaattctagctttaaccatgtctgaagccaactgaagagaaatcattatggtactaaaaacctgcccgggacctttttagctcaaagtgtctgccactacattggatttctcaagatgatataaaatatcacagtcataattcttgactaattctaacaaccatctctgtttcatatttaagtcttttttagtgaagaaatacttgacactcttgtgatctgtataaatctcactccccgtacaaataatgtttccatatctttagggcaaacacacccttagctagttctagatcacgtgttggataacactgctcataatccttcaactgtcaggaagcataagctatgactctataagcttgcatcagaacacatctcagaccccatctgaatgcatcacaaaaaataacaaacttttcttagtttgatggtaaggctagcactggtgttgtgatcaattgttgcttcagctcttggaatctgatttcacacttctcgatccatgtaagtcgttggttatctttagtaaattctatcaatggcattaaaatcttagagaaaccttctacagaacattgataataccttcccaacccaagataacttcaaacttcagtaattattcttggcctcaaccattttttaactgactcaatctttcttgaatctaccataattccatcatttccaaaaatatatcctaggaagcatacttctgagaaccaaaattcacactttttaaactttgcatataacttatgatcacagagtgattataaaacaatccagagatgttgctcacgctccactttgtatacaaggatgtcattgataaagattataatagagtattggaggaaatccttgaacactctgttcatgagatccataaaggccactgaagcatttatccattcaaatgacatcactaaaaatttatagttaccatacctgttctaaaatgaagtctttcatatctcttcctctcaaattctcagttgatgataacccaaatttaggtcaatcttagagaacactatcttaccctaaaattgattgaacaagtcatcaattcttcacaatggatacttatttttgattgtcagcttattaaactctcgataatcaatacacatctggagggatccatctttcttctttacgaacaacataggagctccccagggcgatacactggttcaggtaaaccttaggtccagcatcccctaaagttgtatctttaactcaagttcaagtggagccattctgtatgggcctttgaaataggctcttccccaggtgccaaattaatgataaagtctatcacttgctatggcggtaatcccggtaactcctcaggaaaaacatcaataaattctcttactaccttgacattctcaggcctaactatttagatctactcgagtcaattacaatcgctaaaaatcctacacatccactgtaaaataaatctttagcttctagaactgaaatgattgggatccaaaaaccctaaaccatcctaacataaacaaatggatcttcaagctctgagtgcaaagtaaccattttacatttacaataattattggtcgaatacttggacagaaaatctattcctagtataatttcaaactccgttaaatccaattcaactaggtcaacactcaactccctagtttcaattctaactggcatagacatgatccatcttttggagataacttactctctgctaggtagtagggttccaaaccttaattttataaaatcagaaggcctaccaaatttattatttactctcgatgccacatatgaatgtgtagctccagagtcagatagtaaagtctagtaggagtcgttgacaagaatctgacttgttactactggaggactagctgcag

SEQ ID NO: 45012 - DNA, 1765 bp, Cannabis sativa
tgataactaatcagattgtaaatagttttatttagggcataaaacccaacagtcccaagggggcaaagcgtcgctttcacgctgcatgttgtaggtgcaagaggtggcattgcaccttgtacccttgtcttatatcaagtggtccacgttgcaggagggcagtccccggttacaggaatgtgatccctagttacaggcatgtggtccctagttacaggttgtaggagggtggtccctggttgcaggcaggtgatccttagttacaggcatgtgatccctggttacaggcatgtggtccccagttataggttgcagaagggtggtcctcggttgtaggtatgtgatccccaattacaagcctgtggtccccagttacaggttataggagggtgttccaagctgtagacatgtgatccccaattacaggcatgtggtccccgattacaggttgtaggagggtggttgcagcatacccttggtcgggtcctcaggccttgcaggtttgttccactgctactcatatcttctcactttcaaagacttaggttgcattgttgtacgcttttcccttgcatctcatgtcattttattcctcctccaatgttattctcatcaatatgcattcacctctcaccttacacttacagcccccaaaacacacacacaacacacacaatggcttgcatgggaggcccccacaagggctcgcatgcgagccctaatgcataacacacatggaacacaacacacacacacacagcttggatgcgagcccccactcgcacacgcatgcactcgcacacacttgcacttgaaacacatggcttgagtcccccactcatatgcacatgcacactcacatgcgagcccctcatgggctcgcaacctcgtatgatagcccctcgttactgtggatcgcatggatgctccaccacttctgtaaaggctccacggctcacccaaatgcttcccaacttgtccaacagctcatgggctcacacaatgtctcatgggcttgcacaatgtctcatgggcttgcataatagctcatgggctcgcacacccagttgtcacaattcagcaatcatagtattttggccataactcgcttgatatatgtcggaatttaacaattcaaaatgagtaggaaagatgggaaagagatctatggaatatatgtttataacaaggatctaattccaaatgcgtaattatgagaatcctctaacaattataacctagtaagttgatcttattagctctactcatgagttattatggagttgacctccaagttgcgtggatataccttaagacttgccagaattgatccttattattaacgagccctaggctacaccattgattcagtcaatccttaaccaactcttgcaggcaatgtctctcgactgtcgagactaattgttgactaatcttgaaaatttactctaccaatttttggggttaacacttgctccctagtctataagaactcctttaagtgttcttgttgattaagtgaattggggcttttcttgggttaagtgtaagccttaccttctctatgtttttcaaggatgtgcccactatacataggggacctgccttgcttcagtttcacttcataatctaaaccttgaaatatcggaaaattcttctcaccttttctaggaggtctcaggtttgaactgttgggttttgtgccctaaataaaacccatttttatataatcagagttacttattaataaagatatgaaataaca

SEQ ID NO: 45013 - DNA, 1760 bp, Cannabis sativa
  modified_base (70)..(74): a, c, t, g, unknown or other
ataccagcactaatgcaccggatcccatcagaactccgcagttaagcgtgcttgggcgagagtagtactnnnnngggtgacctcctgggaagtcctcgtgttgcacccctaaatttttaaaaaaaaatgatctataaaaatgagtataccttcaatcttgcctctttaaacagaagtgaatgcagatttgataaaagctgaatttttctaagctgaaccaaaagcaaagccaaataagcattatgaaaacacctatgctccttggcatctctatcattaattgagtcgaagttgagtaaacatgccaatattaaatgagatttcataaattatatttaaagactcaacaatagtttaaaatgcatgcatataaggaacaaaaaaccttaatcacttcaaaaactatgcattgccaacatgctgaatgaaaatggacaagcaaataccattctcatcaataaacacatgtccacaaataccgcataaaattaatgcatatggctcttacatcatgttctccatgataaattcatgtcctatgcaaattttttaaaaaaaaagaattaataaagaatcacaacaaaaaaaacactgaaaagagactcaaatgtgatatgcacgatagacaacatggccaaaagatgaaaatttagcacatctcacactttcctaaaagaaattataaaaggtttcctaattgtaattgaaggaatatgagttttgagacttagatacagaaaaaaagagctaaaatagttacagtagaacaagtatgatacacattaatttatgtacattattataattatactaaataataacatttctaactatatggatccacaaaaaaagaggtatcattattaaaaaataccctaatatataaagttaaaaaaaatcatgacacagttccaattaagatgagctatttgattatcatttttaaggcaatcagtgaatcaataagctctatcaacctaatcataaaatctttcctaatcccaataaaaagaatatgtggatattgataattgtgtgtcaccgatcattggtgggaagacagcaggtataatatcaatgtttgattactgccttggatcaatattgttaattctcagatatatatatatatatatatatatataaatatataaatatactgtccaaatgtagaaggataaactttgacgttttagccacaagtaaattaaaagataagactaaaaagaggaattcaatgatgttaaaggatcatgcttttttggcaaaagaaaatgtaaatgtcataataacaagagagagtcatagattcctatatgagctaactctaaaagatatagcagcctaaatttatgattatctaatctgatgtctaggaccaatacatgattttgacaatcgaagaaactatttgcaaagtaattagctaaaaattgcttcagtaagagtaacacaaacaaaagtgtaatacaaaatttcaacaattaaattttaaagacttattttttttttttaataaggaaggcatgccactactgtttataaggaaacatgttgttgtattaaatagaacaaaataataatgaatttggaaatataaattatactctaaatataatatactggaggataggaaccattttttggcccctaaaattgaaggaaactaatatagaacaatcaaaaatacagaataacgataacaaaaataatttttcataccaactgcaacaataagaaaaataattaatatgatgatg

SEQ ID NO: 45014 - DNA, 2362 bp, Cannabis sativa
tgactcgatgcttttcgcggactgtattccgaagaaaaatcatgctatcgaaaagaaggcaaatgattcaagcatggaaaaagagcaaagaaaaatgaggggaactgttgtcagaaatggtattgcaaaatttgccattgaagcctatttaggtttagtggttcagaatctgaatttccaatgtgatacaaatcttttgcacaaactatttggtttacaatgttaggctcattcttgtgtattccatggttgaattctctctctagtttcaagattttcttaaataatcttatgtcataaaacttgggcaatcgaaagctcatataattatataatgaatcaagttcataaataacgtttcaccatggaaaagaaaaattgcaatgtaatgagcttgaaaaaactcaccccaaaatggctgaggagaaactccggcgttgtcctatgacaagaatgtcgacccccatagctttagcttgtgagagaatggtggatgccttctctttgccttcgatcggtgatctctcaacacgtacacgtattttaggctgcgcaagtttgcaagcatacctcatttcatcgaggaaatcaacctcgttcgagccaccctccatgcctatagtagaggaggcagagatggagttaaccggtaggttaggccacttaaggagcgtggacaatgtgtttcgccatgaacatggattttccacgtggagaaggatcaactcatcttcctcgagaactgcatgagatagggcatattggagcgcacctgcagactctctcgttggatcagccactaccattaccctgcgtgctgatccatctcccatggcgaccatgaatagctagaaatccgcctctacctctagtgttgccctcaagaacaccaggaggaggattttggaatggaagatggaaagggacataaaatgtgaattggtcattacatgtttgtgtttgtccataatagaaaactgtatcaacagctaccctttgatgtgtgattcacatgtatatgctttttgggggttctatgctatatttaggggaagatgtttttctggcccattccttgagatttggtcaattgccaaatggaaattagcttccttttaggacaaaaacccctattaatttgcaagataaaacagtaacattgggccttaagacattttattttaccttatttctcaattcaacatgctaatttaaatacaaaatatgtaacaaaattttgccaagaactccattatcaaattgtattgaaaatatggtaccctttccacagattttgttcttgatgacaatgaatatcaagtcaattataaattacaaaaagatgaatatgaagctacaatttaattacaactcatctcaattgttagccaaagcttacaatcaataacactattattaaatcctaaacaaaaaaaacttctcttaaattcaagagcaagaggtttcaacatgcttctaccagaaatgagcaagaaaattcattcacgtgcagcgatcgtttggtttacaggtctcagccagctcggtgttgaggccttagtgaagttaataatcacttagcttagaaaagatccatgaaaagccatgcaactaaactagggaacaagatttgtctatatcatgtaaaaactaccttcattttcatcaactcttggcatttaatttctcaagcaggatcttgttcagaatcccgggatttgctttacctttagacattttcatgatctgcacataagacaagttgttcctaactaactataactcataaatgtataaacgttattgtaaaaggcaaatggaaaatatgtaaaggtaagttaaacacgaaatctatagtacctgtccagcgaaaaatccttgtaacttggtcttcccgccacgatattgctccagctgttttggattctccgaaagcaccgtgtccaccattttctcaatctcggcagggtctacaatctgtcatgtaacgatcgttaagtttctaaactttttcctttaggtacataactgcaatgttatagctaataacctttcattgaaaaaaaaaaccctttgtttattatctacaaaacaaaatcatatctttttgatttcccatttcatgttcagtgatttacagagttgaaaccagtttggttaactaaaatcccatcttgtagaatcatacactcctgaactttcagcatctaatgcataaattagtgctcctacttaactacatatgatctccaaaaacaaatagattaacttacctgaactaaatccttttcttttataattcccttcactgtcccgccttttgccagaagctcaaacaatatctgcaaattattattgtaag

SEQ ID NO: 45015 - DNA, 1534 bp, Cannabis sativa
ttgtatttttggttgaaatgggattgtgttcaaactcccaaaatgcagtctaaacagcgggccatcctttttttgactggactgacttggggaagggtcaatctcctccggagcatgctgcacaaccactcattcatcttgactaaaatccatctttcaatgattcttttctctactaatcaccgcttcccaaccagcctgcccgattgattttgtaagattagttaaatcaaaaagggttaatctagttcaaaattatccaatgtttgctttatcgaacaaagctttattaggggtcttggttggccccctattttcaacaattacagctggcgtcgaccatctttgcgatacgaacggacacaaagaagaacccaggcagcatgcagagaacaaagattcctgaccagagcatgttattgactcaaccacaaatttgttgagtggacataccacaaaatttgcttatatttttctgagtgaacaacattgtcgatggggtgcgacaactataaagctttcttcagctctcaatgaaagcaccaaaaatatttaccgagatagaaaaatagagcttcaaaaataaataaataataaacagtagacaagtgatttttacatggtttgagcgttaacaatttctagtccacgagtcagttgtattggccccttagggaagtattttgataatatagtatgtgtttacagtataaaccctgtctctacaagtttgtaggaatttttgtagatgttcggctagtacaaattttgttcaccatttttttcataaaaaataggggtatttataggcttacgtgtggggtaagggcattccttttacccacctagggctttgtaccacagtccattataagggcaggaaaatactacatcaaatttgatcgtcaagccttgaagaacctttttgatcgtgcggtgtgcatggatggtgagtagtaccgtctggatcaagaacccgtgttaacaaaaggtttctcctttataaattactctccaggcgagccgtcaggaaaaaaggtgtgtttagaggtacgtacgcgcactaccatggcctggcacaggtgacaaaatctaattctgtgttagaaaaaggcgtaaccgtctgttggtcgatttccatataaatctgaggtggccatccgtattcccataggagtcgccgtccgcgatcagttcagagagtccttatctggatgtcaagtagtcagatcgtttttctaggacttcttgggatccgacgacgagtataatcctttcacgtctcgaagatgctaactgggtgtgcaatagctctcagtatcaagcttcattaagccctccctggattaacgggacatctccgcgtggaattgtgatggtcatcatcgttaatccgagaggttaacaaatttttgcttctaattataccacgtgtctccttcttaaaacacaaataacaatattattttaaatttcattataaattttaattagcccaccctaaaatgatatctaaggtctatatatatatata

SEQ ID NO: 45016 - DNA, 1880 bp, Cannabis sativa
aactggtgcccaataggaatggtcggtgattctataatgcacaaccttaaaagggtgcactgatatatttcttatctgtttcagcatccagaacaaaattttagtttaattttttttcatagtcgtgtacgttatagttatttaagacatcctacaaactttaagatattctaaataatttacaatatagaaaacaatattcaaacagtctatttcacatgcgtataaaataaaacagtttatccattcaaaaaaaattattagagtttctcattccaaaatttatagctacatgagctcgtcttttttctaagattaggctcgtcagccttttttgggcataggtgcagcttggtcgagattgtgttttgttattgcgattcactttttgctattgcaattagtcttgtctctgtgatatatttttgagtgttttagtcttgtctttgtaatatggttttgagtgttttagtcttatttgtgtgacgtggtttagttttattttgttgttagttattcttatttctctgatggctcaccatcaaatcgttattagtggttaggaataacaaattttttgcaactaaaagggttgttagtagtgtagttacttaccttgcagaatagttgagtgctcaagctacgaggttgaatgaacctgctgtaacattttctacggttgtgtcttctaagtagtagatgaaactgaatataggtgttcttaaggttaactgtgatttgcatcttttttatcttattttatttttagttttttttttgtcaaacaattcaggagttaggtggttgattatatgactcgttcttctaattttaattcgggtcgtgtctccaacagggagatatcccaattagattgcatgctattattttaaattattgttattaataaaattgcatgatttattaaaaataaatacctaaacctgacccgacctgcaccatttaatgcaatttattggataacattgtctccacatggattaaatgtaaaaattattgagtcatatataagaacatgggcagactactccactcatcactaattaattttaacatggaatatcatgattcttaacataatcaatcactaatccaattttgtggttttttttaaaaaatattataatatgtttttagaaaattctataaaggggtgtactaatacacatcttatttgttttggcattcaggagaattttttagtctatttttttttcgcatgatcatgtacgttgtagttatttaaaacattctgtaaagttttggaaaattaaaaaaaaattaatacgctgaaaataatgttcaaacagtcagttgcacacgtacttcttttattttatacgcgtgtgaaataaattgtttaaatactattttttatattgtaaattattccaaatttttcaaaattttagttgttgtcttaaataaatacaacatacacagccataaaaaaataattagactaacttttttctagaaaccgaaataataagaggtgcatcattgcacctttttttttgggtgcaccatacaagcttcttataatactatcttagactctatcttttgcaaaacttaattggactttctgttttattaaattacaattcggatcttgtgtttttcaaagtagtacaaaatagatcttgagtttaatttttgttaaattaaaacttaataataacttgatttgaaagtattatgacaagaattgatatacttttttgcatctattcgtactaaaaattagtttcagattgattatataaaaaaacatttgacaaaaattaagtttatagtttattttgtaccattttaaaaagtatacagtctgaattgtcattaagaaaatagagagt

SEQ ID NO: 45017 - DNA, 2562 bp, Cannabis sativa
tgagtattattgtattcatgtaaaaaagttttaacaagatcttctacatctgctcaagggttagttttcttgctaaaaagggaagcatttttttgagaccatatcatctaattaaaaccaagaaacagactaaattcatctccactaaaagattaaaagcctcagagaaggtattttttaatgtcacagtatttatttgcagtgtaaaattggtaaaaaggaagtttcctaacacagagagttagctctaaaacatcctaatagggcatgagacacaatctcctctttacttctacagaaggaacaattagggttgtgaagaacatccctccttaattgatggagagcacacgacaagacatgattaaaagccttccaaatgaagtgctttatcttaggaggaatttttttggtccaaactgacttccaccaagactttaaacagtcatgcacatatgaggaaggggaacctgaaatagagacagagttagcaaggtgataagctgagttgacagtaaaattaccagaggggtgatgcccccaattgaggcagtccttcctcaaaagatcaatggggatcgagagtacaacatctacttgataggaaggaaggtaatgtttaagtttactacggttccaacttccttcctcatcaataagaaaggaaacaatattattaatgataagagaatcgtaaggcaaagaaagagagttcaaacttggaatccaataggagtcaaccaagtagatggattttccattttttactctctaaaaaaggccttttaaaagaagttctcttctccaaagaatgcttctccaagttataaaagggcagtgcctcttaggagcaataagaaaatcattatacttgaaatacctggcttttaacaactgataaagaagggatgtaggattagtctaaactctccatccttacttagcaagaagagtttgattgtagcataagatagatttgaaccccaaccccccataaaatttcaaagcacataagctaggccactttcttttagtgaattttcgtattgttattaaaagacccctaccaaaagttagcaataagtctttgaagttgcttacaagtgctaatgggtagtttgaagcaagacatgacatatgaaggaacaacttagatcacagttttgataagagtttctttgccaactatggaaaaaaacttagcattccacacattcatcttagaagagacactttgaaccatgtagtggaaaattaagttattaaccctaacaatccattggagaacccctaaatatttgctgataaaaccttcatcagttagccccaaatggttacaaaaattctctttatcctcagggttagtattagtagagaacaggatcaaggatttggccaagttcacaaactgaccagtagcacgattataggtgctcaaaatactgctgatagctgagctagagttcacactaactgaacaacacaagatgttatcatcagcaaacaacaaatgagaaataattggggcatttctataaatagcaataccagatttctctctggtggcctctttaattcgaatggcagcagaaagcccctcaaccaccaaaaggaacaaataaggggacaaagtccccttgcctaatccctctagtagggttgaaactctcagaatgacaactatttaccagaatttgtgtatatatattagtttgtttgtatatataagtggtttgtgtgtatatatgtgtagtttttgtttatatatagatttcactacgtattaattttagcattttttatgtcacaatgaagtaatgtatccatacaagcttcagccctcagcagctcgaataaaaaattaactgttcatttatgttacttgttgtggatcttcaacgtttcacctttcatagatttgggaatggcggtttcagtttgggaagtgacgttgaggctgggcacatgcgagttgtataaagaaagcagagggaaatcgaaggagttagagcagggctaatttttgaatttatttttgtaatttaaaatatttgtttttttttatttattttttaagttgggcaaaagagtttaaattaaatttttagcagttttgagaaagtgtttacaaaatttctcttgtaaaatatttgtttccttttattatgtgcaaagtgaatattttttaattggtgtatatgtttttatattgtatttgatttatatgttttttttgtatgttaaaaattagatattgaaaaatgactaacagtcgctcgctacattgacgagatgaaataaaaattgagtagagtaaatagagagacacaaaatttatagtagttcacccttcatgttgcgatggtaatagagctatgtctattatgagtttttacttttcacgagtattacaagaaatttgactaagtctagaagctctgatttctagagaaaaaaactacagagagatgttatgatcttatgggtactttttagacgtgaaaaatgagctagatgagctctccttttataggaaatgagatcctattaaaataacaataa

SEQ ID NO: 45018 - DNA, 1010 bp, Cannabis sativa
aataagtaaatctgatatattgaaatgagttttatttagggcataaaacccaacagtatgtttagtccttctaaagtaattaagaactggaagacgaatatggagttttttaatttgcttcttaaaaatagtaatttattgactgccttgctaactgcttgaaaccgggcactccgcaaaaaacagtggaaatgaagattatacggtttgttggaaggggatgaagaagacatcacacactctgcatcactcaatagagttttttacatttgttttgtttggtaaatattctcctttcatggttatcatcattatcatattagttgacataaaaaagattatccctagagaggaaaaaaaataagtgaagtaatatgaactgaatttgtccttcctctttcgacaacggctaaccatgccttgccctatcggcgaaattgtgtagcactgatgcaaatctgcctagtagcccaatttggcgattctttgattttatggtctggtagtaatcagtcaagatgccatcccatggtggcaagtctactacaattgtcttaatctgtctgaaatgttatattttatacagataaaatttgaggagtagtttacatattttttttgtctcctttcctctttatgaaagtttcctccaatttctcttcctttcagcaagtatattgacccattttgtataatttcccccgtattttaaagatagaagaaataagtagttttttgttctctttaaaaaaaaggttggcttcgaatttacaactaaatttttccttaaatcttttatttattaattgggtttgattctgaaagagggtcattatcttggaaacttgaaaattaatatgaataaatgaaaggaaaacagataaaacaatatagatagaaccaagaaattgactagagaccaagaacagaggattgtgtattattacagtttatctgcaacaaatagcataatcaagatgtgttgtactttgtgttggaaatattttacc

SEQ ID NO: 45019 - DNA, 568 bp, Cannabis sativa
  modified_base (402)..(427): a, c, t, g, unknown or other
ccacctgaccaggcgcaagtgacacgtctcaattcttctctccagcctgcacacgcgggtccactcctgtcagcgcccaaccaaccagcaagcgccacgcgagcgcccagtcaggtccatcagcgaaccagctcgcgccagttggaatccgtccgctccagctccaatcagaccgtgccacgtgtacctgctgaagaagaaaatgagaagtcaacaagtgtattttgcttcagccaaaattacacacacaaaagtccaaaaataacattttctcccacactttacacttaaatatcaattttattttcccaattttttcacctaaataatcattcctattttatttttaccctacctttcattacttttacatccttacaaaacatttattttttccaatannnnnnnnnnnnnnnnnnnnnnnnnntctcttctcaacactaattaaattagaaatttttacatcaaacatataaaatgataactttattacctaaataccactacacggtaaactaaacatttatatccttcatctttattttactactattttaccacatgcata

SEQ ID NO: 45020 - DNA, 1652 bp, Cannabis sativa
aacaggttatacggttttgttttactaccatgcttctctttatttctttcattccatataagccaaaggatagtaatgaactgctcaatttgaagattagaccataaatctgaaacctgtagcatcaattctttgatagtcatatactcagaaatcaaaggagaaagagtaaaagaagagtctctccaaattttccttggccttttacagtaaaacaaagcatgctgagtggtctcccttgcattttgacagagaagacatataggggagtctgcaatgtgacgatggtggagatttgcagctgttggaagacagtcatttattgctctccataaaaaaatcctgactttagaaggcagagttaaagaccagaatttgttccaccaatttcgactttgaagacctgaggcattgggcatttgttcttcaaggctagtggctagtgtataacctgacttaactgtgtaagccccattagtttcaaagttccaaataagttggtcactagcagggaagattgacaaaggaatttggagaatttttcctacatccgagttaagaaaagtatcatacagtaactctaaattccaacgtctatctgaggtgataaaagaagacacatattggttggtggaagtcaccaccgattgcagaggcttgaagttagttaagccaggaatccaaggatcagatgcaaataaaatgttatggccatctccaaccttccaacgtaatccctttacgagaagttctttaccccaaacaattccttgccaagtgagagaagggtaggagcctttatttgaatccaggaacgtagaagcagaaaagtatcttgctttcaatatacgactaagcaaagaagtaggattggagaagactctccaagcctgcttagctaacattgcttggttaaagtgaatgaaacttttgaaacccataccaccttctgatttaggttgacaaagagcggaccaactcttccaattaatgccagatttagaagagttagaaccccaccagaatttattcatcataacttcaatttggtgaatgagcgatttggagaggcgaaaacaactcatagcataagttggaatcgattgagctacagctttcaacaaaacctctttaccaccgattgagaacaattgctcttgccaagcagacagatgcttccaaagtttctccttaatgtcagcaaacaaaatctttttatctctaccagagtaggaaggaagtcccaagtaacgttcatgacaaggttggataggcatgtgaagaatctgatgcaactgagcttgaaccgaagggagagtatttggagaaaatgaaagcacagatttgtccaagtttaatttttgtcctgaagctcgacaatagagatcaagggcattcctgatggcatgagcagatcgattgttggcacggcacagaagtaaactatcatctgcgaagaaaaggtgagagacacttggagcagtacgagcaacttttaagccttgtaaattacctctaatttcttcatgttgcagcagccgtgaaagtccctcagcacaaagtataaataagtaaggagagagagggtccccttgtctaataccacgagtaggcacaacttttccttgaacagagccattgatcaggaaaga

SEQ ID NO: 45021 - DNA, 3006 bp, Cannabis sativa
aaactgttttgaaatgtaaaaatgaaaaagctcctaaattttttaggtataaaaagattatctaaaataaaatttaaaattgtgattttagtagaatgtttagcatgtagaatattccaattaagctacaataaaatttagggttgtaaccaaagggatctctcttccctttggttaaatagtctttatttttaattttaatcaattcttccaaatgttaaatatagtctattctaaacttgaattctttgcaaaataatttttatttgtttaaagggatactaatcgacttgtgatctttcagcaattctagcaaaaacattagctctttggatgagattgaattggtcttgcactatttgtatgcgtgttaaagttaatttttagattcttgttgccgattttagtgttgaataactcttatatctattgcaataaattagaagttatattatattttctgacattaaagttttgttatcaaaatttttgcggtatcattttttaatgttattgcaatttaattgttgtggcccataaattgacttaacacgctcttatgagttttttttttggaagaaaagcccctccccctattgtaacttaattccaatgcagttctaatacaacatcacattcttgaccaaaaaaaaattatatatatatatatatatgtatatagttgggcagtgaataaaatagtaatatatttgtatttatgatttatgaatatgaatattaatgatgaaagaaaaaattatggtatggcataatatgatataatagaatatagttatgaatgaattagtgtgaagtcaacagtcttggataggaactagaggtagtttgcccccataaatctccggaagctgctcctcatcgatgtcatttagtagagtacctttgagctttttgttatcaacaaacactatctgccaaatcaattaacatccatacatgttatcaacttaattaattttttatatatatattacgtgtatatataatagtacgtttgtaattggtattattagaaaaatttaagttttaatgtttaatttttttatttaattagaaaaaattattttctaatcatataagctgtggttaatctattgactgaaaaaaataaaaaaaaaatatgtttgactaagatatttttatataaatttatttttgatataatataaaaagatatatattttttttaaaacaatagagtaactaaattattttttcaaaaaaaaaaaaataactaaattaaagataaaatctcaaatttctttttctttatttatcattaaatcaaaaaatattaatttaatatttttaaaattagtaaccatcatctattaaaactgattaagaagtgtattgaacatcttccaatgctgtcataaaaaaaggtatatggcaatatatataagacaaaaaaataagtaccttctttttggtatttttgtcaatgaatgggtagatcatcttccaagcagtcataaaaatgtagggcacatggacaaagaataacttggccagcctctcagggtagcaatcctgtttatatatatataatttatatatacatttgttaataagagtttcaatacatgtaatatatatatgtttacaactataatgattatatgaaatataagatataacctgcagaatggatagagctgctaggtatccacgaatgtcacaattggcatatccccagccttgaacatctgcaatggctacaaacttctcatgccctcttggcattctacaacaacagtggacacagagtaaatgattagttcatcatcaatttcttgtaattttcttaatcttataaataattaaccaaaaagatcaaggggatggatggagacgccataaacgacctacctgctacatattttttcaaggacatacaccacaaaacctgataataatcatgaattaatcaataatcgtaaaaagaaaaaaaaaaaaaaataagaaagagagtaagagagaacaattgggggtaaggtattacgtttgaagtcatcgacgttatgctgcttatgcctgccaccaaagacgagaacaacagggcgtccttgtttgtcatggccttgcataaagaacttgttatgagcaatatcagtggtcacatctgagtgggtgaagcacccaccgttgggtggcatgaaggactgtctccagcttaggtactttaagaacatttgagaggctttctcaacatccatgtctcgagctctaaggaatctccttagaatcaaatcatcattcacttcctttgaatttgaagaatcttgattttggactagagccctcattatccccactttgctcttctctatttcactaaattcaactcttactatttcttcttcttcttctttttctttttctttccctgtactattactagcactgttgaaatcggccatattttttagatccacaaaatgaaaaaaagaagaaatacctattatataatatataattaattgaatgagaagattgtggtagtgtcatgagatgagcttaatttaaagagaaaattaggcaatgcccgtggcagttgagctgaatttattaataagcttagctgtgcccattttatattaatataatgtccaacttgcctagctcctttaatttatactttatttgtaatttatataaaacaataccccaccacaccacaccaacccagcacaaaatcagatttttacaaagtacactaacaaacaaataacatcgattttccatagacacatatccacacactcttcacttctcttattaccacataaagctaatgagattgtgagactcattgtgaatttgtgatggtgtgcgtgcaaaaataccacaaataatacatgaatacttgttagtgcgttatgttcatgttataggacattcgacacaatttttatattataatattatgagtgaagtaaaaaaatgggcttttttcataaatgtacaacaaaaataaaataa

SEQ ID NO: 45022 - DNA, 1070 bp, Cannabis sativa
attgccacatttttggaagctgtcgagacccacattatatttgtatttatgttttgttcttattctcttgtttttgtattatatttacggcctttgctcgcttcggcctaagtaatgaattatttattgaaaataatagagaataatacatttttaataaataaaaaagaatatgtaagttgcttatgatcttatgagtatgcacaaacttattggatcatgaatagtcttaggaaaattagaaagcaaacttgtaatatcatctaaaataaattagttaagattaaaaatcaataccatataaaggcctcaaaagacaagcaaacacattgacaggtatgaactacaaatcattgcaccaatgtcaattgataactgtgtgagaaattcctaatagttgactttttgacatccatacattcttcatataaatgacgaatatgccatacaatttcgtgcaaattccttccaacagggttatatctcgtctttccttaaatgaatcagctgaaagaatgagtaactcaaaatttgattgtaataaaacttcagaagctttaaaaattatctgttgaaaagaaatctctacccttattttatttaaaacatcaaaatcttctaaatcttctgaaatctctagcaccaaaacatgcctattagaatcagccataggtacaaagaggacatgacaaagatggcagaactttccttttatatagtcctgctcaagttggaaggatatcatgaaatctccaaatgtaagaaaaaactttctttggaagatgtaatttctaaaaaaaattcaacaactccacaactaaaacacatcttttgaagagaggatgggagtcagacttcgccctaggcatggtcaggttaggcctgtgtttaaaactcacttcgagggattaaaaaaaaaatctttttaaaattatattttttttatactgtttttaaaaataactcattttttttaaacaagaacttaatttttttttttgacctactataattcaaggcccgcctgcgaatagccactcttgactccatcatttgaataatgtcaaaac

SEQ ID NO: 45023 - DNA, 773 bp, Cannabis sativa
gtacgttctctgaaaagcttgcacttttattctaatattattgtccctgtggttggtggtgcaggcagtcttattcttgcttggaaggctgggtttacttttgaatcagtttctatctcgaaaaaccatatttctggtattgtgtattcggatcctgaccatcatccttggttattgtcgtgtgtgtatggccccccgtactttaatgaaaagaaaagtttttggacgatgataatggagctcggtctcaaatttggggggccttggttgattcttggtgatgtgaactttgtgttgaatagctctgaacggattggttcgagggggagagatcaattcttgccgttcatttcgggattgattaatagaatcagattaattgactttccagttaaaggggagtgccttacatgggacaaccatcgggacggcgaagctcatatcaagtcggctcttgacaaagcattggtcaatagggtttggcttggtcttttcccaaagacgattgtacagtcttaccacacttgcaactcggaccaccgacccctgggtatcagcacggtgtgccgggacgctaaaccctctaggcctttcaggtttgaggcctggtggaccagagacccccgtagtgatttgattgtggagaacgcttggggctctttgtctcatgcgtgggccccgacgagaattttcaagaaagtgggggctactcgccttgctcttagccagtggagtagaaaccaatttgggaaatttgattcccgcattgctca

SEQ ID NO: 45024 - DNA, 1023 bp, Cannabis sativa
tccaagggctagcttatacatatataaatatacatgcgcgcatcatcttactttgtttggattattctggaaaaattaaatcaccaccaccatcaccatcatatatatactcagctttaattgttaatttgtgagacaaaaaaaaaaacctaattaatccaaatgcccgacagtatgagtatatctgtaaacggccaatctcaagtccctccaggcttcagattccatccaactgaggaagaacttttgcagtactacttgaagaagaaggtctccaatcagagtatcgatctcgacgttattcgcgatgtcgatctcaataagctcgagccgtgggatatccaaggtatatttatgtacttaattatattcttacacactcgatgtgggactatatacatatattaattaattggtgttgcagagaggtgtaaaataggaacaactccacaaaacgattggtacttctttagccataaagacaagaagtatccgacgggaacgcggactaatcgggccacagcggccggtttctggaaagcgacggggcgtgacaaggtgatttacagcaactccaaaaggattggtatgaggaagactctagtcttttacaaaggcagagctcctcatggactcaagtccgattggattatgcacgaatacagactcgatgataacactattactactacaaacgatatcatcattaccaataatatacatgtaagtacacacaccaccaatattttacatttatataaattaattacttaattatattgacatttttgtttttaataattgtgtagggtgagaataattctccggaagagggatgggtggtttgtcgtatattcaagaagaaaaatcatcatcagaaaagtagtgtagatcatcagagtactagtagtccagtggttaacaccgtactaatggaatcaacggaggagatgacggtgtttgattcttcatcaatcggtgacgagggggctttggagcaaatatttcagtacatgggaaaga

SEQ ID NO: 45025 - DNA, 710 bp, Cannabis sativa
tgtcaaaaaatagaatattcctccggttattctagatgtcacattcaaaagtttcaagaacttcaaatcagcaccctgcagcatgcattaatacaaatacaacaacataattaagtaagaaagttcatcatcatatataaatataaattaaaagaaacattcatacatgtatatatgtatctttaattaaataaaatgaacaaccaaccttaaggttgttaaattcttccactgctacatgggctgcatcaatgcagtcctgtgaggtaactttatctactacaaacgaagtccagtaaaatcgttttttcggcttatcagcatgaaaatcctatggaacatatataaataaataaaagaaaaatatagtatcattcatcagcaataatgatcaagtaattgagagtgtgagagagggggaaaaaataatgaatacatcagagagttcgagttggttgatataatgaaggatagcttcctcgtcttcatctgaatcgtaacgaagtattttgggatcgaaattgtcgttggatgtgggggtcccttccggaatggtgtacaatcccaatcataaccaactggatcaataaaatcgtaacaaggtgcctcttcctctgccatgtccttgttagttaattttgattctctattacctgtagattgtcagaagaagaccgagtcaaataattaattcaatattaagtaaacaa

SEQ ID NO: 45026 - DNA, 1657 bp, Cannabis sativa
ttaagcacccaaacctcgaccaccaattcgacttcgacctcaaacacgaacctagacttgaaccctgacccgacaacccagatccacaaatcaagtcctccagttcgtggacctcggcctctaacccctgcctaagccccaggccctgacacggagctcgaccctatatctcaaaccttgaacttggaccccgacccctaacttggacccaaacctagacccctcccccctagcccacggccaagggcccccagtccccagcctggacctagactcggcccaaccccaacttgaactcgaacttgatccttagcccaaacgccgacctcaaacccgacccttggccagaaccttgactagattagccccaactcttggaccgaaccctgacccaaacatacatactcgaacctagcctaaatagtggctcaaaccccgacttcaacacgatccacggacccaaacctaccccgacctctggcccagatcaaaccttggctcacagacaccgaccccgacccgaatcttgctcagacccggacctgggcaccatacttagaccacgaactcgaatctcaacactcatcgtccccgagcgagatatcgatccactttccctcatctcagtttcctcacgtaaataaaaaacaaaagacaaaattaaataaaatttacgaagcacttttttaactttgtttttaaaaaacgaaaaaaaagagttatatagttccatttttgtgattcaaaaaattaaaaacaaaaaaagtattacagaacaattttaaattatttaaaattttctaaaaatttatgtaatgatcccttctagtaaacgcatatgatgaacatgatgagtactaaaatatttaaaaatgtatatatacatgtacaattaaatatatatatgttataacttacagtagtgtggtggtagatgagtttgagaatattttggggcattcttgtttgtagaaagggacaatatctttggcagcaaataaaggacgacccttatcgttgggtgtcgatatcatcgtggttataagaccaccagtacttgttcctgacattacatcaaaatagtctgcaatccttgcattcttgttatcatccagttcctataatataaatcattataaatatctactactatatatatatatggagagttaataattaattaatgttatgttaattatgttttacgtaccttgagtttggattcaagataatcaagaaagaccgcaggaatgatccctctaactcctcctccatcaatactaagaatagtagttgtatcaccttcaactgatccaatattataattaataatatcactcatcactattaattattatttgttatttgttattcaaaaccaaacttagaacgatatacaataaaatagagaatatgaaaaactttatacgtaattaattaatgcatgagaactatacgtaatgcatagtagattattgctcttcatgcaatgcatatgttatatatgtaatttacttttatgccctctgtttggaagaaactaatataatagatttattgtgacaaaatttgctcaatataaaagtgtctaataacgtgtatatatataatgaaaaccacacaagaactaagtctcgtttggtaacacttttgtttt

SEQ ID NO: 45027 - DNA, 2335 bp, Cannabis sativa
gtttttatatttttgatgtaaataattcttttttataaataaatttagaattaaattaaattttatatgtttaaaatataattaaattaaacttatttttgttcttattatttcaattattataaataaatttagaattaaattaaattttatatgtttaaaatactgcaatcttctttatttttattgaaatactaaaacaaaatatacgaattaaatggctaattacttaactcattttttctaattgcaagtgtaacacgagaaattatcccaattgcattgcataatattattatagttaattatcaatactaacagaaaaacaaatttatcattttctgaataaaataaaatatgataatttggatactaattaatggtgcttaaaatgcccaaacaattcaaatcatgaacgtcgaatgacctctctcatcttttatctacaattactttataaataacttggaaagaaaaacagacaagccaattaatcagaaacacatttcttgaaaaggttcttattttgagctcaaatatgtaaggagagaaggatctcagatacaaatgaatggatgagattaattatcctcatgttaaatcagattaacgagattatgatatctcatcatcatcgaacctttcttccccaaatatctcaaaccaaagagaaagatttaacttaataatcaattttaagtactaaaagaagcctcagaaagccagtaaattcacatcaaagaatttcagtcggtaattccaacttgtaaactaatcctcattggcctcgtgaaactgataacagaataaaatagaaaatgtaatcgcacaaaacggctcaatagaccaatcaaaaataaggtctacagattcctatcaaaatgcgaaacagagaattgttattggaccaatcatagcatcgccggtcaaagctcttagagagctaccgtagacgtggcatcgatccgtacaaaatcaaatgcagcagagttcattataagaacggtgaaaccctcagagacccgtttaaaatcacacacacagagtgagcaccgtaatcaaatactctatcccaaccaaacaacaaagacaccggaaaacgacatcgtttccacagaggaaaatagtcgaaagggctttgtgaatggtgaaattgggagtagagcaatggctacgattgtgaacactctgctgtttaaagtgtcatacggcacttcctatcaattttaggggagtgcttcttcattgggatctttcctatttctgtaaaaaatataaataaaaccctaaccctaaaaacatatataaaattaaaactcaaacaaaaggggctaagccaaaattaatagttagcaaacgcaaagtggtgttgttaaagatattgaataaaatgtaccaaagaagttaggggaccagagaatcaaggaaagatgttaacctgggcagcaaagaaacccccaaccctttgaaaaatcaatatttgccaatagaacaaagcttgcaagaaatcgatcaacagatctcaagcccttgcagccgaaaggagaggcattgtcacagcgcttaatcaaaacgaaatcatatacgaccactacagtagtttacacaaacaaatgggatgaaaaagaaactaagaggaaaaagagaagcagcctcagctgctctgttattcaaaaagagagaaacttcgggtatatatatacgcaagcttaagccctaactcagccacccaagataaagaaaagaaaccctaggttattttggacacgtaatcaacaaatctaaaacaactagaaaatgaataaaattaggggtaaataccattttgaacttgtgttttgcaaaaattattaattagaccttctattttgttaaatgacaaaatgaaacatgtattttccaaaattatacaaatagaatcctgaactgattttttatcaaaataaaacttaataataatccaatctataaatgttatgacaaaattggttacattttttatatctgcttgtgttagaaatcgccttaaagttagttatattaaaaagtaaaattattaaaaattgacctcaatgtcctatttttactattttagaaaatataggatttattttattatttaacaaaataaatagttcaattagtaactttgtaaaatacaaggcccaaaatgatatttaccttaaaattaaagaagtttaacatacgagtaatttgagcataaatagataagtttagctccaattacaaacctcaagttgccatagaaagtattaagaagtaggtgtgtgggagtcataggatcaaagtaggggtgtacgtcggtcggtttagt

SEQ ID NO: 45028 - DNA, 2700 bp, Cannabis sativa
  modified_base (1894)..(1895): a, c, t, g, unknown or other
ctgattcccgtatcctacttcaactgaatttcgtttcaaagagtttatttgccaagtcaaatgaagaattcggatttgatcgtccaatgggaggcttcattctagtttctttcttgaatgtttcctcatgagggtggacacctatatatgacatttttcactcatcaaatgtttctgttacaaatttatattttaaacaatgccagcattgtaaatattttttcttggtgtcttaaaaggattataacaatggattaaaaatatttttcaatggactccttgcagcaaaaaaaaataagctgagtgattcctatgatacaacgaagcatagtacctctaagtttagaaatttaggattatcttagacaaacactgataactaccacatcaagtgtctccctaaagatctcaaccactaacagatccaaaggaccactcaatttaggatgccacaccagcatagccaccgcctcattacaattggaatgcagccaacaccgctacaatcccagcaaactacctattcttataccatcacgaatgacataattcaggcacaacaagagagtaaggaagagaaagaaaaacttatcatacgctaccactccgaccttgatgatccctaacaacaactctactgctactacaacaacctttaacattaatcaaaagctcaaatgttcaggtgatgcttttacaactcgctccttaacgacattacgactatttttgtccaaaattagtcttggataaccaatgaagaccactcaaaaattgacctctccatcagctcaaaattgtaatgtatcatattgttgcgaggtcccaagcttgccaagccaatataacaaaatactcaaaataataaacaagaaccgacaacatgtccccacatacaccattcctcctaaaatataaagcttttctaaaatatttaaataggttatattttgtaatcataatgatacttgaaaaaaaaagttgcaagtaaataacctactcttgataaataattatttgaaatttatttttaacaaaataaattatttatttttttaaaaaaaaaattagagttgatacattattatgaaaaaaaaaataaaataaagaagtttttctccccaatgataagaccgtactaaaattaattgtttattttgtgtgtttttttttttttttttttttttataaaattttactctaatataaacataaaaaggtaaatgttctaggagagtttgagaaatttggcaaaggtatgaaatgcaactgtaaaatagaaacttatttcaaaaagagtatcgatttctaaaataaaaaaaagttatccttgaaagtgaaaaagtaaagaatttttagcggttaaaccttcataaataaagtttcacttacacttaattttctaagattaaattttagaagtaaaattttttaacctactgaactattaataaatttaaggtgtcagtaattgcaaccatagactgtttatgtatacactacgagtgacacgtttatttcgatacatatattattattatttcaaaatttattttaaaattaaaagaattaaaaataaaatctacattataatctttaaataatagtaatattattaatttgaaacaaaagtgtacacgtaagtagttcatgttgacagttaattgtaaaaagtagatcatgacaacttaaatttgctaaggtttagtagcaaaaaaaatttacataaaacaatattttttgtaaaatttttatattttttctttaaaagatttttttttataattttagggtgttataaataaataaaaaaattatattaaaataatatataaataataaaaaattaataataatacaatataaaaatacagtattttttgtaaataaaatnntaaaaatatttaaaattttataaactgtattttttataattttattatgtatttgtgatataataataatgaaaaaacttatgtcaaaagagtttaaaatataattcaaaaaaaaaagtaaaatataagtatgagacgaggcatctctctaagaaccctattctcaattttcttctcataaacactaatctcatcgtgatgctcttctctctctgcatctcgctcattactttgaccatttggtatgcaatggcttagattatttctattatgtacccacaaaatgttcttcttcaatacttcattttcttaaaaaaaaaaaattaatttggggatttttcagttattttagtgttcttgttctatgctttcgttagtaagcggctgagatttttactcaatctaatcagagtccaattctctcttttgacccaaaatacagatcataaggtggtaagtggtgagcaagtaactcaggaaaatcagaaatgagtctttctccaactctgctcaattcaaggtataacaataatatattctcttatattattatcttttcttacatttgggttctttaaaattgattagatttatagcattttgttcatatcataatgaaatgctggttatgtatagttctatttgtaaaagttagacaaactcttacttatattaaataagtatatacaaatcctcagatacaatcaccacaaatatattcaatctcatactcttttttctcttttggtctgcagaaatttacacacaaggaaaaagcttcaaagttcaaagactgatgattcag

SEQ ID NO: 45029 - DNA, 1618 bp, Cannabis sativa
  modified_base (31)..(36): a, c, t, g, unknown or other
tataattagtcataattttttacttttagtnnnnnnaataaaacttgtgactaaaaataagattttcccacgatgcatggtctcccccaccaacgggccaattctctttgaatacaaatgcgtcagtgaagtctagtagggacttctgtggggctgggaggtgttatacgagatggtgaaggggtggtttgggcgtgctgggcagtagggatgactataaagtttggtgtgaatgtgtcgaaattgctgcggttaggttggggttccatattgctcgataatttggcttttctttctttaatattgaaagtgatttgatagttgttgtagactagattaatagcttcaattccaataacatatatcagccgattattttttatgttatttttttgttaccatttgttggtagtggttggttcttgtaaggttatttcatgttctgcaaattgtgttgctcatgtattggctacttctgttaatagttttttaagagattatatttagacaaatgcttgttcacgctttattagttctcctataacaattaatttatttaaatgaattacatgatttatttcaaaaataaataaataaataaggggcacttcatggtacacctttaaatctcttcgtgtttttgaatatcataattattaaagatattcactaaaattttagaattttaaataatttataatttataaaacaaaatttaaataatttatttcacataataaaagaaatagacatgcaacatttgaatattgttttccccactttaaatttttttgaaattttttaaaaatttacaataagtcaacattttttaatccatgtatttttataatgtcaagtcataaacatagctaggttgcctagctcaaccttctggaatcaaaaataactagctcacccctgaatctttataatgtatttatatttaaaagaccgtttggtccttctattttggcaaattgaaaccctttaaacaagaaggcttggaagggtagaatagtacattttgggtaagattcgagaagaagtcaaattttattatattattagttttatagttgaatttcaggtgttgccaaataacaaacttaaaaacatatggttatattttgggtaaactaaaaatatggtattttctaaaattgtaataaacctttcctcataatttaatgtttgtgcaaatagacccttaatcaaaatatggtaattggtaagacaagctattaactttttgagtgaaggttttacttttatctagcctaaaaaggttactcttaaaaagatggtaagaagtagaaagaaaaaaaagtgtaatttacttaaatcccacttagaagtttatatacataatatatgagatgtggcacttgagttagtgaaattatgagtatttgtgaggctttaagttggattaaaaacaaaagtttactgatggtttggttcttgagacgaattgtttagtgactcttcattaaagttatttaatgaacgttgttttattttttgaaaataaaggaagctttattaataaacttctttcatgattacatcacgaacatcaggagtaaaatcattactcctaaaaacacgatcagcgaca

SEQ ID NO: 45030 - DNA, 2451 bp, Cannabis sativa
atagaagagtagtgtcatgaaagatgtacaaatgtgttgttatgttacattcacttactagtatacataaaaaactaaagaaaaaaattacaaattctatgaatttttatatatatgtatatatatatatatttgtgtaaaaatatggctttttttaaattaaaaaaaaaacaaaaaaaccaaatgttattttatgagaaaatttaacaaaaagttgaaaaatttgagaaaatcaagtagtaatggtaactaggtacctttatggtaatcaaaagggtaaccagttaccataaaaaagtaaattatattatttttctatatttttgaacttttttttaaacaaactcccataaaataattttgagaaaaaactatatttttacaaacttatactttaaaacccataaaaatgaaaattccccaaaattaaatgtaacactttaatttttttcatccaaaaatagaaatatacaaaactttattaaaattacaaaaatataacaattatgtaaattataacaatttcatatatgctttttagtctttttttttttcaaaatcttaacaagtttcaataaattaaaatccccccaaaaaataagcattagaaacaatattttttggaaatatataacataaattttaataattaatttatttacacaataaatgtgaaaaagagtataaataataattaaggttagtagtatatataattgaaaacaacttacaaagattattgcataaagattttgagttgtcaatgaaaatccaagatcacaattgttatgaaatcttagaagaacatcaacaaagtcttcatctatttcaccatcaccaatacttttctctgttgcctttttctccatatgttcatgaatgatttcttcaaatatcactgctgccctttctctaagactctcaagcttaggcttagagcgactaatctgataaaataatttaaccgaaggaaacaaatccgaaagtgcaaaccctaatgataccttagtagattccatcaacacggacaagaactctttgttgtgaatcctcgtcctaccacatgctgcacgcgaaataattccatacattaacatgttaagtctcgcattgagattaataacacttccaacattcgatgaaatcgattctatgaagttaaacatctctttctctctaaccggtttgaaagattgaactcttgtagcgcttaaaagctcttgcatgaaaatttttcgcaactgcctccaataatcgccatatggagcaaaagcaagatctgaagaatcataaaacattattttcgaaaaaagaatggagggtcttgatgcaaaagccatgtcatggactctcataacttgtttggcatattctggtgatgagattactatggttggaatttctccaatttttaagtacatcaatggtccatgtttcttggctaaatctgtgagtttgtgatgaattgaaggggtaataagttggtgaatatttcccaaaataggtaatttccatggtcctggagggagttttgaatgtgatgagttgatggtttgtgtgagtaattttattaccataaacacaaagatgaaagagaagaaaaggaatgggagagattgtagttggatctccatgtagaaattattaagtgattgttgagttgagtaaactatagctttgtcctttaaagtatgttatagctaatattttgtccttacaaaaaaaaaaaaaattaaaaaaactaatattttgtcatcttgctacaattattttatttttttttccttttattaatgaagataatgaatagaaaaatgtagttggtgtagaaaaagatgacaaatcacatgaactcttaattctattggacataaataatttatcttaaagtctgtagactttaataaatttatgatgttaaagctaatattaagaatcttcacacaattatagagaggaaaccattttataaacatgtttttttttgacttttcttttgtaaaaaaagaaaagaaggatatcactttataaacatttcccttttatcttgtcatgttgtgcaagtggctcatttttgacaattaagaataaggaaaaaatgtgtgatacattaaagagaacagtgttattacgaaactaacaaatattctatggaaattaagagaaaataacaattggaaaatggagcaacattaatatataatgatatgtatgcatgacaagtggcaccattttgaaggactggaccaatctaaattaggaatattatataggaaaataatatggtaatatatagtagccagaaaacagatgaggaggatcactacaaaaaattatactaaaattatattttttattattatattattttattaaattaaaaataaatacaaataatatattttttaagcaatgcaatatatgatgcatctctattcatatatatggctc

SEQ ID NO: 45031 - DNA, 1706 bp, Cannabis sativa
  modified_base (1661)..(1681): a, c, t, g, unknown or other
tagtgctaattgcctttactaaaccaaattactaaagcggtcattacatgagttgtcatcaacagagtttccacttcctttctctctacgaaatttgatttctccacctctctattttgcggcagtcttgtgtaacattcagatttataatgcccaaatttatgacatttgtagcactcaatcttggatttgtcaagcttttgagaacgtcctcttccccaactttgaggaaaaaatggctcattttcagttctgaagttctgaaattgtttgcctccatagcctcgtgctcctccatctcgacctccttgacctctacctctgcctcgtcctcgtccacgatctgctgatctattagctgcctaagtattgttttcagttgatgcctttagagcttactcctctttctccttttcttgttgagtaagtttatactcatgaaccaacaaagaaccctgtaattcatcaactgaaagttcatcaatatcatgagcctatttaatacaacaaacaatataattaaattttggtgtcatggttcgaaggatttttgcaactacagtgacatcttcgatcttatcactgtgaatccgcatcttgttcacaattgccattgttcgagcaatatagtctgacaccgattctcccgttttcagtcgaagtgtttcaaactccgtatgaagtgattgaagctgctgcctctttgcttttgtagagccttgatacttcctctgcatagagtcccaaatatgcttggaagtgtccttgcaaagaatagtctccaagattgagtgatcaatagcttgaaacagataattctttgcctttaaatctttcaacctttgagcttctagctatgttctttgtccatttgacactgctgtgtcacctgctggttcaataattccttcagagaccacttgccaatactctttagatcttaaaaaattctccattaacatgctccaatggtcatagtgaccatcaaacttgggaatagctggttgaacaaaactattggtggccatgattgatctgcaagaccaaaagaataaatgaaatagaaataaaactgctgtattactctctatctcacacttacttttttttctctctcttatattttggctctgataccactgatacaataaatatattatatatatttatacgaaagaaactcaaagtaaagaaatccaaataatacaccgcttgaattgatacttgattggcctatatataggcattacaaacaaaagttaaagcattgaaatgactacatgacatcacgttatttacccattaacccactacccattaacatcatgaacacctaaagaataggacaaaatattgactcaacaaaaagattaaacaaactacatgactcatcaatttaaaacatcaacacatgctccacactttaacaacatcctccttggcacatcaggctagtctttctagcccccactgggagtcgcctccacctagccatttgaagttgaatactgaggcagcataagatctcaaagcttgcaaaatgggtctaggatttctgcttcgagatggtaatggaacagtccttgccgctgcatcttttccttgggcaagagttttgttcacctcttatgatggaagctctctctctctctctctatctnnnnnnnnnnnnnnnnnnnnntctctctctctctctctcgtctcac

SEQ ID NO: 45032 - DNA, 2355 bp, Cannabis sativa
tttagatcacttaatgatggggttttctccaacaactgtgcctgtattatgacaaacccgaacaagtggaacaatgaggaacgataaagaaagttagaagctagcatgttgagataggaaacagaagatttcccaatggaataagaaatagaagatcagaaatacaaaccttaactccggctggaaaacagaaggcagctaagtctttccaacgcattgctattttcttccccggaggatatttgaacaatatctaatgaaacacaagacttaacacaatgcacaagttgaccaaatagcaaatacacacaaaacaaaaaagtcaattactcaacctgaggttccaagctagggaatgaaggcccccgctggcgaagcaagttaaagtctactaattcagatcttgacatctccatttcccactccttccttttagcaaatgcagcctccacagtctcgagattagcatcaggctgaagcccagcaacaacaaagtgttcaaataacgacgttggttccttgtaattggtatgatcctacaatgacatcctataataagaaccccaaatctttccaaaataatccaaacccaagtgccaaaaagtgaaattgaataataaaaaaatcaggtgaacattgaaataccaaaactttggagtgaagctgataccactggcgtttttggttagccaagacctcgggattgaaattagaacggcgaccttcatcccttgaattgctaccccatttccaagccctctgaacctgagttttcaacctatgaaaactattacttctattgtgaccactcaatacctcactttgggctcttctatgacccggtcccggtccaggtccccatcccaatggagaggtattagctatgttagaatgaccaggataaacactactcaaagcttcaccagccactctacatgcctcctcagacaaatgctgcaacatcaaaattggggaagaaggcctatcttcatcttctctgctatccattctaatatcatttcagctcatcttgtaaaatcttcatttcaccattatcaacaacaacaacaccacacactccattaacaaacccaaatacattttcacatatttcctctcaccagttcttcaatcacatcaaaaaaaaccaacccaattaaagccaacacctttgaaacgtaagagtttgatcctcaaatttcaacaaatacccagatcacaaatacgtccaataaccgtgaaaatgacccctttttcacgtaatctccactttggagttataaagttttgatttttaatttttcttttcaaactttcttgaccaaatcatataacggatacccctgatcgcgaaaaatgatcaatgcataacggaaaagagagtcaaaatcaaacatttgttattattattattattatcagaacaaaaaagattcataaccgaaacagagtgtgaaaacacataattgggattaaattcaataactgcttgaacaaattaaactgtcttacagtgaataatagcattattatatattaaaataaacaaaatttgagaaatgtatggtacctgtgatttatattttctgttgcagagagctgtatttttttcttggagagagagagagaagaagagagagaagttgctaaatatagattggaatttcaagaaatgaaggacaaagctttatataagttatgtatatacatagcaatttttagcagccaaatccataaataaataaaaatagaatttttgtaatatttttctaacgtaattttcttggaaagcttataaaagatattgaaatttaggtttatttttattaaaataatgtcacaccgaaatttttttaaaaaataatgtgtttttataaaataacagtaaaacaactaaaaaacaacagtagaacatcagtaaaaacttaacactatacataatataaaacttaaaaaaaaatcgctccataataaaaaagtaaaaaaattaaaaatttcaatatatggtgtagataatttatttttttgcagagctataaaaattattgtaaataatctcctatagttatattttgctcatttcgttaaataatttatttattgatataatgttaagttaattgttaatgtgattaaatttaaaagcacacaacaaatattaaattaaattttaaataatttaaaattattaaatagattcttataccgttaattatatttataataatttgtataatgttaaaggaattttagtaacgaaaaacttcataaacaaaactctacaaaaattataatttagatgaaaaaaatcttgtattcattattataatgaataataattttgttcaaaagaaa

SEQ ID NO: 45033 - DNA, 1050 bp, Cannabis sativa
  modified_base (999)..(1002): a, c, t, g, unknown or other
tgaattactcacaataatttactcagtaagtaaacaagtgactctttattatttcttttattttgaatttcactctgtttactgaagtggaaactggaaaaggtgaactttactgttttatgtatattataagttaggcacattaaggtgccttgcatataattgatctgtcacgttattattgattcataattttttatattatttattaaattaattactatgtgtatggccaaacatttaattatatgaatagggatatgccgacttttgtagtgctctagcatttctcatattataagtgtttatataagaaaagaaccaagtgcccattgaagaaagcaaagtttttgtgaaattttacaactttccgctctttttcttttatttttgctttacgtattgaaaatacagactgatttgggaattttcctagtcttctatgtttcattgatacgaaatttgtaaaatattttctcttccaccgataatattgttattatgaggagaatatgttatattccagactctttactatcttctgtcctttggacgcttgtccatttgtaatgttatatacttatcatatgtttccattcttaatttttttaatgaatattatctttgtttgggtaaagtcttctacggcagctaggcatttatttggaggatatttttcagtttacatattatacagagttggtttaatgttgttctctttacaggaaattttgataacttctctttcatattacatccaaacaggggcggacccacatagaagcgaggtggggcagtcgcccaccctaaaaaaaaatcgaaaaaaaatatatatgcattttagttagttacaacgtatatttataaataaaagtaatatatatacacataaaataagttttggtataatggtaaagtcatttcatacatttaaaggaagtcatgagttctaatttcaataaaagcatgtttactttaatatttttattttactttttnnnnctctaccaataatacttatatttaatgtcttaattattgaactaaata

SEQ ID NO: 45034 - DNA, 1383 bp, Cannabis sativa
aaaaataagctcttcatttctcttagagcccaacaccaccaagtccccaaatcctaggatttttgctttcttatgacaatccaagctttccacaggcttcctcagcaattttcactagtgggcaagctttcaaatctcgttctttacttgtttccttaaagataccattattgtgttcaagctttttacattcttgattctcacgttagattgtaatctttttggtattatgatccgcatgatagttttaggatgcacaatgtatgatttcctaataaaaaatatttgattttgagcttcgttatgattctcgactctttgtgtcataaagaacatgctcgagtcttgggaaaacacattttttgatccattagacatcttggccggcctatggggacttgtttgagacctggctagcccgtggtgcttttcgtggaggctggccgattttagggtttaacctacgaccctggttggctcttgcattggtcaagagacgttggccagttcttgcatgggtcaaaggaccttcgccgacccactttaaagccttgggaccctggccagcctagggcttcggacctaagggggtggctagttttttgtcctcttttggccttagtaagaatcctattatggccttgtaaacctgttcaacccttgtcccatacttgcttcccttaggtactctatatggcacttttgggtgactctattgtagtcaagtaatcaacttaaaactcaatgtttttccaagtttttacacttggaaccatactttgttgataccgagctttggacaatggatctatttggctagtacccttaggtacagtcaaccagagtcttgtttaaatcttgtcactttatctggttactcacctccccttatcttttgtgtgcagatgatcccgagtgactattgaggaggtgataaatgcattgatgaagatttactcaatcttccctttaaaaattagtgtctagctgatccttctaatagttcctcgagtgatctcaaggtcaacagtggttctctagaatttgaggtccgacatcactgttatttagagcgaataggcaatgaattttatggccagtttgtctgggagctgaactaaggttagagggagttacttcaagtttgtgggcttatatcgtccaagatggcgtgcctaaaaccttgcccattggtcgggcaacttcttcagcgagagatctccctgccacaaagaccacaatatttgttggcagatacttggggtcctttatggcgaggaccaaacagatatgccatagggcactacctcacgaccctcacattgctttgctggtgaccagagggagggtcagtgttgctgaggaggctgcacaaccttgata

SEQ ID NO: 45035 - DNA, 1160 bp, Cannabis sativa
gttgtttgaccaaaaaagtacggattggatcggatgaacacccctatatatatataatctcataaaccaatctctaaaaataatttgatcaatcatccacaatttataattccaaagtacatcattctggacacgctatatatagtagaccacgactgccatctcaacaaatagcatgcttcgtcgattgttgctgaagtttttggctcgagaaatacatcgcaacagtagtgactgaagttgaatgctttttacatcccaattcagccaatgttttatcctctccaaatatttcctgttataagcacattcaaaaaataaatgctcaatgttctcattagcattcccacataataaccatgtcatatccatattcactatattatcgatcttttcaagctttttctttgattggagccttctctacattataagccacataataaacctgtgctttggagtgatcattctctcccaaaaatatttagtccaaagtgactttatcccttttgttcaaatagtagtttatgctcaagttggatgctgtaattttgagaaacaaagttatcaagattcaatttgagcttgattttattttttacaactaccaatcttttctaataccaactagctagaatttagcacattcatagtctcactaattttggttcttcagataaacactgttgatacattttacaaacaaattatctttcttgtttgcaatcgcccaaacatacttccttatgttctaatccactagtcttctaaatccaaggccgtatgaagctttagatgaacacacgtttttcaagcaataagccgagcaacaagcaataagcaagttttccaattcactttttttttttttttgaaagatttaaatatattgataacaaaatatatagcactttattggtaacccatagaaattataaatctgaaaatactacatttgtattcaatatattcagaaagggatgaaaccactatatatctgtaaattagttgtttataaaaaagggtaaaatatatacgtaaattttggttttataacaaattattttgacttaaaaataaagatggagatatgatcaaatctttgttttgagtactaaatcaggggaacaaatctaaaaagttctagcgtcgtcgtagtc

SEQ ID NO: 45036 - DNA, 1775 bp, Cannabis sativa
taagacagaataatttgacaatattatttagaaactctcctaataaagcaaatcaagtaacattatcattaatttgattcatagacaacacacaacataatatggtgcataagcctaatcttttatcgttgtgtaattagattaacaacagaactaagaaacaatcttgtcatacttagaaatggggtcaaatgttattggtttgctgataaaagtttaaagtaagtcaatcatttattcccccatttcaccgtccaccaatagatcgatagtgtaagaagcttgttccccctgaatgataacctcccttctaagtcaagccaaacataacacaacacaagcattcccatatcaaatctaccctgaattttgtgtcttatattatattaattaaattataaatttatattttatatgtagatttatttactgggacagtgtcacagtgttgcaaaatatgattaacaaataagaatgaaagaaatataattagaggttattatccagatgggaggtataatcttctcattctcattatatctctctttaactcagtcagacaaatagcatatatgtaatcctttgattagatttagaagtgaaatatacatattcttttactgttacaatacttctcaattatttattattgatatgctaatatttgttagtttgataattcaacacaaagaaaataaaaacacattttagcctaagactaacagatatactccttttcttttttaaaagcaattatacagatatacttcactcataatattttacatttcatattcaacctaaaacgggtcatcgcaatacaaagccatcttaattagaacaatgaggtttctaaaactcatgtcttcctgatattttatacatattatatttaatcacataacaataataaaaacaacaaatagaagttgtctcaacatgtgaagactaaaatctgttataatttctttctttgaatcattttatcaaacacttacagagcattgaccaatagttcaaaagttccatggaccacaattatctaacgcatcccggaaaactaaccaagaaatattccagacaaaacatcccaaagttgcaagaaaaaaaatcagagaaacaaacatcaatgtatataaaaaggaaagtgagataaaagcaagaaaactcacctctggaaccggacagagcaaaggtgaagtccggtggaatttcttggcataactctaaatttacataacacatatcagttaggcaactcatcaaaaaagaagaggacattgtcaaaccaaaattctagaaatgaaaatagcaaaagtaaataccaattgaagaaatgagggagaagcggagagacttgtgaatcgtttcccaagctcgtggtgaggagctgccgtcagaatagtcgaacaaaatcgtggtgaggtctgaaaattagggttattgtcgagagagatgagatttggatattggtctgaaattttcgaacctgtcccaatagtttcagcccagattttttttttgaataaattattaattaaatataaaatgcatctttttccaacagttaataagtgttgggtatactaactattctccacagttatacactgttgggtatacttactattcccaacagttaaaaaccgtcagaataaattatatttttttagaaaaaaaatctatttagtattgccaacggttattcaccgtcagcaataactatcccaacagtttttttgctacagtgctaaaccgatgggaaaaacttccac

SEQ ID NO: 45037 - DNA, 5615 bp, Cannabis sativa
  modified_base (5579)..(5590): a, c, t, g, unknown or other
tttaaaatttctatcccacattttggttccagttatgggccaatattagagtacatttttgataaaaatttagattcatagtatgttataattttaatttatcttttaaaattttattatttgttaaattttggctaaactcaaaattatgattttggggtgcactatttatttattattgcttaccttcattgatatcttgtgattttgaagtgaacccatagtggacacggactttcaatatcttaatcgacggttattgtcaacattagctcttgaagttatgctatttggcgaggtagatgttgtaactaaatctgttctaactgatttgggttcttatatggtgaacacgtttacaataataatttttttcctttaatttatagattttgaatgtcgtttgtgacatgctaagctgaaagattgggatcgaaaggagggcataagcggtggtttttgaatacatggatgagtgtaagtttatttatgaatgttatatttaatttcattattgtctaaattaatttaagttcattaatataggtgtcatttatcttgtttgggtgtttagtgttcaattagtattgataagctatttctaagtactgttaaagggaatcgtgatggaggaaaagagtctgcacgacaattctatattggagatcttgctatttgcaaggaagtgagattattataatatgaaagttctttttttgtgaggaatgtatttttagcgttatgattcatttggatatgttgcagatattaataccaatgcacaaggatatgcattttttttttctttttaacgtctctgtggagcatgaggaggttgagatttgggattctttacttaacaatggtaaatctagtggggaagacatggtgaaacctgtggttagttatgtttttgttttgatgattaatatgtgatttaatttgtcaacaaaattatatatttacttatttatttgattttttcgtatttttagttggcgaaattagactcattgttggctactgatattgcaactttgaagttgttctcggagaaaacgtcccaaagcaaatggcttaatttttcaattactgggttcaatgtcaagacaatcactatacctcgacaaactaattcttatgattgttgaatatttgtcattaagtggttggagcaccgcagtgttgttgattccaaggtaatttttaccaaataattataatagttgtatgttgtctattggtaccagtacttaaatgactatattcaaaattttaaatgaagatttgttaatatatatgttaatgagtgcacatttctcaaacttgtttcagtttcattcacacaatgagagggcacgtattgcagtgaaaatagttacatctgaaatgaacaaattaaaagatagagtgaacttcgcttccttcagagatcgcaagcccttcactcagtgtggtagtagctaaagacaaattcacccatgagatgccaggaaaatttagtctatcactttgacaagggattttagtttggatatgttttttcatttacgttttgattttaactcatcaacatcatcatgatcctaagaatttgtttcatttttgagtttcaaatattcaagttggagatgatgatgaagtttatccaaaggtttggttttgttttaatttttataagtgttgatgtttctcattctagtagtaaatgtatagtgttctttgttttagcacttgaaaatagtagacatgaatttgaattaacattgattttgtctttattttttaatctctttttggtttattataatatattgatttactagaaaatcagtggttccccatatcagagtagtagttctcaattcttggaagtggcttcaccaccctattgtttctactgtgattttgcaatagttattttttttatttctatttgatttactataatatattgattttgcttgtaaatacagttgtctacctcagctacaattgagttgagcatttcatatttgagcttccttcattttttcctctctttgtttttcaggttggagtaatagaaaataaaaataagttttaaactattggaatgtgaaagacttcaactattgaatccactcatgtctaacaaatactgtttgtcttgctgcagcaaaaagttaacaaaacttaagcaaaaatctcaggttaacaagaactccattaaagtgcataaaactcttccaaattctatgctatcaaatctatgaacctaaccgaaaatattcctatgccaatcaagctcaaaaatgctattgcataaagaaattaatacactaagacatagggtgcttcaacaactcaagccataaaatgaaaacaaaacaaaaaaaaataaaaataaagaaaattaactctattatcattatgtataattttaattttaatattttaatgtttgtttttttaacaaaaatatttactcaacttgttctttttatttcgacattcaaagtttgaaacaaagtagaaaataaggatttgatgaaaacataagttgatgtattgtagaaacatgttgagtccaatagaatcttatcatgaatcaagtaactataaacaaagacaacgaaccaccaacatttgaagttggaacagccacaataatggatgattaactttagtaaaaatcaagtgaacaatacaactaaatcaccaaaggagtcttgctcttatgacaaatgactaacacataaccaagtttccattgatgtgtaggaggagtgaaatcagtatgcactcccccaccactgcgaccaagtttccattgatgtaggagtggaataagtatattgtttatggccaacattgtcatcttctaatggtaatgtactggtttgtctttgactttggtcaaacatttcttcgtcacttagcctttcttcaccattgtcactctctaatacatcatcagattgttcagtctcgtcatcatattggttgccaaaatcttcatcttcatcagcccttttagtccttgtttgtgggcatattttcttgttatgtcctgatttcttgcaaattgtgcacttccttttattcacagccttggaaccccgcattttcgctattccttttgtctttgagatgtgtgggtcttctacagttatatcattttgcttaattttttcttcctctctgcctctcttattttctaccttatcatatttttgcaagctaatactcatgttctccaacaattgtaaaatttcatagtaagcttcatgtgttttagccccaatgtatgcaacttcagccatttttgtggttatcctactaaatcgagcctgcacttctgttgacgcattctcacattcacgataatgctttgtctcgaccttctcatctccataaggagtttttgtccaccttgttactagaagtgacttgcgtatatcctgcactttcatatacttcattgctgcgaagacatgtcgacatggtattccgaaagatagaaagtgttgacattcacacacaaaaaatttattgttagagcttactaagactacccttcttatccggcattctggatattttaataactccaacaaagttccattatcagtctgaatcttgctttccttcaagtatcttgcctccttaaccatctcctctcggactttgtaatacatgtttctcgtgtacacgttagataggtacttctcaatctgagggaagcttgttttccctaattggggagttgtatgcaatctatcataatcatctttggcctctctatatagaattaaggaaagtgacatgtcaacagctcttacaaatacatacaactttaggtttcggttgagctttttcttcagtagagcattaaccccctcactgtgttgtgtagttgacatcccacagaaaaaatttccccttagaaaagtttctgcccaatttttacgtctttcatacaagtcattggcataacgggtattttccagaatatactctgtcaccaaagcggcccatttcgcctcaaatacctcttcctcgtagtatttgaacacaagttgcgttaatttttgagcaaatccagggtcggtgacattacttactgcattattatgcatgtgccaataacatagcctatgaattgtatccggcatcgtctcctccaccattgtcttaagcgctggatcagaatcagtgacaacagtctttggatgaaccccattcatacactctaaaaattgttgtgctgcccatatgtagctttctgctgattcattgtctagtaatgtaaaagcaaatatgatagttctataatggttattaataccgatccacaccaataacggttttccttatgcattggtcttgtaggttgaatccaaagcaatggcgtgaccaaaagtctcatagtcaaattgtgcccgtccatctgaccaaaatatgtgttgaagtctgttccttttatgaacagagtatcttccaaaaaatcgatcatcattgtctgctctaagtatccaattgcacgccttgcatctgaactagatagtctcacttgttccatgtttgatattttgttgtaaatgtctgactttgtgaagggcatcttctcgtaccccccaacttgaatagccatgtaagataatatatgataagtcttaacaccagcttcccttaacaatgtagcagtctcaacgtatcctgctgtcaccactcgatttgatcgaagaaattgtttgtgattatcagcagggagcgcatgtgaatgggttgtgataaactctctgcaaatccatgtattctcacctatcactcggtggaccctgaaagcaactttgcaatcaactcgagtatgtgcctttggctctctcgtcagatcattcctttgtacatgtttttccattctcttccctcatcgtgagcacaaccactctctttcttgtaaaagaccgaacttgttaaagcgcgcgtgtcctttacgaatgctaaatccaattaatttggaatacaaattaattaattcctttgccatttccagtgagtcaaaaacatggccaactaaatcatctcttgttagcagaaacggatcttcctcgtcaatttcataaatttcaaaaatattttcttcttcatcattttcatagttctaattgccacaagtattattgttgttcatcatttcttatgctcctgctctattgtctaccatgttgctctcatcatagggttcctcaccattcatatcatcttggttcatcatgaaattcttttgcatcaatactcaaaggttgtgtataaagaaaagataacagtttcactataacactaatacaaatatgaataacaaccacatcattcaaaaaacatcaaatagtgcagaacttttaggtattaattttcttttttgaaatgattcaacaaactttgactttaatattcctagagttgtgtttagttatatacgtttaaatgactacctattaagaaataaaaatttaaattaataaacaattaatcctacatacgtttgtgtgtatctaaagtaaatgatattaattcaatcttcccgggatccaccnnnnnnnnnnnnttactcacaatgtgccctaggaagg

SEQ ID NO: 45038 - DNA, 2274 bp, Cannabis sativa
ggggaggttaaggctctttttgcgaaggtgtggaggaggcggttaggcaaggatacaagaaggtgattttctagagtgactcttctattgttgtatccgccttcaaaaagaaaagcatgagatctgtacgttgcattataacattcaggatttggttggcaactttctcgcttcagcaatgaattttgccctttaggagacctgctggattccgagaaggtacaatggtgtggcccatacagtggctagatgggaaaatcgtacgaacaaatttgggatgtttgatttggctcgtgaggacgactccctgtgttctgcattggtagatggctggccggcttagtattttagtagtaagttcggttgtggcggttggtttttagttattattttccttttctagtttctgtgtttgttagcgtggactatctagtttttgtagtatgttccattcttgttgttgctctctgggtgttttcatggacccatttatcaaaaaaaaaaataatcactatctataaagttttcattctaaccaccataaaatctttaaatgttaccaatcataaagtgggcgttcatggtattaattgggtaatttggaagttttttgagctgttagaaaagctcttaacgttcaaaaacgcacacaatgatatgatgaaaaaaaaaatagtaattggttactagttactagttttttcagttttcgtcaatttttctcaaaagtgttccaagccactcccacttgattttgcaccatttatacactttataaacgtataattcaattctccaacaattataatttcaatagttattattcattcacattcataaacaattagtaatatcttttactaatttaagaataatactgtaaaaaggaaagttacataattttatgatcgccatttttcaaagatttgcaactctttttttataattgtattaaaacactaatataacctcctattatatgttactatttgacaaatatattattttcttacacttaattatttactatatgatattatataaattgtctttggacaaaattatcattaacataatatcttctctctcaaactaaacactcataccctacaatttttagcctttttcttgttgtccatgatcgccagaaatctaccgtgataggggctcaacaaatggactctttttgatttttttggtaaatactattttgaatcattatattttgtaaaaattattaattaaactatctattttgttaaatgataaattagatcctgtatttttttaaaataatactaagtagttttgtcaaaataaaacttaataataataaatattatgacaaaactgattatattttcttacatatgttcctattaatatgttcctattaagaattatcttcaagttacttgtattaaaaataaaattgtcaacacttcatcctagtatactatccaagttaagtcacaatcttctaagacctagccgaaatcaccaccattggctatatattcacctcttccctgtcgaaaattccacctagaggtgcaggactcgaagacgttgttgtacctacacccaaaatcagtcgagagtccctctagtcgggcttccaaagacgccgtggtacatttgtccattgttattcgcacgaccataaacgcagttttgataagtctaccacccatcacacagatatgtttagtgccaataattctcttaaagcctctctgggtctttattctatgtacatacatatattatatatagattttatatgcttattattattattgttatttgtagtttgaatctcataaatgtttttatcaaaattctgaaaaaaaaagtgattgattattatatcgttaacatatattgaattagtttattttgccttttctattctcaacttatcaatgacaataaaaatacttctttttgttagccaaaagcttgaatctaacaaagcaatgccagaggagacgaaggtgatggagcatcaattccgatgttaatggtggtggcaaaataaattaaggttttttgggggtaaattttgtaattttttgtatccatttttgggcgttttgtgtttgtcattattttgacttatcaaaagaatttgaaatgttaattatataaatatatggaagaggtttcatggtaattacatttttttagccattagattattattgaataattgtgattaatttagaaattaaataaaaataaataataaacctataacctaatagtcaccta

SEQ ID NO: 45039 - DNA, 2067 bp, Cannabis sativa
gagatagaagaccctgaggagaccgatcctcaggtagctcagctcaaccaaactgtggctgacctacaacgactgctgcgactgcgagactctctcgataagaaacatgaacagtttcaacactggttagtggaaaactggaagagcatctaaagtcaatgtgttgattaggaacaacagtgggctaacctgtctcaacggattagagaagcttatcgttataattgtggaactacttcccgaagaggtttttctgagttagtgagaaagacaccccattaaccaactagtcacacgggaactagtgtccaatgaaaaacggaacaccactactacacttgctaaccgagcaggaactaggcaaacactaggcgtggagacctcccagagggaaggtaccttcgatcaagagcctgaagccaaccaatgggtcatccacctgatgttgaatgaccttgcaacaacgatagaaccaagaggaatcctccaccaagttctcctcatcattctcaagaaaccagggctcgagaccctacaagggaaaatgggacctgttactcaacccaggaagtagtaggagacgctacttccagactggaggtcagtaggtaaggacaaatgagccacttcatactagaaagtactttctagatgaaaggagtgaattgtgtcgttacttttcccgtggccctaatggccaatagtacgagtacttccctcgagtgttcacttagaagaattaaacctgagaaaccaattcaattttgtccacacttgtgatcttgttaaagactactttgagggaagtagccattacaatgctctgaatgaacattcccacaacaggtcatcccgagacgatccagagttcatttcggaggcctcaccagagttgctttcatgaccccgtggtcaggagacaactacaagacctaagtcaactggagtacaagaatgacttggaagaccaagagaccttcgtgacctcttgaacaagagaaaaatggtggatgtgggaacttctaaaaaagacagtgtctcggtaacaaaagcttcgtctgggacacagaccaccaatcacggggtcaattaatcagaatttgacaccttagctgctttagtgaaggagatcacgacacctaagttgtttgaatttaaactcgatagagaacaacgctcaccactcttcaaaagaatcaaagctcttcccattcttctaaagttcaagaaccctttctggcatcaatacattggaaaggaagatccactgtctcacatccactattttgaaatgcaaaccaatatgcaaggtgtgagagacgacgtcaggtgtagaatcttccctgccacgatgataggcctagctcaatggcggtaccttaagctcctggtgtgagagacgacgtcatgaaaagatctagttgatacttttggtaaccaatttgctccttcccgacaatgctagatcaagcccaatgatttggtggatgtcaagcaataggaagacgagcccctcaaggactacattcaatagttcttagaggcagctgctaagaccaaaagtcttagcgagcacgcaagggttatggcactcatagataggctcacggagatgagtcctctatggtccgaccattgtctcaaggtagtataaaccatgaacgacttcttagatagagtagatggctttatcaaacttgaagaagccggcacccaagcaaagggctcctggggtggcaagaagaagtcgccaaacactaaagctcctgctactgaggtgtagggcaatgttaagaagggaggttcaaacagagggaagagagccaacaacggtggcaagcaaggtaattctcccaaagaaaagaagcctaagactgggggcaagcccttaagagattatgagcccttaaatttttggttttagtatttagtgtcactccatatttttagtgacccacattttgtgtaataaacactgaatatttagagtctaatgttgtgtgtcactaaaaactacttttaattttttagtgacccacacttttatgcgtgtcactatatagtgtc

SEQ ID NO: 45040 - DNA, 2698 bp, Cannabis sativa
aaaaaaaaaaaaatcaaataatcaaattgagatatacgaataggaatcaataatcattaatcaataaataaaactaaagaccgatactgtaaaagtagaataatatatctacaatttatttttttgagaagatagtatattctatggtttcaagtttaatggggtggatcccaatagaaattaataggaaatatttagtgcttaaatccatccatgcacaaacacttaaacctgacaagtccggtctttttcttttcaaaataaatattctatctaactgcttagccaaaagacaagttgtaaggagagcttcttctcttgatagcttcagattttgagggtaacccttaaggggtcaatctatcaatttttgtgtaactacggctccgactacgactgccactcctcccctttgaatgagaacgaccacgaccagggctagggctcctagatgagtctctctttgaatcatattccctaacacgaacataagaccgagaaaatgcattccggaactcagagtcatcaagcttttttattgcatacttcatgtcttcatagttagtgtagtacacgattcctgttgtaaaaccaggaggccttggagggagattcccaacgtaaagggttctgctcgcacgagtactcattttatcccggacaaaattgaaaatcgcactgaaactcgaacacgaacgcatcaaagattagggttttcaatttctataaaggcagatatcgcaattttgaaagccaatggcccaaaagatatttcgtgtttttcaggttttacgatttattcattctttcctctttaattaatgagtgagtttgagaatttagtttgttttcttctctttgtttttagaataatcggtggatctcatgattttagtaaatcgttaacttttcaaaattaaaaaaaaaaaaaaaaaagatttttttcaaaaattgtcattttttaataataaaccattttatttttaatataaataaaaagtctaaaccaaaattctttttatatagtcaagaagaaggaaattaatgaaaatgagatgattttggaaggaaatcaaagccattcgtgactctgatctcaaccctgataaaaaccatcaaaccagaaccttgaagaaactcattctcccaaattaattaagatattatattagataaatcgcaaaacaaaacaataaaataaagtaaaataaaataaaaaattaaagatatgacatctagcaatatcaaattcattcagccttttaaataaaaaaaaaatgtagaatttaaaacaaaaagctatcaagctctcttaatatccatattaagccctatatataaataaataataataataataaaaagagaattacgtacctatgtattattttttttattttttttcttcaaattttcagtttcggttgtttctgtaattaatatatcaattttaattacaatttaagttaatttgttgctatctgagtttttatttgtattttcgtaaaaatatgaaatatatatatatatatatatatttcaaagtaaaaataaaaatacttctaaacaggtggttgaagctatttttgagtgaattggttttagagcttggtctctaaactttgataattggttagtgatgctatctacaaaagcaagttgcactaaagatcatattacttatgccttacttgctgccactgtttataatgtgtggcttaataggaacaagtggaaaaaacttaaaaacatgaagctctcactcttttgaaaaaaaagtggaagttgatcagtgattaggctttttttggttctctctgtggagtgtgaccctgtgtgtgtggctcgtagtttagctgtggcttttgtgttgaagtcggtgtgttggttcattgttgagtgcggttggtgagattttcttggtaaggatgagtgaagagatagaaaacattatctcattaacaggtggcatgaatgtcgaaggggaagaggagtgggaatcaaacgaacaagtggctttgaagtttaaggaaggttcattggtgggtagagttttagcaagaagacattgtactgtcaactttttcaaaactgttttcagtaggatttgggagaaagaggggggttggtttgtggatatattagcaaaagagaaagggtgtacgatacttgggctctcatttgatgataaaattttggctgcaaaggtatacaagaaatccacatggattttttatggtgaaatcttaatcactgagaaatggcctccaaatggtaactggaaagaggctagtctaaatatggtggagtgttggattaagatgaagggttttccccctaatgctttgaccttgaataatgttaagagattgggcaacatgttaggagaggtttcggacatccaatggttgaataccaatgtaatgctaatgagggatacggtgagagtgaagataaagttccctacttctaaaggagcttttgttggtagatacattcctaataatggtggccaaacttggatccagttcaagtttgaaagtctccccctgttatgctttacttgtggccactttggacatgaacaaatggattgtaggaaggaggtggttaaaacgaaacacagctctggtgtgttggtacctattaaatgccaaaatattacatattttatagtgtaaaaatacaaaataaaatt

SEQ ID NO: 45041 - DNA, 1287 bp, Cannabis sativa
aatctgggtgcccattaaggcttctgggtgcccatgtgctgtttcatgtatactcgtctccaaagtttgaaacttggttgtgacatgtctgtcatgtatcttaggacaatagccaatcagatttctcataagaagttgataggaatgaaaactgacgcgagttggcacacatgatgtcaacatgggcgcctagcactaatgctggtcctagttgagccgtgggatgtccacgtgacatcctcagctccatggttcttcattttagggtcatggagacctatttgttgaaagacaactcagaaacaacttcgctaaatcttgttacttacccgggtgccccattgtgcaggtaacactaccctatcctgggatgcaaggccctgggattgtttccttcatgccatgtgtcaaaaatagtgtcaatatcatcaagccaaatttttttagcaaataggttccatggcttcaaagctcaaactaacaaagtcacgagctcatataccataaaattgaggggcaattgtaagagataaaaataatcttgagggtaaataagtaattcgaggaaggtaaaatgaggagaaaaggctgatattgaaatatgggaggacataaagagaaacgcaccattccattaaagaaaggaagcatagcaataagcttaaagacgaaagagcataactctagataaagagagacgcggagcagagcagagctcgagaaggaatagaatgacactttaaagagctttgaaggcagaaaggaggcgcgatgagcagcaaacaagatttaacacatggacaaattagaatagaaaaagagaaggaagcagggattcctttctacctataaatataagatcccctccttcaaaatgcaaaagaattcttgatcacaccagattggttgaaactctataggaatacaccatcaaatttgtacttgaactcatgaagcaagtgacctagacctaattgagagaattgtgagaaaaattatgtaaaccgaatgagaatgtaattcgactagatcgaacctgatacaaagaattcaaagtcttattaacaatttgttgtagagtcaattttcgacattatcaatattaaactaactaaaacttgtccaaatcaagtttgttggcattaaagttacaacattagcactaagaatatatttccttcaaatttgtcatgtattttgtgactgaactctcaattgagactatattaccataacattagtattatccatacatgttttagaaaatgaataataaataatacaggg

SEQ ID NO: 45042 - DNA, 3100 bp, Cannabis sativa
ttctccaaaaattcttcaaaaagctgttttttgactgtttgccaaacacatttttatcacagttttttcaaaaagcagcttttagcttttccaaaagctgtgccaaacaggtcctaaattaaacatgctacgaatagaagtaaatcacatccacaattaaaacttaaaaaactcatatattgcaacaaacttactttgcccagcatgagactctccaccaggtgtacatccaaatccaccatccaggtttttgcaactaacgatatacttcacagccttctcaacattaattttattcaactgatgcagcaatgcgagacaacatattgtattgcaatataggagaatctaatacaatttgaaagacaagacaaaaaaagaaaaagaaaaaaacaatgaatactaacttcaacaaagtacaagagatgcaaaaaaagaaaatgagagacaagactaccttgtatcaacttcaccccattcatccccggaaaatgatccatcttcattttgcagcccagcaacatctgataatagctaagtaatgcaataaaatctgattgagctatccgttaaatagttattacaaagaattactaactttgttaagatataaaatctcataagccaagcaatcacctatccttatttaagctagcaaagctacactacctccaaaatgcataaccaaaaatacaataaaatatttgaaatgagatattaacaaaaaaaacttcaagcactaactctacaaaattactgaataaatagtttaacaattacaaaaattgtgccaaatataaataatacataaaacacataatagtataaataaggttaatgaagagttcttttcaaacttgtgtaaaagtaatttgaacacgatcaattgggaaaaggatacaatttgacacctttccgatgtctagaacatcaagcttgtcaaagagggctaaaacttgcacagcacttagagtatacattacatgtggatcatgcccaatgttaccaccaaaaccacctgcatgaaaataaataaaaataataagacaaagaaaagctaattagtgactactttcgccattgccagaacaatttgaagttatccatcttaattcattccttgtcaccttctttttacaaacctgactcgtgttgacagcttatgagccatgaaacaatctgatcaacgtctacaacatgaagcttttccaataagtcaagagtggtgaggccccaatatgctccattcattctcaaatgctcaatcaccacagattcaaatgacccttttttctgatttcagcaaatttcacatacctttagatatacaaacattttttgaacatgagggcataatatgggatggaacaaaccttttcaactgatacaatataattggcatgcttctcagccaccaactctgccatctgcaaattaaacttcaatatcgttattttgtttcaccttttataaaacctgacgtaatttaaatatatatgtatgacaaaaaataaaaacaaaaactcacatttaagaaatgaagttgatcagccaagaaaaagttttactcccagtaagttcaatagaggttgtttacgaaatcagtgtcgaatcctgagtcagttttgacgaggtctcagctccaaaataaaaaattacacactaaacatctcaattaaatcacagatatataaaccccttaattaacttcagattattatctctgaacttttcaatgaaataacagaaaaatatattgtgttatacttagacctgaaaggctgaaactttaaagaacaaatacaaagtttccacctattgactcttgcccagatgatcacatgcctaaaatatactagttagtagttaactaccaccatttttatttaaaacatttagggcttgggatgtcatattgtaatgtattggattggatcgtattaagttcgacactgaatagtattaaatcatatcatatcatatctgaatctgatatttactcctaccccaactccaaccttactccgacccctaatgcttatcccattctcgtttcgacccaaccaatttctaaaaagtacatgtatcatgaaatatctggcatattatcacactaaatctaacttctcttagaattctccttacaaatgtcacataagaaaaaaaaaataaacaattcttagagaaagaatgaagggcaaacaagaaaaataaattagaaaaacagatagagtaaaagtggtgggatattcacattggtaatttgatgataactaataagttcccgtggaaaaaaaatttagtattcaaaacatttcttcatatactctattacttatcatcacattattagctttgaacaagagtagtgatttgagtttacttagatccttctagcacagttccaggatgatactactgattaaaatgtgaaattaatttcagattaacaaaaggtataaaatccccctaacatagttagttttagtttaagtatttagaatatgattacagcataaaagaaatcaaatcagtataacagcatatttcaaaaccacaaactaaagctcttcttctgaactacatttcaaaatagatttctgaaagtctcatctccactctgagcatataaagaacaaaacacagattgttttaattgcataacactgatcaaagtaaccatggtaggaaaaaaaaacagtaaccgaagtagagaaaccaaaagaattatgaaaagggaaaaatgaaatctctgaagaaccaatcctcatgagcagcctcaaaaccgtacctggtaatgaacccgaggtcgtgaacgaaattcctcctctccgatctctgataatcgttatagaagaaatccaaaaaggccgatagacagagtgattgagttacggagaggagaggagaggagagagagagtgtggttcatggcatggacatggagagagaactctggatctgtaattttgggtctgctattattattgggctaagtcgaaaaatacaacattactacacttttattagggattatttcacaaaccaaaacaataaaaaaaattacaaaaatattgttttaaggaattttaaatatttt

SEQ ID NO: 45043 - DNA, 569 bp, Cannabis sativa
catttgagtcatttgatcatcaaaattaataattaaatgcaaataagcagtatttgcttaatatggaattaatcaagtacacgtacatttccagggaaggttcgttccccaatgaaacaattactggaacagtatatatgtatttcatttattcttagtatatgagaccgtggtccaggtgaacaatatagaattacttctttttcatcgctataaaacaatatgtattaatctagctgtaatttcttatattttagaggcatcagccgtgactcggctcaaggcaatagcagtctttgaacctgatgggcgactcagctgcttgctgatgaaatccccagccttcatgagcttcggaagatccacatttgtcttcactccaagtccattgagcatgtatacaacatcctcggtggcaacatttcccgaagctcctttagcataaggacagccacctaagcccgatatggaggaatcgacagtgctaattcccatctgttatttaagaaactcgattctattaattaaattaattgcttcacaacttcaaaaatataatttcagtggca

SEQ ID NO: 45044 - DNA, 3459 bp, Cannabis sativa
  modified_base (3134)..(3134): a, c, t, g, unknown or other
gagacttgcccaaaaaagtctccacagtcgccatgaaaatactatcttggaactgtcgtggactcgggaactccacgacggttcgccaattgacggcactagtccgtcaacacaaccccgaggtggtcattctgtctgaagttcggttaccaaacactaagttctccagaatttgcaacaggctgaaattcgaaggatcgcactatgttcctcctattggaagcgcggggggacttggattgtgttggatgaaaggagtcaattgtaatatacaattcgcaagctgtttcttaatcattggtgaaatctcttcggatcctcctggctgtgtttggaaactttttggcacatatggaccgccacatggaaacgacaaagaacaattatggaatcaaatgggggaattagctttgaatgcggataccccaatcctactttgtggggatatgaatgggacattgaaggactcggaatgttacaactatgttagacgaagtaatccgtctagatatgcattcgactttcgtcgaatggttcaaagagtgggattgattgatcttggatacctgggtcctgctttcacatggattaaaggtgggaatggtagccaactaggaggagcagtgaaaagggcaaggcttgatcatgggttggcttcgccggattggcgcatcctcttccccaacgcaatcattaaccacctttcggctactggatcggaccacagacctctactacttgataccacagctggtgcaaattgtagaagacgctccttcaagtatgagaatatgtgggtaagagacccaaggtgttgctgggtggttaaagaagcctgggctagtcaataccaccacaacccaatgatcaatttcaacaggaaattaaaagcaacacgtgaaaaactcaagacatgtaacagactccaattcaaggaagttaagaaacaagtccaaactgcaactgattctctgaaaaaaactgaaatggagaacccaattaatggtcatgcggtcgaagaagctaaaatgcaacttaaggaagccctccttagagaagaaatacattggaaacaaaagtcaagggtgcaatggttacaagagggagacatgtgctctaaattctttatatcctcaaccgtagttcgccgtcgaaggaactatatccaatgcatcaaagactcacgggatggtgtttggataagagaccaaaatcaaatagcaaactgcttcctcgaaaagtttagagaaagctttaaaaatccaacaaatagtccagcaccaattcctactgacttattccaaagagtagttactacagaggagaggtatagcatatgctctatcccttctgcaactgagatggaagaggcgatttctgaaatggggaaggataaagccccgggtccagacggattcccaccaagcttttacaatcaccattggaccacggtccaatctgaccttttccaactgatcacccacttctttaaccacaatgaattgccacgttacataaatgatacttccgtcgtcctcatccccaagaaggactccccatcccttgttacggattatcgtccaatcgctctgtgcaatacaacttacaagattatatcaaagattattgcctcccgattgcgcccgttcctccaaaggatcatctcgccaaatcaagcggcctttgttaaaggtcaacacatcgcggagaacactatgattgctcgagaaattattcattctatgaagaagaggaaagggaaagggggtacatgctcatcaaaatcgacttggaaaaggcctatgatagaatgagttgggagtttgtccttcacgtactcggtttgatggggttcccaaacacgttcattgattggataaagacttgtatctcggtctcagcaattaaagttctgctcaatggatccattgtggggaaattctctccagagcaaggtttaagacaaggagacccgctctccccatctttgttcatacttgcagctgaaactttatcaaggctgctgctttctaaagaagaggctgggttgctaaaagggttcaagctttcgagaagaggttcggccatcactcatctcatgttcgcggacgacattatcctttttggacaagcctccataaaagaagctaaatcatttcacgactgcctaaacacatattgtgattggtcgggccaagcagtaaatagtctcaagtcgtccattttcttctcaaaaggtgttagcccaagaaaagctcaagctatttcccaactattgggcatgaaaagaatgaacaacaaagctacatatctcgatctacccctcttccgatcaatcaaaaaaatttaggatacgaatcacttagtggaaagagtcctcaaacgtgttcaaggatggaaggcgaagcttctttctagcgctggcaagacatgcttaatcaaatccgtaggttcaacgttatcaaactatgtgacttcctcagacgttatccctgtgtcaacggcaaacaaaattgataaagtccttagggacttttggtcgggggatacggatgataagcgaatgctacacatggtatcttggacaaaactatgcacacctaaagtgactgggggtcttggattccgatcaaccattgctactaataaagcgtttctactgaaatgggcttggaaaattctgatggatgaaaacagtctttgggggaaactaatgaaggaaagatacatacagaaccagagttttttggacttggaaatcaaaagccaagattctgtgatgtggaaggccattctcaggaagcgatcatcactcacaaaaggtctttgtagaaggataggagacggtagaaacacatccatatggttcgatccctgggtaccagggggatgcctccaaccaacccctcgaattgatgccacaggcggtatcagcatggtaagtaacttcatccacaacaatgaatgggatcatgccttagttagaaagtggtttaatgaagatgactccagaagaatcctcaacatctcgcttccaaacaaccagtccaaagactcctggctctggttaacagaaccgaatggtaacttttctataaagtcagcctatagactgtccttgaatattgatatangcaggcctgactatgctaaatggagaagtctttggggtgcacggatccacaaccgactcaagatgttttggtggaaaatattatccaacagtcttctcaccagagtcagactgggtatggtctttaacatggacacggttttatgccccctctgtaacatgcatgatgagcattcgattcacttactctggagctgtgaattcgcgagagcactttggttcggctgcatgtggcaagtgcggactgattctctaacggcttcaagctgggacaagtggttaacgaggttctctgatgaaaacaatcgtcccaaccgaatgcactt

SEQ ID NO: 45045 - DNA, 1065 bp, Cannabis sativa
agaggtaaaatgatagacttatagactttaaaaaaaaaaagtaaaaataaaagaggacaatatataaaggatatagaatgtaattttactaggcatttgacccgtttcaattgggttatttgtttggtatgagagagctctacttcatttgtatcattaacataataaaatgtaagaatcagtatattcctatggattaattcaaatttcaatatcacacaccacatattattatcaacatatatatagagagactattaatttgaccaaaatttatgctgtaaaaaattgctttaatatattttatcagaatatatatgttctggccttgaatcttgttatttgactttatatattttattgataatattattaatattaaacatatatataattaattctttgctatggtcaaaggtcaagctgttcctactcaaaaatttgtaatttctggacttcttagcttcttcttctcatcagataaaataatcataattaatccacgaaaaaggctaaaacaaaagctaaattacagtttttaattaattaattaataataatatcattacacacgttaattaattaaacagtctacaaatgcttattgtctttgttttcattaaaatataattaatttaatcgatctggtttaagcacgttaattacaatatttcaatgaaattaataatctcttcaaaaccatttactaggaccattaataatgacaaaatcagaattgatcaattattggaaaacctaaataacttaattaagaattattcacttttttttgtcatcacctactcggcctaattgtctaaattattaattaatgtgttaaaataaattaaataaaataataaagaagaagaagaaagactaacatatactagcctctatagttggcatgcagctttaagaaattgactcattaatttatatatatatttagacttctcatttaaatattacctaattgtttttttaataatattattatagaattagagtagttttataccttatattacacaaagtccattatatatcttctgatgactatat

SEQ ID NO: 45046 - DNA, 999 bp, Cannabis sativa
cctatgcttgattgttacattcacggattctatgtcaaattcattgaaaaatcacatctattcctacacatatatattgaacaagaaagagaataaaatgaagtccttccttactgctatattttcatatgacaatccaagatcttcctcaacagttttacaatctaaagacgagtgtcgactcgtaatactattgagatcttacttttgtttcagggaagaattatccaataactatctttaccgcacagtaaaatattttactgaactgttttatggactataaacctataacattaagtttcaataaattaaaactgaataattaatttttttaattatatgagttaatttattaattttaatattttttcactgtgaacttaaaattgaattctttatgtagtagattagtttatagaaaatttttctttaagttttctattaatataattatcttacaatagtaaccccatccaataaattagtttataaaatagaatggaaaaattaccattttacctttctaatttatttcttagtctttaagtaccattaattcaccagtgaataattaatctataatcttattgtagatttaagctcaaaatcatttagtattagaattaacttttaaggaaaccaatacaacctgttcagaaggattaaattcctttttgttatttcatgttctcaactatccatataattaaatctccaacacaaaagtcattaacctcattctattgtaagactttaacaaatgaattaaaaattcaattaacatgaacataagatcatgaacaccccggatttaggttgatctataaacgatcatatgttatgatatgaatactagtctttattattaaatgacttttatataaagactttgattcatatcggttcttgactccttgtcatatataatcatattgtataaaatacttttactaagatgtgtaactacattaataattcgaatctagattttttttt

SEQ ID NO: 45047 - DNA, 868 bp, Cannabis sativa
  modified_base (27)..(39): a, c, t, g, unknown or other
aggatgttaatgaaacatacatggtannnnnnnnnnnnnctggtaaaatatatccaacattttattcctagagttataagcttacttaagagtgaagtaagggacaaaatagtcatttagaaaaatggagcttagtcatccaaagctaggtgtgtgggtggctggtgagtcataacctttgcgtgaggtgaagctgtgactaagtcttgtgtaatgacaagaaagacttagtcaaccaaaccaaaaattaaaagcttcttcttcattctcaaatcctttctctcagcctcttttgaaaaccaaacaactcaacaaaaatctgtctctttccaatcatgtcagctagagtaagcaaagggaaacaagatcaaaatcaaagctaaggttaaaggtaagattggcctctgtttttctttagctttcttaagagaaaagtgttggattatattttaccaggttctagatttactaacaagtatgttttagaaaacctaaatatgaatttctaaaacaatgaaacttaaacacatataaagtatgaggaactttacattggttacagcggaattaaatgactccttccacttagatctctaacccttgttcttttatgtcgcagagtataatcaagatctgagtctgatactccttcaattgtttggattcttcacagtcttatacactatgattgaggactaacttgttatgagtgggcatgcaatcaatcactaaggctcgaaattttatgtgacgaacactcttggattttgaaatttagaagaagaagtctcaaaactctctagttgtctgacaagatgtaaactaggtttagagtcattagttagattatgagactattcttttcttt

SEQ ID NO: 45048 - DNA, 1731 bp, Cannabis sativa
ctcaattattaagaaaatgaaacccttgattctggtaccattgttcataataaactaattacacaagctaagtttagaatcttccagtgtcgtaatgctagcttttaatcaatgaatgataacaagtttttctagttagtagttagtccaaattttatgcaagtacacaaagcataaacagttagtcttggagttaaggtatttgacaaagtaggttgctaaaaaggcaaccaatcatttggcataagaagaaacaagtgaaaaagttgaaataataaaagaaaaaacaatcatctagctctcccaaaatattaatttatatacaaagagggaacaaataaacacatggaattcagcttcacaaggctctctgcgtgtacaaaaaaagagcaaagctgatcaaacagcttgcaatagaacttcaaagttgtcttggaaaacccttcaacttatagctaataaacctctcatttacaaaagaacatcacatatatcattatcatcctgcaaatcttctcggcttctcttgcggttctgcaccagctatttgctctaccatactgcaaaacacaaccaaacatggaatgcttgtttagtaaccgacggccaaagtggcttatttttttagtgatgacttgctacacatgaatgaaatgaatctcatttctgaaataacatgaattggtaaacaatcgatcgtgtaacatacttgggagactcagaaccagaaacatttggtatgcttgctgatggtattggatagaactgaactgagatcagcccaccaccttctgttgcacccgcagacatggaaggtccttggagactctcggtagaacttcttgatgatatacctgaaaagatgctcacactgtaaattgtattgttatgccaagagatctattctattatgccaagaaataaactgtttgttggtttaaatgatcaaaatagctgtttgacccaagtttataaacctataaagataataacattattaatgaaagtcactgtaaatgggaatgtggaatattaccatgaaagagtatcacgagaaagaagagaatggtgaacaccatagcaaaaagattgctgctggaagaagaagactttgcagctttcatcttctttaaggctttcatccgctcagctctagcacgcttaagcatggcaagctcggaaatctccctgattagcttctgatcagcagcatccaaagatgggcctctagggggtctaggaggctttgaaggtttataattactaccctttttccgtttctccttcactgatgatgtcttctctggatgaccattagtgtcttccccatccaacatcttatctgtcaccttgacactctcaagagaaactccattatcatatgacacattcccacaactcaccccatcttcagccttgattaacccatcaacaaaaccaccacaaaacttagctatcaatgtcttagcttgttgtttagaacccgaaacaggggtagtattaaactcttcatcactggttagcactccaagttccagatcaactctaaccccatcatcccttgaaactgtaagatccatcataagccaaaatcccaatataattatcaactagctcctcactctccaattgaccaaaaccaataatatcaccaaaaacaccaaaagttcaacccataacacaaaacttcccttttggcgatgtatattattcttaaatgtgaatagaagc

SEQ ID NO: 45049 - DNA, 1110 bp, Cannabis sativa
tcagaacttttgctccatttctctattcgatacatcctcaaagaaaatacagaggaacaaagagagattttcatgccttttgcaaacaatttttgaatattctttgtttttcttcttcttatattttgttccaattgttggaaaaaaaaaaaaaaaagaccaaaatgtacttgatagaagaaaaagatagataatcatgatattttttacttataaaaaagggtaatattttttaagttaaaaaaatattattaaatttaaaacaaagaaatagagttagtttttagagagatatcttaaatatataggtggaattttagttgaggtggcaaaatttcattggctgggacagggagtcggacaagaactgggacaggtaatttggctcctaaaaaaagtacgaagaatactaaatttttaatttcaatgaacacgtgacaaatcagacttattaatgactatcagccaaagatcttctattaaaaatttagtaataacaacttattatccaatctagaataaaatgaaataatcaaacgaccaactataccgataacaatcataacaaataatctcactataaactatagtgccaataaaattttaagaatctcatatatctaaacatggacaataatagtcatgttactaacacaaatatattttaagctaattgagattccctcaatgttcaaaaaaagaaacaaggctaaagtcttgaatgaataacgccttactaccataacaatagcaaggtggtatagcaacactattattgaaaataaaaatacataaatatatatatagcaaataaaaataacacactaagaggattaacaccattgaacatccaatccagagccaatgagcaacttaaatttctgagatataaatttgaagaaagaagacgagaaagaaaagaacactcagtcaggaggatagcaacaaccccaatgaaatagaaaatagtgtgggaatcaacaagaccccacttgagtcgcgccgtaagatcgagaaaaggccggcgagccctggtcaagtaaaaaaatcaagcggcggctgagaatttttagaaagaaaccctagtatgaccagttatataataggatg

SEQ ID NO: 45050 - DNA, 1129 bp, Cannabis sativa
  modified_base (151)..(152): a, c, t, g, unknown or other
gaaacaaaaaagagaaagaaaaaatataaaatatgtttacctcaccactattcattgagctatatgtagagaagagtttcttggagtttaaaaatatgtataattgctaaaagtttaaagcatttgatggagcttaattttaaactcttanntattttattttaccttttagctatcatacacctcacttgttgtgagtactcttagagaaagtaaagaaagaaagaaaaaaaaaattaagtatcatatctctaaatgtacatattaaggtgctaagcactataaaatataccgtttttagtgcattttaacatcaagttctacatatttgatgtaataaaaaatattaaaaatcgctaactaattataaaatatcacattaatgtggtacattgagcaccttaaacactaactaattataacacacagctaatgatatcttataaattagagcattgtcatatgggcaccaatgtgcctgatactactataattagttaacagttttctataatttttattaaagtaaaataagtgagacttaatattgaattgtttgaataaagatattgcaccttacaatgatgttaggcattatgaatgtcttttaacaattctctataaattactagtgcctactccagctctagcccacttaatacatctttcattcaaattatgtacaattttacaattttatacggtatactttttacataaaaaaaaaaaaaaagaaaaaagaaagtattttttgtaaaattttgtaaaagaagttcaaataatcactttatttataaattaactagttacaagttacaactagtacatttgcacaagtcaagatctacactatacatcacttttacattatgttaatgtttgcatctcaatttcatgaaaacataacaatgatactcaaaacttgtatatcaaaattcgtgtttccataaatgttggaaacacaaaataaaaaataaaaattacgtaaaaacacaacaagacaaaagtttatgtctacgtattattcaaaaaggtcttaaataaagaataatggttttgataatatggtcggtcaaagaaatgaaaataatgtcaaaatgatgattgttaaggacaaagttagttaggc

SEQ ID NO: 45051 - DNA, 897 bp, Cannabis sativa
  modified_base (872)..(872): a, c, t, g, unknown or other
aatcaatggtaaatggacagtgaagttctgtataccgaattcttgtcaaaattggtacacaaaaatatacttagggaataaaattgactcgtagattagataaattttaactatcgaaccacataaaagtcatgtctttcttatttaattcatttacattccaacatttattattccttactgaatttgaaacattaattatctggtctcattattgttaacgaatttttgagttaataatttggtactttcattgagagcctttgataattaaattcgaaaacacatccctctaactaatttcttttaccatggagaacaatccacatgatgttcatgtcgaacaagatggaaccactcataagcctaggaaggctcctcatggaacctaacctgcaagtactgcaaagcagaaagtgccccctccaattatgcctctaaaaggcctctcattggtgccaccaagatgaagagaagggacagtggggcctatgaccccacgagatatgtcccaattgtcgaattagagaatttccactctgaacagaggttggccaaatccaagcagaagaatgtaaaactagaacatgaggcgcccgaggcttgtgctaccgcaaacaatgcacatgcaaatgaggcagagcctcaaatgcgatgtccatgagggaggacttagggatctcaaactaggaggaatcaacacatcccccgtgaaaataagaacacacaaaactcaacttgccttcaggatcaacaactaggggcaacaagagatgtgccaattgatcagagaagaagggaaatgcgaccagacattcccgaaccttccaacaggaacataggaccacctctgtgacagtcagtagtcccgngatccgtaaggggaaacaccgggta

SEQ ID NO: 45052 - DNA, 2063 bp, Cannabis sativa
  modified_base (1641)..(1642): a, c, t, g, unknown or other
tatgtgtatatatgttagaaaataagtaacatattttggaatgtgtaaattataattataaactgatatttaagtaaaattatatattcttttataaaatcaataaatctataatttcttcaagaaaatagcatcacatgcttaaaatcttttgcccgcccaaatgagattactttgtctcttattaatttataattacacaattaaataaataatccaaatttttaaataattaatttaaaaattactttttataaaacaatgagcctttcttgggtttccttacactacttatccgtgagaattaattaatatatacaatatattaatttagttaactaatcataattaatttgtactaatatatataaagtacatctaaatatatggttttaatatatatgatttgatgatgaaggagatatatcataattaattatctttgaaaaaaagtacattgattaactataacttaataaaaaactattacttaacgtaagaaatgattttgaagaaataagaaaacaaggatgaattaattgtaattaattaaatgcatgtatgcatgcaattcttagtttacaaaaatgagaatattctataatataaataataatataatatttacttaagctagacagtctttttatcttgcatttaaaaaatataattaaataaattatattactaatagattagatgtagtggcattatttggatcaaaataattaattactcttgcttaaactatacgtacgtacaaaataaacctcatgagagaattgatataatttttaactaattaaaactaaaatatttgtccactatgacatttattatataaaaatatatattcacaattaatataaaagtgtcgaattatcgacaaagtaataccattaggtttagtgaaagaaacatcgatttgtgttttcttgaagacacaaatatttatagaaaaatatgggaatatattattaatatatataggtgatttttgcatcttctctcataaatataatatatatgttctaatatgttttttgattaaagatatatgaaaatggtaagatttcattaatagtcaaagatatacatataaaattttaaattactttcttaatgtgtacttatcttaattaaacatattgtatattttaataatataataaaatgtgagtattactcacacatcaaattatgagatcagtatatataaaaagaaaatgatgagaaaatttattttttatttttcttagctccgatttactagctatatatatgtagtgctccttaaaaaaagaaagaaagaagaagctataataattaaataataaatagaattaattataagttgctatagtaacccgtctaatttacttataatattacctatatatatttgtttcaatttaattttttttttaaaaaaaataaataaattatatatgagtactaggaaattaatattatttcaacattaattactaattgatgtggaaaaattagttactatgacgatataaaagatatctataaggttgttaaaaataataataaaaaaattcttaagggctcgtttggtacgccgtattatattgtattatattgtgttggactgtattgtattgtattgtattnntattatttaatacaatactatgtctgatattaacttgtattaataaattgtgtaaaattataatatattttcaatacacttgattccaacaccaactacgagtccgggtctgggtccgggttcgagttcggggtcaggtctggggtccgggtctaggtccgcgttcgggtcccgggtccgagtcccaggtccgagttgggtctcgagtctcgggttcaggtctgagtccaggggggtccgggttgttcggcgggggtccaggtctaggtctaggtccgggtctgagaccggggtccaagtttgggtttgggtacggggtccgggtccgagtctgagtccgacacccgggtccgggttcgagtctgggtcccgagtcctaatctgggtccgggtctcgagtttgggttcgggtccgggtcgc

SEQ ID NO: 45053 - DNA, 1135 bp, Cannabis sativa
atttttattttatttttaaatagttatttatgtgggccaataatattgtgtcatgtgtacactatatccatgtggacaatatcctatgtacacatggacagtcaacttggcacttaacacctaaaaatggatggaaatagttaaatgctaactattcatgagtttaagggattttaccaccaaaattttaaaattaagagttaattacaataaattaagtacttataaaagttatgccgcaaattactcttccataaatcactaatcccaatttttaaagtatatttgactagataatgaacaacaaaatttgcttcactaaaaataaaattaaagccaacaaagccaattcaattattagactatcgaacaacttgttatagacattgtctcttcaaccagggccggccctaggcataggcgaactaagctcgtgcttagggctcacttattttagaggcctaaataaaaaaatacattttaaaatatatatttaataatttttaaaaatacaatttatttttatagtaagggtccaatttttttttttttttacctatggctcatttcaactacttcaacttgtgtagtgtagattctctttgttgtctctaaccaccatgacaatactacacttattaatagaacgttttcaaacacaaatagtgttaaataatactgatacttaataaaccactagctgcgaaccttattagtttaaagaaataataatatacattaattgaaattgttttgatcaaattcactacctttttaccttgcacacacactaatattatattaccatccaagtcttcctcttccctagtcaaagtctctcactccccccaagcttatagctcccataacgatagactatttgcaatttgtttattctcttaaacacaacattttattaattaatagtgtaaagggtactcacaaaatacttaattcaaactaattgcacatttcaatgtaatacttcaatccacaaagagtaggggagtttgcatatctatctataactatataaaaatgggaatgtagatttgggcttcttacattaaattacaaaattgtccttattttttttgttaattactattaaatcctcacatcatttaatcacaag

SEQ ID NO: 45054 - DNA, 1465 bp, Cannabis sativa
  modified_base (39)..(42): a, c, t, g, unknown or other
  modified_base (1403)..(1404): a, c, t, g, unknown or other
agagaatatatatatcttcttttttttatatatatatannnntatatatatatataattttatttttaactttttttatctatatatataaatggcttttgacactagaaaaaaatagtacaattaatggatgagaatggaaagtgttgattacattgtttgatgttttacgcagtagagtacttgaccttgttccctctctttcatgataaagctagttgttgacagtaacatatgagaatatgtaaagaattgggtaccaacctaaataatctacttcacacattactgtattctctgtattataaaatatatatatgcataagaaacccaaataaattttaatgtcatatatgatgatgatgagtactgtagcatataaaagattcactaaaataaataaataaccccactatagtggtcctataattagattcagcagcaacaaataaatgccaagtatatatacaaagaaaattgttaaaagatatctctagcactttgtgtcatacttttgttagtgtaattaagtattgaattctatataacttaagaaaatagctttttgataatatcgctaacaaatcgtaaggggcaacttgtggaaggtgctaggcaccactgatacccaatagcaatactcatatacaaaaggctattttaagatttttatcctttgaactatgtcgacctatatatcattgtacctctaaaattttcagcccattcattaattaaaaatagtccgtgcgtgatgaattattcacaatattgtaaaatgatcatttgatcaagttttgtgatcacacctgtaataataacgtggatatttatctcattactacatcagcgctatgtatgtaatttaaaattaaaattatttttttaaattaattacacacgtatatataaccaatatagaatcaaaaaactttggtgatgtgaatgtgatgataagaatagcattcttcttttcttttttgtcaatatatataagctggcctaattgtgtgatgcttacaatataaatttatgacagaaaaaccaagaaaagaaattgattgattttcccaaaccaaaatgagacaattttgtaattttgatgagggggggacagtttttcaagcaaacaattggccaattattagttattagccttaaccttagcgaggcaagcaataaggtatatataatatatataatataaggtcagtttctgccaaaaatatttccttgttgtattgtgtaaaggttttattaagcctgtgtttggtaaagaaaacaagaaatatggaaaaagatagaaaatgtaagggagatagaaaatttgagtgacagagtaaattgtacttttcattttgtttgatgtgcaacaaagaaagaaaaatatatatatatatatnnactagaagaaagttacgtgcaaggcacgtatatttagttttatgttatgtgttctataatt

SEQ ID NO: 45055 - DNA, 1092 bp, Cannabis sativa
taaaaattattatgttaaactatatgaaacccgatacttaattggaccaataacgatattgacacataggagggtgttaagcaccaatagtactctttagcatttttcatttttaaattattactaactatggcaaagtgtcatttttaaatagtgttaaatactattgatgtaaaataacaacacttgagagtgagtatacgggaaaaataaattataattattaattattaattagcaattattatcattaattagtaattagaagtgtcctacaatattatagattttgtgcaaaagtcatacataatccgaaagttcaaacatgtggttcttaaaatattttaaatttaaaccatcgctttcatgtcttaccaaaaaagacatttcatttattcacttggattcttagtaacagtgagtattatattcataaagaagctttactatgccaagaaaataaaaggcatcgttttcgtgttcttttcaatcaaaatgaattgggtatttttcaaaaaaaaaaaaaaaatgaattgggtatcataatcataccatcactatcatgaagagtactcttaatagttgagttaaaataactcattcttcaaagagttagaaaaaaacaaggagaaattctactcaattaatgaatgaattataatgagaaaaatgttaaaggcacgaccactctagatctagaacatcatgacatatcgtcttgatatgtggaatttattactaaatcacgccatgctatgatgctagtattaccttaggcggagtttatattacattatttaaagagttgtttcggtaaattttttatttgtttcggtatgaagaaaaaaatttagttaaagtttttttatgatcacatatattacagctgtataggattacttgtaaatttttaaaaaaatttaaaatagtatacagtgctgaaaataaagtgatatttaattgcacgtgcaactattatttctttatatataataaactagagaatagtaccgcgcttcgcgcggttttaataacttttcaaaattatatatataacaaagttaatattttattttattatgaataaaattt

SEQ ID NO: 45056 - DNA, 1116 bp, Cannabis sativa
ttttcatattatatcttaattattccacttatcgcttacaattaagactcattgttgttgactaaaagcgaaatcaacataataaaaagtataaaaactatcaaaaaatagtacaaatcaacaaagtcattgaacttaaaatttattttaaaagatcttatatattatatattgatccttaaacaataaattgagttttaaattataaaacaaaaaacaatcaccaaataaagcacaagcagccaccaaaattgacactatcaacctccaaacaaaatacaaattagcggtaaaagattaaacaagagttaaacaaaataattccttaggtaaaatttacccacaaatattaaattattagtgttattaaagggaaaaaaaaaaactttcatattaatgcaaataaattggtttgactcaatcattgatatatttatttcattttgtttttatcatataattttttttacatgtgtgaatcttttcacaactttctttacatacagaaaataattaagaaagaaagagtaaaaagttaatctcccattaattaaaaataaattaaaattgtgatgagacccttgtcttgtcgaattgtcattgaattttttcgtttcttctctccaacatgatttaataaacaaaatcatccctctttatatttggttgttacatcccaagttttggaacttctgccggccggcattagcaatccatattatttaaatattcatatatttatacgtggacttctatatatatggtttctcagaattatctcatatattattttttaaaatttacggttttaagtttttaaaacgattgcaaagctagttgtaatagaaatttttatacgattttttattacaatttaagttgcaacgctatttaaattaaaatttctatgtagcattccgtaaaaaaatatatatataaaaaaaaagactgttttttaagtattaaaataaataagtctcatcactgccggacccaatgaaggaccagtgtgaatgctgaaaaaaaaaatatttcttttactttttaactaaaaaaaatcttttaattattttaattgcccacaacaaatgcttaacaaaatgggatatcaattgt

SEQ ID NO: 45057 - DNA, 1621 bp, Cannabis sativa
gttgtggaggtttcatctaaaaaagttgattagaatatgattgtacagttaaacgagtaaatagcagttggagtcatataggtagacagcccttgtacaaaatattcacatcacaaaatctatcactatgaacagaacagagaaagctaaaaactgcatacaagtcaatttcatcaaatttatcatttacttccaagacattatatcaaatcagaagtatgatatcaattcattcgtcccatcagaacatttagaagcagattacactccagttgagagttatcatcacaccagaaaacagttcatataattatctcccattaaagacataaaaaaaaaagacagctcaatacaaaaagcatgatcgattgttatatgaaaaaaccttaagaaaccaagacatatttgaagtttacttctttacagaatagttacataacaatgaaaaagcaaccctatgtaagagtaagctaaacacagaccatagaaagctatagactatactgcatcaacatcagaactaggacagtgataatgtcctcatcttcattaaattttcttgactaagtttattgctgtggtgggagactagcaacctccaaaccattccctgtaaattaacaagaaatgtgaatttggcatcagaaagttgatatttctggaatgaatccaaacaaggccaaatgaatgaaaaatcaattgataaaggaagaaaagccttaccatctgggtcaaagaagaatacttgcttgactccacgattgggtacagaactctcaaaattctcaatacccttttcctgaaaacccgcaaaatttcatttcattcaagcaaaatgctttaaaaaaacaattaatcggagagataaaaaataaagtactgaccttgagagtttggacaaaagattcaaaattggagacggagaagcagatatggtgacccctgcgaatatggctagggtcggcgacaggtgacgtggcactccatgggccttcgggaagcttggtggtggggtctctctcgatgaggtgaagagcgaaagctgaaggaagattcagccatatcactttaaaatccccaaaatttggagactcaatctcttcgaacccaaatatctgcaaatgcaattatcctatgaattgattatcaaactatttcttcaactcaattatgaatgaaattcactagaaatatataaaaagaagaataaatcaaaaaaaaaaaaaaaaacctgtttgtagaaattagcgaggcgcctaatatcagtggattctctggaaatatggttgagggtggctcctatggctatgtcccctgacgctgcttccgccatttttcacagtgactaactaaaatattagctaaacatacaatagaaggggttttttcaataaatatgggaaaaactaatgaagtgtatttttatatgttagaaatgaataatgtaaaaaatgagagtgtcactcatttttactccttaaaatagtatttttcttttatatttttagaaaatttcacataaaaattctattgaaactaaccgaacaacttatattacaactaaaatccacataacaacccacataaaaatcattgaaaaaattactagagcaacccaaac

SEQ ID NO: 45058 - DNA, 1698 bp, Cannabis sativa
aaaaaatgtcaattaatcattgattaagcatttttttcatttgataggctttttactcgtctttttcgtatttcatgaaaatatcttcagctgtttcatccaatttaaatcataataaataatttcccttcttttaatataagaaagatttttaccatagtcatcctcattacctcatttgaaatacaaaactagatattttttcatcaaaaaattcttgcatgtccagcttgtctttgacttatttctttcatgtaatcaataccattttttccaacctcattttagttacattctggacccttggcaccagagattcccagtgaaaaaccatcagcgccttcagaagaacccaaaatccaataagtcttcaattttcatcctatattttttttttgttaattttttttaattttttatacgttcttacgttattttcgcatagaacagataagatagtaattgttttagtgatccctttctctgaattacttctaaaaaatttctgaattcctaagctattttgttttctgtgaaaagaatacttattattggtttaaaactttggaattcggagtttctagaacatgaaaacctaaaacttcccgccttactcttcataccgcgtctagaacattcaaaaacaatattagaaataaacgatgagaaaattaggttgctcaatgagaaacttgactgagaagaaatctatgctcgctttaaacattttataaacgaggttcctagtgggaaacattattttttttgcaagacgcaacttggcctgagtctcctagtttaactaagtatatcctttggcaaaacctttatttttacatgaggttaccattactttttccctaggtaaactaaactttgacatcatgtcttcgaaagagcgcaagtccaaactacccccagaaccccacagtccaatttgtggctcagttgatcgaacctagggttaggtcaattgtcccgtatgtgggtccatttctaaggtcctgcgacatcaagaatgaggaaggataccgtattcgctcagttgcaccaggcaagttcaatttttttcccaactcgcctttcgaatgatgaaaattacaacactattgattcttcaaggattggcgcttggagcatcgagcatgttaagaccacatttttgctttgtatataaatattatgtaccaatttcactcaaagatagtcttcttttgagcctcgcccgcacataccttcgcaaagccgcttgattctattgaattaatttcttgaagcctaaacctccctacatagattagcccaagaaacataacacgaccctccataatcaaccataccttttgaaataaaggaacgacaaatcgcatttacttgcttcaagactctcttgagcagcaacactatttaagctcattatgaatgaatagagatcactaggacagaattaatcaaagtcactctacctacataagaaaggttatgagaactccacaatccgattcaaaccaccattttctgtataagaccttcacatttaacaatagttaacctcttaatggcatagagcatcggacaaatcaagaagcagcaaggactctttgaacttcgtattgatccattctacaaaagaacactgtcgatttgacttcaattagatgcaaggagaaactttgagaaaaaatcttcaatacttgt

SEQ ID NO: 45059 - DNA, 4762 bp, Cannabis sativa
tgtgactaaatgtgtttttaatcacaatacttgctgtgactaaaactaaattagtgataacttgtatctaaatattatgttttagtcacaagtaatttcttgtttgccatatacaatgtactttttcttttttgaacaataaaagtcattagtcttagttctacttgtttcccctaagattttctttcatgttgcttttttcaatactgctgaagtttatgatcatcttgtctttgtactaattatgctatatatatgcattggggtatattggttggttatttccaacttgcttttttaggtctttagattactccattaaataaaacaatttcttttttatacctttaattgtcatgttctgtaattgttaagtgtggtgtttccttattataatttcttttatgtctttagagccaacaatgaagaactacaataaatgaggagcttcttaaacttctatctcttcatgctgccggtgttgtcttcatgcaatacacttatggaaaatcgtacgcaatggaatttacagaggagtggtagattcatttccagaggaagggctgctcccacctagtttgacacatcttatcatcgataactttgataagcttacagctctaaacgccaatggttttcaccacctcacctcacttcaacagttggaatttcgtaagttggaaaagttaaagtgcttgccagtaggacttccccagattcttactgctttggggatagtagagagaaataggagaagattggcccaacattcaacacatatcgaacatacaaatataatttcattgaaaagatactctgcaatgaaactatagaattggtataatgtgagacaatatttcttttaattttcctttctctcttgtctttagagagttcgttgaatgaggtgaggactgaggaaccattggtgtcattttcgacttgtgtgacttttgatgctgctggtgttgatgagtaatctgttttgtatttcaagtgtaaaagttgtgtgtggattttgtttgtttttgttgtgtgggatttgttaccatggtatttttctgtttaataagtttggaaaacattaaatgtgtactgaatttgagtgtgtctctatactttagtagttggtttcattatgtatagcaatatagtctagtatttgagattttatactatgatgatgatctttttctaacaaattactctgctcacttacaacttttaatgagcaaaaataatagagtgagtaatttgttatgtacatcagttttgaataacttttaaattattagaacctgtgtttgtttgctagaaaagtaggtaattaatctacttaatttcttagaaaattaagtgatatgatatccttatgaaagaattttaagttgatataaatttgattggttccaaactatttataatctctagttttaattataatgttcttatgtatatatatatgtactttcattgaaaagatcctgcaattaaactatagaatatgtataatgtgtttgtacacataattttgttgagtaatctgttttgtcttttaagtgtaaaagctgtgtactatttgtggtaactggttaccagttacactttgttaaaagactaagttagctgccaactaggacaacttatgttagctcgtgttgagttagttaattctgttcgattcttgggaccaatacaagtctttaaatgtctagtctaacctcttatattaatctaagctagttcatacttataaaatcagagagcttgagagagagttttctacactagagagagaagcaagtcttggaactctttagtgttcttgatagaacaactcgtaaactctataacaaaggctgttgttctaccgaaatgtagagcattacacatagttacaacttgtaaaatctcggtgttatttttcttttactttcttgcatttttcccttctcacttctatgagaattctgttttagttttgtgcatcatagcatagtttttgctgaattgttatttaggaattgttatttgttaccacagtattcttccgacataagtgaggtttttcaatgaacttaggaagagatcactcatagacatgtgattttcttgtcttctccatttgctgtactttggttgttcttagttaacagtagtataatatttgaggttttatactatgatgatgatcattgtgggaaaattataattaatgatacataatcaaaagaactaaaattttaagcaattaaatgattaccaatgacaagattaacaaatacaaatagtaatcgaagaaaaaatagggatgaacaaagtatggaaaactagaaaataattaaagcaggaaacaaagaaatcaacaccaagatatatactggttcaagtatgataaatcgatatgttctatggctctactctagttttggaacaccaccaaatcttttttattgattgagtaagaacatgtacaatacagtcgaaatcgattctctgatgagttctctcaaagtgtttcaactcttacactcttacccaagaatctaacacataacagaggtatctacggaaattccaaaagtgtgaccgaatgtatttttccaccaaaaaattaacttaagtattttactgtaaccaaaagttaaacttaaatatttactccgtaaattactcatacttgtatttatttgtgcgtgcttctcgttcaatgctattattgcaaatttcatccataaaatgaaccagacaaaaccatacattaatcatcaataatatgtgtatatatatttgtttgaattaccccaaattatgttaatttcttaacttgcctaatatgatgtctttgttccaactctcttttttctgatgctaaatattcttcttagccttataatgtctttgttatgtggggttggttgctataaaagggttgaaattataaacagcaaatacataagttttgattaactttgaaattcttggaatttggctatcaagttgatttaatcaatggcccaattgtcttctgaaattaacattattttggtttttattcttttacacactcatctcatcttcttccatacacacttaaatacttacatggagcttaattacaaagaagagtgacagtaaaaaatccaagacttgtaactttcattattctttttatgttcactaacttcatccataaacatcttcaaacagattaaattatgacaaaagtaataggaatagtcaacaatctacttagcatctcatcctattatatcatcaactaattggatacacatatataaaaataactaagtgatccaatgtttaactttctctgtactaatataaaatataagggctcctttcatacattttaatattatgtattgaattgtattatatagtcatgtgttaggttgaattttattgtattatataataatgtatagtacaatattatatttacttctattaataggttgtgtaaaattatattatttttactataaatccgactctgattgcaacctgtactcgaccctggccccaaccttggatcctagaccaaggactccgacctgaaccccaacgcccattcggaccctgaccattaaccttgacccacaatcatggaatccagacttggccccagccttggcacccaatcccgaacccaacacaaaattccaaacacaccctaaataatcaatttttcaaatagcagtagctttaaaatctaaagcatacttagcaatacaactttacaactcataatctttattctctacaataaaataactgtggaataatctctttagtcgcttacattaattgatgactccttaattagctaggaaacatttctaggcaaattcttggaccaaatcatcattgattgaggccattattcaaaaagaaaaagagatgtttttcaaaagtaaagttatgaacaattcagtgaattttccaccttatatttttagagtaaattttaaaaattaaattaagtgagtaaattttaaaattaagttaaatttttgaggtactataaaagtataaatataatgctcataaattttaaaatttttgagatagaaatgtaatgttgataaaatttattatactagacttattttattctagcattaatttgtcgcctaagttgtaaagtactattttattccaatcttaccatatatttatattgaattattattatgttttattttaaaaaataaaaaataaacttagggtactactttatattattttcaaaaatacaagatttgaatttacatttaacaaaataaagagttcaataatcgataatctttacaaaacataggatctaaaatgatatttatcttgtattataacttgtactattcttaaaaatatataataattttgtacgtatatttatgtaaaaaaaaattaacaccctaaaatattatcaaaataagttaagtatttttttttaatatttaaagaaaattgtgtatgcataaaataataaaaaggattaaaaagtgcatgaaaactatatatataaaaaaggatttcctatactatttttttttttaccttttatttatttatttatttttattttttttctttacagtttgagttatttcggtagttgctgtgtggatttgggttacaatgtgggttggtatgtgaattttcgtaaaaatgaaaaaaaaaaaagaattttttcatttatacttttataattgacgttttattcatttataaaaat

SEQ ID NO: 45060 - DNA, 1391 bp, Cannabis sativa
aggtctgccccttgcacatttttaggctatagcctaaaccataaagggtataagtgcttagacactaatgggagactctacatttcaagagatgtaatatttgatgagttttcctttccatatgaagaccaaaaaggccattctcaacccactcctaccctgccctctctctcaccaatctcagccatcataccaacttgttctcattttcgaacacattatactatggcagatctacttcattctcccacaacagatgccacttctcacacatctgattttgtagttgaccaacatgttttgatagacaattctaatcctaatcatgcttctattcctactactaactggccacccagccagctgccatttgtttatgatgcaggtgagtcatctaatgctgcagcaacatcacatatggacacctctgctacagaacaggtgcctcttgtttcttctcctgctgttgatgttgcagcaacaccaaatgctgatgttgctgttgcacccacaccagatgctgcagcaacagtgacctgtgaccctgatagtacacctactggtgttactcgagaaccccacaggtgttctggggctgtctttacttcacctgctgctcttcctctagttgcaggctatctcaatgctcctggaaagcgcaacatgcatcgaatgcacaccagatcacagtcaggtgtgtataagcccaaatcctttcttctcaccagagaaccagcaaatataaaggaagctctctctcaagagcattggaacagtgccatgggtgatgagatcttggctttggctaggaatagaacatggatacttgtcaaacttccaccaggcaaacaggccattgggtgtaagtgggtttacaaagttaaagagaacatggatggctctgttaacaagttcaaggcaagattagtggctaaaggcttccatcagcaacctggttttgactttacagaaacctttagcccagttgtgaaacctgtgactattagggtggttcttacattggctctgtctaaaggatgggaagtcaagcaacttgatgtaaataatgcttttctcaatggagaattgcaagaagaggtctacatgctacaaccacctggttttgaggtgcctggacaagaacacttggtctgtaaactcaacaaagcgctttatggtctcaaacaggcgccaagagcctggtttgacaaattaagaaattgcctcatgtcccttggatttgtgtcttctaaatccgatcattccctcttcattagtcatactgatctttccactacacttgtattagtgtatgtggatgatattttagtcacaggaagtgactcaaaggttgttgacacactcattactgccttgaacactcaattttc

SEQ ID NO: 45061 - DNA, 3583 bp, Cannabis sativa
taagaatatgaattaaaaaaaaaagttaaaaaaatttaatacaattaattaaagatataaattttatattaaattaaaatcattaaaatagggggtgcctttaacaatttttgtactgtaaataaaattttcctatcctaaatgtaaaatctactctgctcaatagaacgcgcgtggcgcttgaaaagtcaatctgaaacgccaaacaagaaaagtgaagccaaaagatttttcgcggtttcttctcctcctcctccctcgtacgagagtttctcaaaaacgccatagccaacgagtgctacctttcgtcttcgctccatcttctctgaaattcgtatctagtaacttttatctttcgtcttatctcaattaagattgttcgcgctctgcggattttgaatttcgtttgtctcaaaaggtcaaaagaagaatattcatcgagcttgatcgtccagttagggtttactggtacagagagatgggtagccccaagaagaatgatagcaaaggcttctttgctgccatgagttctggcctctctatttttggtaacgccatgcaccgatctgtgaacgggtaatctctatctctctcataacttagaattgaggaattattatcttttcttataggcttctcaatagaacttataattcacgctcttgctttagtttattaattacggttctttggagtttcttgctttgtaatttacattgatcgatctgattaagtttgtatctatttttttagtaaacatggaataatatttttcattcacatcgatttctgttaattttccaaatgctttctattcccttgacgtagttttctatctccatgcacatattattataatcatgacctgatttaagcattacgcgcttgatagccgaagggctttgccaagttcaacccacataaatggcctttttttgttttaactttcgcaaatcatgtcttagtaacatgtgtaccgatgcgattaaggaaatggtaatttggttggttacaagactcaaacaaattttcatttacgggagcagatccatcataataagcatattgcatattttggctataatcaagtgcctggggaagtgattttcatttctagtggtagctgctttttattgtcccggcccttccggctacattcagataattcactctctaaagtttggttctgtatttgtaaatgaattctgttgccactggtcagaactttttgtacgagcagcttgcacaattgaacaatggaaaacattatttggctgactaaaaacttgctataattgaccttttgatatttggtacatctttttctttgattgttcataattaagtggtattaccactgtaatgacttgtaaaagatatgtgctgatctgctttatcttcggttaagggatgaggaaggtctgttagaatttggttcttcagcatctctttttattttctatgtaggttgcttggttatgaaggagttgaagtcattaacccagagggaggaaaggaagatgcagaggaggaagctcaaagaggaaggtggaaggatgaggtatgctaaatttttatattgttcctttttccttttattgtgttgtttaactgatcagtataaagatggcttttattttaatttacttgtttttctacttatcttatgagtaataactactgctttcagaagcatattttgtcttcattttatagtcattgtcagtagtttttactaaagtaacccacggagtagctgtcttgaaattcttcacatataatagtcgtttgtctttacaatttatctatttgttgtgtcctgtgtttctttgctaattgcgttgaatacttcaccaactatagacctgatatttttgtatttatttcctgttttaaggagcgagatagttactggaagatgatgcagaagtatattggttctgatatcacatcactggtgacgcttcctgtcattatttttgagcctatgactatgctacagaaaatggcagaggtccgtggctcattgttacttagtatattatatatatgctacatcctcatggattatatatgtacaatgtgtgatcttactgtagattgatgctatgttttgaaaacagttaatggagtattcctacttattggatcaagctgatgaatgtgaagatccttacatgcgtttggtttatgcatgtgagtatttgctttgaattcaattttaaagatgcacatggatgacccttcttatcattgatggaatatactactctatgttacttcttgcagcatcatgggctatatccgtctactatgcataccaacgaacatggaagccttttaatcctattcttggagagacatatgaaatgattaatcacggcggaatttcatttattgcagagcaggtgagcttcgtaggcctatgattctgcaacaaactttttttttcattttgccttattaggggtttcatctcttctttaaatgtacatgatggcctataggccatttgatttctgtatgttctatacgtttcagaacccatacatgtttactgtttagagtaagaagtatgaatggagattcgatgaagtttaaattttgcacttcttataaccaaatattagacctctagcattgtcctcttctcctacgttatattggtgaatatttaaaatgtcttaccatattgtttttactttaggtaagtcatcatcccccaatgagtgcagggcatgctgaaaatgaacacttcacatacgatgtgacatcaaagttaaaaactaagttcttaggaaactctgttgatgtgtaccctgttggaaggtaatagcgggtttcctgctctgagttttctctttctagaccaaacttgtgtagtcttctttcttttgttcttttcacttattcatctaccatcttatatttgcttatctgcccttcttctttttaaacttgcttatttgttcttcttcttcttcttcaagcttgttcattattcaacacccccttttatatatatataaatatatataaatttatataaaaacaccccctttttctcttatttaaacttgttcgttcatctttattttatccttttatctcatttgctcattttctagtttctctaatatttgtgtgtttatttatgtcattatctagttttccattataacctatctgtgtgggaatctcttcttccaacagtcacggaatgtgtgatttttaaatggatttgattcttatataccaggctgctgtgatgaagctcttttgttgtcaaatgcttccccttcatttgaacttggtcgtatatatatacttatgtacttctaaatattttcagaactcgtgttactcttaaaagagatggtgttgttttagatttagtacctcctcccacaaaggttaacaatctaatattcggacgtacctggattgattcaccgggggaaatgatcatgacaaatcaaactacaggagataaggctgtgctatactttcaaccatgcggttggttcgggtaattaaccaaaccattttattttatttttcataatcttaaaggcatcaagca

SEQ ID NO: 45062 - DNA, 4953 bp, Cannabis sativa
tggtaaaataaattccaacaaccacttcttgttcaacccctactatcactctttctagcctcttatttcttttgtttcttctgtaggtcttctcaatttcaagatcaataagcactactgcgcttggtcctcgacgccacataaaccacaaatacttgaaataagatgagaaaaatttaagaaaaataggttagcaagatgtagaaagataaacgaaagtataattcaatctaattatagtaatatcaattttaaacaattttccggtaactgcgccaaaaacttattatttattttcctctctacgcaagtatacatatcgattgctagtatatatactcacacaagtgaggtcgaaccacatggaattgaaaattgagtacaactaaattatatttgttcttctatttggttgaaaaatatttctgaaacaaagttaatgaaaaacaagaaaaaaaaataaaaaataaagcaattaaagttttttaataatggatgagaaattagggatgcgaatcctgttgtataaatcacctaattgttaattctaattactattcctctttctttatgtgatgatagattataaaattgagaaaaactctttttcagatcagtatggtcctaaactatatgttatctattgcatttttgagatagatcaacatacaatttgcattaagcaataatctaaacgtcacaaaggctatataaatactcattttacagcaaaacctaagtttattcaattagagcattttcaatacgcactttttagatatcttattgagatcataaatcatgcctaaggtgatcaatcttaaatatgtattaagcacaaatataaaaaaatgcacgatgaagaaagatgaaatagcaattaacactaacccttggaataaaatctactaacatttgtcatattcctaaagtgagaaattagttcataatctccatgttcaaatccacaattaaattaacaatagaaattaacataagaaaataaaaaggagaagaaagaaactagtggtggaattgatccgggttgccacacttgctctaatcgtcttccttttttcttatagggttccatttctaaaaatatcaaagatacaaaaccgcccctcgtgtccgtacggactttgtcgctatgaccactaattgcctcgctgcggtgacttcacaaagtgaaaatagggtctttttgccagtcttctccccgcggccataaggcatggtcgctgcggtgatgaagaccttgttgcggccctaagcttcctccccgcgaccactgtatacacttgaaataatatctccgtatctcattcttgctgcaaccataagtcatggtctccgtgacaagatgcaatatttcttatgttgatgtacactttttttcatccatcccgcctcggtccttttgaatcttgatgcaattgacatttcaaaaccacgggaacttaaaaacacagaaaaaaagcataattctatcctaaaagtattaacaaagactaaaaatgactctaaacatcgacccaaaaattaggctaaaaatagcctaaaagattttggtattatttaagaaaatagagtagagaagctgatgggagtgctctctcctaacagacttgtaatacagttagctagtgtatgtgctattacattacgtgagatatcataactagtgccaccattgactgtaactattaaagataaaacattagaaataacattactaaaaataatattggccattttatttaaaatccaagaaaccactactaaagcatcataatcaattctctctaaattatatcccataaaattagcatattatccttctcgaaattaagagcttagctactttaattatgaaacatcccctgaaacacatagtcaacacttcccatagaatcacattagcaaaatctcttccagctatcacagaagcatcagaattaagagagaaattccctcagtaggaaatattcattctcccaaacttaggtcacagctactcctaggaacagagagcaataattgtaggtccctttaaattcgattaaaaattatgagctaacacactgaacacttcaatccatgactgagatatgtcaaaagaaacacatttcgattattttatatctacaacaaacacggagctaccacttcatgcaatcaaaaaatcaaaaaatatatccatcaacatatccatcgatgacccatattgcctccatcgaatcagcgaccaagcctcaatctcctgccaaatatgaatcaacccagtgcaaaaaagtacatcatgggagatagattcttcctttttcccatgttgttgggcacacaactccatatatatgtttctcttagttaaactatacaatttccactggaatttcttagtaaaataacctccaaaggaatattttaaattttggatgaatatttagttcccacactattctaccattttgaagtcacctccgctccacgcattcactcttaatacacctttttgacgatagaatctcgtcaaccaaattatagacaaaatttaaagttcaatcaaaactcaagatgaagatgaaggtaagtaagagtgagaatttaaaggggtattaagagccactatgaaaaagaaaattgtttgtattccttaaggtcaagtgttacaatactttttcagtcccctctcacatcagagaatagggtatttatagactctaatggccttagatagacaattgttcccatgggacaagctgaagtcctagtattgcgagttctaggtgcaagaggtggtcgtccgccttgtaccgtagtttggtgctcggtggttccgagttgaagaggtggtggtccttgtatacccttggatgtcaggacttacatgtggggtggatccattactcgtaccctttctcactaacaaaccatgtaggaggcgttgttatactccattggcgtgcacttctcatccttgtggttgtacgtttgcttcttccatctttaacacttaagaatatttcacttagtattggttgtgttgttgagaggagcgtagttgggattcttgagtgcatgttggccaagacgcatgcaatgcatgctggctgagtggcaatgactcaaaaccctcacctaagaggtaaaagctaggtactaagttaactaagtgtgaaaatggtggtatatgtcctaagaagaatgcatgtcaaacgactcaaaagaaacaaatatatatttatagagaaaggcaacacactggaatcataacgatgagccaataattagattcaaaaagggagatagtgagaataaaaatagtaagttcaataccttagtgcggtgatggagattcataggagtgtgaaatttagctagggtaaagtaggacacgtgccatacaaaaaataaaaagaagaagtgcattagaagatggttatcaaagttgcttcccaaccaaaggtcactcgacccaagggcatttggataatggtcactcgacctaatgccactcgaccaaaggctctctgccaaaggcccttgagctaaattcactcgtcctgtaggacatcaagtcactcggccaaaggccactcggaaaattgacacccagaggttctcgacagccaatgaatgcattccaaataaataaataaataaataattgagaaaaaaaaaagaaaaaaatattttgatgaaaaaatgctttggctaagattcaaaactgttaccttttggaagagtgactttaagctcaccactaggccaaatggattgtgatgaaatgaaaatgaaggaaaaagggtcccctttatatactaggtcctttttgaagtgcatgtcaaggacaaagttcataattcaacaagatgaaccgggatgaaataccaactctttctgtaatatctcacaaagttaattatcaataattagggtatattatattatgagttaatgagagagtagtgagtaggattatgatcctactaatataatttaacatgaattataaattttgccataagtggataactaagcgtaatttattagttacaaagattttttttagaatatgtgggtatgatgtgagctattggcggaataaaaatatttttcaagttaagcgaccttggagaccagattggaggccaaaactatcacaacaggtttagttagtaattttaatgggattattgtggtatgttggttttagaattatcggggtatttcaggatactcgggtttgaccagatgccttagggttagagttttcttagtggcgtggccaagaaaagagataaaatgattatttcattattaaactaaattattattattattttataaactgaagtaatatatttgtatgtacataaacataacataaaaataaaataaaatcaaagatcaccgaaccctctcctcctttttctctcgagcaaagccaaaccaccatcactaaaaaatttcttttgatttctctctatccaaatcatttccacatccttttggtagcagctaggttgaagtaagcttggaagaagcttaaggtacaggttggttcttctctttttggaaaaaaaaagcttaggttttgaaagtttgactttgtgttttggggctggtgtcgggtttgtgagcttgtggctttgtttttggattattatgggattggttttgatgctcacttgataagtttgcagttgtggttaggtgggagtcaactatgagtttttaagctcaaaacttgagcgctcatggcaacttttgaatgaggccatgtttttgatttctgtcacgtagaaattggtgtatggatattgtatgattgttctgtgaagtttggaattatttggttaggtttctgtaatatcctagaataaaggaatggattagcaaaaccctaattagataattataaataattgagaaattatattattatat

SEQ ID NO: 45063 - DNA, 2085 bp, Cannabis sativa
cttagggacgaagaacataacttcgtcttgaatcccttatttacattacagttttatttaaattttttacatataaatattttttaaaatacataatatttagtttgtattgaaatatatttctaatggtataattttcttttactttatactaaaaaaaatagaataatgtttcaaaaaaaaaaaaaaatagaataagaaaattaaacttggctcccaatcataaaataggattgaagtggggagctatcacgtgatcctacccacctcatttacatccctaatatggagaaatcagttttgtaagaataaaatggtattgaattatcgaatatcaaaaacaccattaaaagacttttactaatagtgtaaaaaaaaataaaataaaaaagtaattgtatgtgtaaaagacatggggttagattctccattgtatacaaaagtaattgtaaagcaagtccacttgtctcatttaggctgtaggagaaaaaaaaatccttcctttattaatttggtagctttttgaaagataaagcttaacatgcaagtaaactatatagcatgaaaaaagctactttcacacaataatagatatttgttgcagtgatttttgtttttgatctagtcaccaaaaaaaccattcttataatgataaccaaataaccacaacaaattagagtatgaaacaagttccataaatgggttttttttatctaagctatctaaccacaatttgcttttgaactatatatacctaacagcctgttttttttttttttttgccaacccaatctttaatgaataatattatattatttaaccatttttgtgaattgttttttatagtgctttacttagggtttacataacttcaaccaaacacttttaaagcttgcataattaattacatagcccaccctagactcttctgtctctctttatatgtattcattttaaatattcatatttttgtaaaataagtcttctaagttttggttagctgaactaagtctttttcttctcatcttcattcaccaactcccaagtgaaagacactttcatatagttggagaaaaagtaaaacatattttattctggttaaactctacatgcacaaaattccttttaataaatataataatatgcatggtcccaaaagagcaaattaaaagtttgatttaaaacactaagtgcccaaaatttaaaaatatgtatgtattttcttattaaattcatagttaaagaaagaaaaggactaatttgcaatggtcccaaaagagcaacttaaataccaatgttggattcaaaacacattcatcccaatttttatttttctagtaaaaagaaaatagataaagaaaatgggttgggctgggctgggctcaaagataataatctataatcagtacaaagacccaccatttaaaagtgggaaagagagaaagaaaggaagaaaaaacaacgcatgtggtcctttcacaccatttcatctagtttattaatgcagtaggtgccatttttcaatctaatttccaactctggtccattattgttaattagataatgttgttgttgttgtaattatttgcttttttaatggactctgagttagatgatgtaatttataattttttaaatggagtcataattttggttcaatttctttagttatgttctattccatttacaggcttacagcaaagattttttaatactcttaactcaatattaagtcaattcttatcttcttttttaatgacttaatttgttttgtttttttgtgttgttgaacaatttgggtatttttccaatggaaatgaagataatgaaaaggaagaatgtgaaaaagaccatgctcttttgtcacaggtacaaagaccccaaaaaaaaaaaaaattcttatcctttcaattttaggactaataaatgcatatcattttttgccatgttggctcacctaaacattaattattttctgacatgaaataaaaatgttttcttcaatccaaaaaatttaagaaaagttagcattatttaatattttagttaattttcgtgcttaaaaatgtaaattgattttttttt

SEQ ID NO: 45064 - DNA, 1047 bp, Cannabis sativa
ttgggaaaatggccttgcggatgtagttgtggattatttctcttctttgttcagtgcttcaaatttgggtagtgacatggtgattcagtgtattcaaaggaaggttaccactcaaattaatgaagagcttcatcaaccaattgttgccgaggaagtaaggaaagctatattcagtatgcacccggataagagtcctggcccagacagtatgacacctgctttctatcagaagtgttgggatattattcagcttgatattgtcgatgtggttcagaagtttttcactacaggggagtttgattctgcttgtggagatgctaatgttgtgttgattccgaaaaagaagcttcctgaaagtatggttgatttaagacctattgctttatgtaatgttctgtataagatcattactaaagtaatggctaataggatgaagccttatatggatcatattgtatcggaatctcaaagcgcttttattccagggagacttattactgacaatattctggtttcatttgaagtgcttcattacttgaagaggaaaagaaagggcaaggatggatatatggctttaaaactggatcttagcaaagcctatgaccgcattgagtggagctttttggattcggtgcttagaaagattggtttctcggatacttggatttctttggtgatgaagtgtgttagttcggcaagatacagtgtgattcgtggtgggagaactatggggccgattactccatcacgaggtatccgtcaaggtgatcctttgtcaccttatatttttattctgtgtgcagaaggtttatcaactttgattaaaagatatgaggatatgggcctcattcacgggtgtaaagtggcgaatggtgcaccgaaagtgtctcatatgctattcgctgacgacaattatttgtattgtaaagccactctacaagaagccaatcggattcgagaacttcttcatcaatttgaatgtgcttcaggacagaaagttaacttggggaaatcatcaatttttatagtactaatactgtgaatcat

SEQ ID NO: 45065 - DNA, 1136 bp, Cannabis sativa
aaagatgtctgaagctgattagtgaaggtaccatgagtatgccttcctatagcaagatggatgccttgctattcgttgttcaaattcatacaactgttatacttagtttgtataatgtatattatacgctaagtgtgttttaacagacatcatgcctcgtctatgtctcttcatgcgtagtgaggttagtgcctcgctttgcattactgatgtcgtccttatgatcgtgtcttcatatacgaaatggtttctcgtcaatatgtgaattaatagtttgtacttttgtgtctcactcaagactttacagtcaacgagttataggtatactctatcggttctgcatttaatgagttattccattttaatattctttaatataattaccattatatttgttgattcgtattctcccaggttgacacgtgtcatccgctgaagtgacagtcgaattttgaatataacaatttcatagagacttcccttagtacttagaaaatagaggaaataagcttttagacaaatgtattatactttgttcaagtcatgatgatactcactaatccacacttaaggctgtgagtgtatatatataaatatatatatatctttttcttttgttatatatatatacttgggaatcactataaaatttattgtagtatttattttattgttcttcattgtttagtagttgctcaaatttaatgttttaaggtgtattggtcgttgactatttttctcacacaagggcacatatgaaaaatgttaaaaggtaccatgcattattcgtgcttagtattagtggagcaattagtatcgagtttcatagaatttaatataataattttgatagaacatcattaactaattataaattactacatttacattgtgctagactacttatatctaattaatagcactatgttagtttcattaattaaataacaatgagtgtttctcccaacccctaaaatatattctcagttagggcatgcttaaataatattatttacatcaaatgattttttaattatatagcaacttccaagacctaaacaatttaaatattatttttctttatttttttttttcagaattacaagtttttgaaagactcattataattgtctgag

SEQ ID NO: 45066 - DNA, 1516 bp, Cannabis sativa
ttattcatttttcaagaagtgcattagaaaaaaaaaaaaaattgaaagaaaccatgataggatgttaaaaacttgaatataattgattatgcttaaatggaaatgcaaaaaatatactactaattagtgattccaagtcattgcacaagcctgtaggagtgtgctttgttctttttgtttctacatatacatattcagtttctatgttgtgaagttttggtattattaatctcttctgtgtaggaaaatagaaacctaatattgagttcatttattcagattttttacaccatgaaagtgactccaaaattgctaactgcaggatgctcttacctctattaaaagtgggcatgttcctcaggaaagcatgccatcttttgaagagatgaaggaaatacttggtttcaatgagtattatgaagaagagaacatgtattctaccagtaccagtcattaatttgtcttcataggggagcaagataccttttactgtggaacacacacaagttcatcaatcttttatgacactcttacaaggaaaaaaaaaaagacatgatttcctatttctcttttagggttcgtttggtaggccgtataagagtcgtattatatttaatatcaatgagcactatatttgaataaaattttgtattgtattaattattacgactacaaattttaatacaatgtgaatatgttatttaatacataacaaatgatctatgctatcttgtattataataattacaaagggcatggggttacggacccggatcacggccccacactcaaccccaatcacagaccctagacctggaccttaaccttgaagacactcaagccaatcctgggactttgatcaagacttataaaggtcgaataagttaagatatcctatttgagggtcccgtggcacctctaggaaacttatgagaatcttaaccagtcatttggtgccaggacccgcacccatgtgtgcctaacttagggtttatgtacccgcgcaagggttctcatcctagagacctcaatctgacaagaaaaccaacaagaactttacttatttaggcataaaaaagctataacttgaacataaagtcaagattgcacaaggaggccactccacaatgcatggtcgatctatgccattttttggcataaaaatatggcacatgtctctactctcgaacaaccaaaggaaacttgtccaaatgtggtccctcaacaccaaggagtataacataagtgaaagaaactattttttactgaataatcaagatagtctacctatgctacctttgtgtacaaacaagtggcacaggtcggccacatcaaattgggaagagtttcctttgccaaagtatatttctaacatcaaagtaccaaaactaagtgagaaaagtcaagaggtgtacagcacctatatatggccaacctgtgccatctttgtgacccaaaagatggcacgggtctctcccaccaattggccaagaactaatgtgaccaaagtattttt

SEQ ID NO: 45067 - DNA, 1573 bp, Cannabis sativa
gccaatcaagtgactcacattttaactaattaaactttgttatttaaagttagtgctatgtggattggagtttcacccccttgtgttcatcaagctctttggtttaatgagcctttttctttgtattgaatgaatttcatttcaaaaataaataaataactaaaactaaattttgtacaaaaatatgcaaagttaaaaccatattaggccatttagtattttttttacctcgaatttctaccactatgtaccaaatttacctctaagttattttttttttggtgggttttatgtttggaagttgaatttttgtgaaaaaaaataaaaaggtagggaaaatacagaaaaaaaaactcatatttaatatgaaaaacaaattgtaaaaaaaaacacttagagcttatttggctgtattttcagtttttagtttttagaattgtgttttcaaaattaaaaatagaaaacagttttttgttatttcaaaaatttaatggtgtttggtagaagttatactatgagctacttcaaagttactacgagcactatcaatatcctacaccgtatggctacaagattttggttgggctgttcagaacataacaagcagattcattaattggtgtaaatggacatatttgtgtaaaccgaatgagaaaggatgaatggcggtttagggaattgagattgtttaaccaagcactattggctaaggaaatatggaggtgcattcgattccctaactctttatgcaacagagttttgaacgcgtgttatttactgaacaaagatgttttggcagtaaagagtggggctcttgcatccttcttttggcatagtttgacatggggtaaagaaattatcatgaagggttgtagatagagagtgggggatgagaatatggtgagggttctagaggatctgtggctaccgagaccacacacctttaaggtctatgataagctatttctgccagaacagatgcatattgttgacttgagactagctaatggttcgtgggacactgactttattagagctttgtttaatagtgaggatgctgaccttattttgaccatgccaagtggtgtgggtatcaaggataaaattatgtggcacttttgcaaaaatggtgagtattcggtgtagagcaaatacaaaacggctatagcaatgcaagagaaatcactccaatcaaactcttccaaagctgaagcttggtggaacttgtaatggtggtggaaaattctgtcaaagataaagcattttgtttggaaaattattcactcatggcttccaacaaagtatgctttatccaaacagggcattcaagtggaacctctttgtagtcactgttctaaaggggagagaggttgagttccctgataggttcaaaactcgagcaagctattgtcattatcataatcttgttcaacctaactcttattcagcataacacttgaagtttgcttaataattatcattttttttttacaattgtagattaataaacaacgagtggacaactctactacagtctcagatgagttgtatgctattgtgaacctagcgaatc

SEQ ID NO: 45068 - DNA, 1163 bp, Cannabis sativa
gggtataggggtgggggagcgattcccgccgcgtttacatccctaattaaaatggtatttctttccattttaaaatagaatagtcattctacaaaaatgatagtaattttaaatgtaaccaaacaaaaaaataaaaaaaattattttctttctatttcattccatttcattacctccaactaaacaccacctaattcactattccattccattctattctttgtgaattatgtatggtgtattggtgtggggacataacatttcccttctgacatttcatgtctctgaactataatatacatacaaggatgactttgtgtgtattactcttaactatacacgtgttcgcattttcttctgcttcactatctcattaaaaatacatttttatttatttatttttaaaaaatatatagcaaacctttattccacttaacctcaactattctattccaagtatatatagcttgtgatggtacaaaaagaagagttgattagaactcccttttgtctgtttttatgtaggcttgagatttttctttttaaataataaattaatatagaaaagtgtgtataatttacaatgataaatactggagagagacataaaatctacctgtactcatgtgtaaaccaatttcaaccatacaagtttaaatgatgtggtctcaactaaaattattaatggttagaattgattacacataagtatatacgtgtgtaaattctgtgagattctatcattactcaatttgtaatgtatacataaaataaacatcctagagagtagagtctaataaatgagctttcttgattaagaaagtgtatttatctaataattttttttattaaattctctttatatcatatttttgagttaaatggttgagattcgattgagttacaccctaaacacatactctaatactctctctcaatatggtcacttgagcttgcatggtttccacttttatccttaacattatgttagctaggttaatgtcataatatacaatgcggaaataagcaggggaagaattttgttacaaatatgactgaaaataaaatcataatgatcatcatatatgaaattacattgaatattcaaaattaattttcatttgactactccctatgagttctctctctctctctcgctctct

SEQ ID NO: 45069 - DNA, 2076 bp, Cannabis sativa
ttgagaattagtgtggtgtgttggacttgaggaatataaggttgtttacacttattatttaacttgtgtttattcacaactaaccaattatatatggggtattattttatcttgacagccccttatattttaattggtattagatggttttgaacacataaaactataaagagaaagtagagagggagagagagatagagagtaaacagtagtagtgggctaaccatatttgagaaaacctttttatatattaaacaataacacttaaaaagagttttagtgggcttaaacaagaaggtcggcttctttaatattgtaaggagtggcactctctcgtggcataaacattagtttaccacaagtttatgacacgtcagattagaggtattggaaagctgatgaaatggaggctgttttggacccattatagtaggggttagtaacttaataatgtgaatagataagatgcctcatatattactaagtctaagctattaagcactattctgggtcgaaccttttctctttggtggtttatatgtatagtgtattactgtattaaatgtcaaccactaatagaaagaattgcgttatcatacaaaacataaatattaagtactttccatcatggggattaattgggggtgatatgaaccactaattttgcttaattaaatgcaaaaatgtaaggattatatataaataatggatattggttgctccaacagctacttatataattgaagacagtcagacaccgctagtatgtacgtatatatatttatatatttagtagttttacttccttttcttcatgcatgatgatatatatatctttcatctcaatatatgtttgaatgattacacagagattagaggatataatcccacgacaacaaaataatcactataaactaaacacaaatacatggtaattaatacaagtaaattgaacattacaagtaaatgaagagcataccacacaaagtgaagagcacataggtaaagatcaatagagttgaaaaagcttacatcccttttctcaatcactatgagaattctcacatcctctttatggcacgctagaatttgactgcattaactagaataatttgtccagtatttggacgtactggaggttagataactaatccaattaattcaatatttttgggatttatttattttttccaagaatgtgagtgtgggatgaataactcatgctgatgaattttttattttatttcattttttatttttatttttttatgatgatatatttatttaatatttaattaaaaagaatttaaatggaagataatcacaaattttgtttatagatttttttatcaaaattgatgaaaatgtatcatttttatgtaccatatacataagcttttaaaattttaaagtggtattatatatagtagtagaattatatattctctctaacaaaataataatgtactagaattatatattttctttgaagagaaactatatagtactaaaatagtatatttttttaaaaattattagaaaatttatatcaaattttttacaataatagtgtttgtattaataattattattagtttaacttattatttaacataaataagttatattatttacatacttttatatactattttaattacttattatatggaagcatgataaaatattaatttattacgaatttagttatatatttaatttttgtttaccaagtaattgactctagtgacataaacattaatatttgatatgtagcaagaaagaaaacatctcggagagtcataacagtcaacctaggaagggtctctagtcctgcacccaggttgactacgggaattccaaaatagatatttggatcccaccaaattgtttccaactcaccatctttagtattctcaaccaagaggataaaagaatccaagtaaaatgcttggaaactaaaacgatacaaaacatcaccctataagtcaacctaggcattttctttgtcttcatccaaaacgaggaaccaaattctttcagcaaagaagtggatcaacctggaggccaaaattg

SEQ ID NO: 45070 - DNA, 1480 bp, Cannabis sativa
atatatatatatatatgttttgtgacccattaattaaactagattgagttaatgtttttggtgaaaaaattgataatttagaattgttatatatatatatatatagctagctaattagaaaaagtattatgcttgccaagaaaaagtgtggtttatatgtaatacgtggagcgtacgtgtagtactaatagtaaatattaagtattacacgttttttatgttttctaattaattatgatatatatatttatttattttaaggagctagcggcgatagtggaaaatttatatgatccacaaattatatagatcagtcacttttgcactaataatatggatataatatataatccatatatgcatattagtattagtcaaacaattatagagaaagttaattaattacaatcccaaatccttttatgaccagaaaacacttttgtttgaactcattatatttctacgaagtagctatatatatatataggtatctctaaataataatattattagatttacacgtacatagagaacttttcttattcattgtcaacaaaacaaaaaaacaaaaaatatttgagaattattctttgccggctatatatccatatataattcatagattgtgacttctctaattaatattataactttttaggattcatgcatttaatccatattacacgtacttaattataatgatttttttaatatatatatacagttcaaaaatattgattactgagctcctaagaaactttataaattaatttctattcaattttcataaccatatatataattgatcaccattgttattgcttaacatttatagacatgcacattatgatattaactagcgatatttcttataagttattatattataaattatatgaaattaaatacttagaccaataacgatatcgacacataaaaataatatcttttaacatttctttaattatataattggaaccgtaaataaattaagcaaataaaattacaataacatcaccaattttttcctattatcttatattaaatgtgattataaattaaaaattgtaattttttcaaacattataattcgaatttaaatttactggacatatctaaaaaaaatatatttctattgttattttttttaaatttcacttgatatatttaaaatatatttttattattattttcttgacgtacatatttaaaaagaatatttatattatttttttaaaaaaaatcattgcacatatttaaatatatatttttcgatatatcaatattttttttaaaaaagaacaatataacatagataaatatttatgatacataactcccgtatctattgtagttactccaaaaaaaatttatttttttcaaaaaaatatatatacaactaaaaatacacatcaatatataactaagtatatatatatatatatatgaattaacaatattacctaatacatctatatat

SEQ ID NO: 45071 - DNA, 2162 bp, Cannabis sativa
aataaaactaacactacgtggcttgacacgtgacaatcacctagtaaaattaaaatatgaatatatgtataggaatcttttattaaagattatacaataacgacaagcaaagcaattaatttgtgtgaatatcaggtgaaacgacttttaaaattaaaagtatgttcccattgatatataaatattggtcattcttattttctattttatatcatcaatattttttatacatataatagtgtgtagtgtgtttttttttttttttaatttaagaaaattctaaataagttacagtgtaaataaaagaaattttaaaattttattgcatttgtgattttttatatatagtaagtaattatttaaattttattttgaacataataaattatttaaatttttttaaaaaataaatattaaaagagtataaaaaagtatggatcataaaaaaaaaaaatcttttagatatacagtgacatagattttctcttgaaatttgagcaagaggagatagataggatttcaattgttttcttggaaggagtcaaaatttttttttttaaaaaaaataaaataaaatatttaattattgttcacgttaaccttattttatacataaccgcaaatcctaatggaatgtggtcatttataattttatattcacctgctgatccacgttgagcttaatcaaagagaataagaatcactcaaactaaaaataacaaagtaaataaatatttcatagattgtttaattttgtgtaaattttttttttggcagttagttgtaggctttttttttattttattttttagactttaaagtagttttttaattttttttatttttacgaaaaatacttatgataacccaaataattttttttttttgaaagggaaataaaaattattggagtaacctgaacaactatcagaataacttaaaacgcaaatttaaaataaaaaataaaaaatagtatataggataatttttttaaaatatatataacttttattaatttgtgaaatcaactaaaggacaataatgtacatcaacaggaacatcatccctattaaacgctcaatctaaaaaagaataagatgttctagcaagactataaacaacaatgttagcagatcatttaataaaatataagaaaatattatttaaagatgtaagaaatttacaacaattttctataatgaccctaaaagaagaaagtatagataatgaatttcaaatagcttgtactactaccaagcaatctgactttagctacactttctgccatggtagagttttaatctagcttagctctttctttatattaattgtttcagctaaattcggagcgcctataccaattacttcatttaatgctcacgattttgtatgtgcagaataagaaaaatatagcttgattgaagattttattcaagaaagttttcctatgggctgtggacaattgagtctgtgtatgagcgagctaataaaagtataatgtctataaatacttatattaacaattagagagtttatctcttttacacactttgtatttcattcatactttaagaaaagagtgcatgtctatgttttacagaggagagtgtgttccactctacccatgtgtatatgtctttgttatttctttgagtccgcaatcaagttaacaagcaataagaacaaaagtgcaaacttttgggagaaggttcctcaagtttttgggagaaagtgtttcaagccttgtctcggagaaaacaagcaatcttcaagcagattgaagggattacgaacacttgaagtttcagcaagatttattcgtgaaggtggaatatatcaagcttgtagcatataataagatgaagtgtatttatgcataattcaaaaactttatatttttgaaatcttactaataaatcttatctctggacgtggcaatgtggattagtaacaatctaaaaggattgttgataccacgtatatgaatcttgtgtttttattttcctgtacttttattctttgctagttttttattctacagttacagaatcgtggtatgtagctacaaaatatacattttagtaccaactttattatttcacatttaattaatgatcacttaaataataaattggtaatttaaaatacgaaatttcaattta

SEQ ID NO: 45072 - DNA, 1254 bp, Cannabis sativa
acgaggagaagtgtagaactattaagctatatttatgaccacttaaattattttattagatgcttggattgtcgctctgttcaaaatattatatattcatttcccaaaaatgttaaactttaccttatgcttaattattttagaataatgctagtatttgatttagattaagttttaatataattcaatccagtatgatttgtttgtccagagttttgaacttcttaaaaaaatgttagatccatgatttagtattttcacattccttttcaaactttcaagttctttagttaatgatacaattttaaaatttctcgatttcaattcaaattcacaacatttatttttcccttcaagatctttgatgttgtgagataattctttactaactttaaccaaagaacgattcccaatacaaatttgtaactacttactatatatgaccttataagattctgccaaagatttctcatcaagttctgactcgtctgaatttgaaccaactttttgattggtgacattagttaatgttagaacttattttactagaatcttaatttactaacatgtatgtttgattatcacataataatctaaaatcctaatatataaatatcataaaacaatcaaataacaccttataaggattacttacactagtggcagcagactaatatctcattccgttcagtactctaactcttgttcctttctatcgtagagtaataacaagtattgaacatggatgctcatttgaattgacaaaacaccttcttgacagtcttccacattgatctaagttttgtcttgaattgtgtgggcaataccttaatcactaaacacgcgaatttgagagagagagagagagagattcaaaattttctaaaagaaagaaaaaacttttctctcattcagttttctagattttgacagacaaaagagtgttagtgaatcaaagcctttatattccttttatagggtctctctaggttgagagttttagagtagaacgtgctttagaaaaagatagtagccctaaaaatctacccttggtcgaaatgcactattgtggctagggatgcacacgaggcaaaaaattggcagagagtgctcccctgtctccatccccacttattcccaattagggatggagcagggaatctcctaatgggggcggggacaggacgaagaatcccttaataaaaaataaagtttataacaaaaatattaaaatacataaaaattaaaatatta

SEQ ID NO: 45073 - DNA, 2140 bp, Cannabis sativa
ggtatatagttagagtttcctttaggaattttaattcttctagcaagcctttcaactagattctttctttgatagcttatgtagtagcaatatactcatattttgttgttgataatgcaacaacaggttgtaattgaaccttccagcttacacagtttctctcaattaggttagcatatatgcatatgtagattttctactgtctcgattccctgcatagtcagcatcaatgtagccttctatcttagtgcaatgcttgtgttgtttgtacactaaacctttctcactagtacctattagatacctaaacaaccacttcatagccagccaatatattttacgagaattttccatatacttgctaaggatacttatagcataggatacatcattgatcttactgcatttgagtaagatactttactcattgcttctttctcaacttgtgtcttaggacattgagccttagataatggcgattgacttgtgataggttgagttgctgtcttagaacctcccattgagaatttctcaattattttatgaatgtaatcttcctatgttagagccaattttctattacttttgtcccttttaatagtaatacctaggatctttgtagttgttcccaaatccttcatttatagtcttattatgatagttttgtactttattactggagagaaaatttcagtataatctatctcttccttttgtgtgaaccctttagcaactgtcatttgatttaaatattgattgaattattttgttggtgtaggttttaagtaatttcctacatttgacttgtactaaactatgtcttctgaattttttgaagttgttaaaaattcacttcaactatttagattatttgattcaaggaattctgtccaattttactaatgaaagcttaatgtggatgaaaatttacaagacatgatttgatatatgctaaaatttggggacataatttcgtaaatattaaagttttggacatgatttagtatatattaaaattcgagggtaaagttaattaatacataaacaattcacgtcaataaaattaaataaattggacaaacataattaaatttaataatctcaataatttgaaaaaaaaatttaatagtctaaaaaatttaaaacataatttaatacgtatcaaaataaaaaatatatatatataattacatatccacactttagtgggggaaaatttaaaattaatataatgacttacacataggacttgtgtaaactactatacaattttaatcatacccctcgggggactaaaattatactgaagaggtaggtacaagtgaagggagcaccatctttgcaaattttaatctaagatggtgtaaagtgtaatttgatcatttttctaataaataataaatatatataattgaaaaaaaagaaagagtttaaaattaaatatgtgcacaaaatatagtaaaacccaccatccttgcacggaattactagttgacttaatttgtctccggcctataaaataataattattctaattaattataaacattttttttctaaccctctttctctttcttatttatttatataagcacacacaaccccttctatctttgcttttttattataagagaacaagagacatatacatctctctccaaaatatactattccccatattataataatatataatattaccacacttcttcttatataaacctattttctctgttttgcttaattattttcctaagaaaatctatatataattatatcaaaaagaaagaagaagaagaagaagatgatgatgatgatgagtagcagtagtagtaatagaagcagcagttgcataagcatggtggaatcaaagctgccacctgggtttcggttccatccaagagatgaagaacttgtttgtgattatctcatcaataaaataactcaatccgattcaaccctaatgatcgaagttgatcttaacaagtctgagccttgggatattccaggtatttaatatatattaattcattctattattattattattagtttgaaataataattaaataatgatgaataacatatatgtataataattatgttcatggtaaaaaaaaaaaactgatgatcatacttg

SEQ ID NO: 45074 - DNA, 1072 bp, Cannabis sativa
aagaaccttattctataatgaatgatttctttcggttatgttgaaagtattgtaattggttgagttgaaatgagtacgtacggaggagtggttttttatagactttggatatgtagtgagaattggaagaaaggaagaagagttgagttaagtttggccacgcgtcgatctgagaccaacccaatgtgcctttaccttagtccgtgtgctgagttggtagtaatggccatagacaatagatttacattacaatttcttcctttatttttctcttttattttgaatattaaaattgaaatggaaccttcaaatggtaatatattcatcaaagtcaatgcctaaaatcatctcaaattattttggtttttttttttctttttggatttttttatgttgataagtgtagtcttaaatcaataagattttcttttgtttaatttgtttatttatagtaaatgttctttaatgctttaatagagtaaaggctttattagtgagacaagtgggataaatccaattaaagtaatccttaattatcatttataaaaggttatatactatacataaaacttgggaggataaaaggtggatttttttaaaggaattgtaaaaaatatatatttattcttcatttttttttccatgcaagttggatatgtaatatatttttctttaactggtcttatttttttaaatacaataactgaatatattattttaatttacatataagaagcttgtttcaaaaaaagaaaattacatataagaagctgaattacatctcatggctatgtaattttggcctaggagtcaattgcaaaaagacaagtttaagcttctccaatactataattttaccaaaaattttaactttccaattttgtagtttaaaagactatttttaattaatggtataaattgtgtattaaatttaacttaaaaaataattaatattatattgattcaaaatttataattgtacccaaatacttttggaaaaaaaacaggaatattctaaaaagggaaaaatattacaacaatactgtgggccgacccaatgaacatttgtaca

SEQ ID NO: 45075 - DNA, 2067 bp, Cannabis sativa
tttttaagcttatcaaaatttaaaccaaaaagaaaaatttcaagagtaggcaatgatacatgtcttcttaaaatgtcattttaattagtgttggatatcattagtgtgttttaaaatttatcatagtactattgctattgcattttttattagtagagttagtagtggaattcaattaattagcattatagtttttccactaattctaacaactaagcaaagctctcactaagtgccactctaatggtatggattttattttgactaaatattttcttctctcttttttttttttctttttttttctcatttggttgaaatattttattggataatagataatgatgtgttgggtagtacttatagggatgaatttggttacattcacaatcattattgattattgtttgcaaaattgcaattatacacgtaattggctagctaattaattgttgcatttataatattaatccaattatcaaaattctattataaatttaagatgaaaataattatgtgaagaaaaagagcttaaaccagaaaaattgtaaaaaaataatggtgcgttataattaacgtttgtgatcctaattctaataataataattatagggttattgcattcattttagtacgtataaaatataaatatataataccaactttatagtgaaattaaaagacatctaatcgtgcctcttctaatagaatttttaccaagttttatattattattactagtgaaatttgtatcttaaatataaatatgtgatagtttctattcattttcattaattactactttgttaaatgttgattgttattactaaggtgacgatatctaatttgtttaggtttatttttagttaaaatttaaaatccaatttaaattaataaaagataattaaaacatattttaatttattttcaaaacaatattaaataaataaagaattacataactgaacaaaaaataataatattaaataaataagtaatcaaacaaaacaaacaaaacctaaaatcttcatcgtcgtctctaactatccgagcctcagttccaactgccagcaatcccagtcccaactccgatggcaaccaacgatcaactactctcctcctctctctcaacggtaagcagactctcaatctcgtcgtcctcaagataaaacaactcagttgaaccactgtatcagatatctattgcatgattaccaattaattaaacacgtttaaaaataattttaattaattaaataaataagtaaaactaataacttaataaatagtatttccccaaaaataaggtacacaccaccaactcggtcggacggtagagcacgtgatattcgggtgaacctttatgtgactcctccccttttttacaaaagtgggtaccctttggggtccaacccaattgttcatatctacaatatatatatacactcataaataagtgttctcaagcaatatgggactagttatctaaagacttcaaaatgcagatcttcattttttaataattcataaatatgttccaacaaagatgcatgcatgtattctagctatcaagtcttaatttcatgataaaattttagtaattggataaattaatgctactttggtgtgattaaatctatatattttactactgcgattagtcttgtccccacgacatggttttgagtattttagtcttgtatgtgtgatatggttttgttttgttttggtttcattattaattcttctttgttcttcaatggctcgctatcaaaccattgttattggttagtaataacaagttttctacgactgaatgagttattaataatgcaattacatatcttacataatagttgagtgcttaagctagctacgagattgaatgaacttgatgcagcagtttctactgttgtatcttatgagcggtggataaaacataatataagtattcttaaggttaattgttctttttcatctaattttattttaatttttttgccaaacgatttgaaaattaggcgtctggttatttgactcgtttttcaaatttcaatcttaattata

SEQ ID NO: 45076 - DNA, 1586 bp, Cannabis sativa
  modified_base (430)..(434): a, c, t, g, unknown or other
  modified_base (787)..(791): a, c, t, g, unknown or other
  modified_base (851)..(851): a, c, t, g, unknown or other
aacatccaatatatattggatcgatctgatagcctaacattgaatgtggtccaataaacattcctaactaaaagacttgcaggtatatatatagtgtcaattttttttatatgtgtgttactaaaattaattttaggtgaggaagaataatgaggggtaaattttgctaattctggttgaacatactctattttcattttaaaaaaaaaaagttaataaaagttattccatgttgtgtaaatttttttctatatataccgtagagttgcttgctatatattatgccccatctctacctagataattaagaaaaaaaattactaattcaggttgaacaaaagaaaatagatattgcaacttaaaaagggatgtacagatacaatgtttttcgttcttttatatgagatggtatatatataaatatatatannnnnatttatatatatatttatattatagttatataaggaaaattactttatatattattttttaatgtttttttaaaatttacgatttgggtttctccggtagtttttatgtgggttgctatataaaatttaattgcgatttaggtacattcgttacttactatagaggtttctatgtgaaattctgtaaaaatacaaaaaaaaattattttaaagtgttaaaatgaaaaaaaaaaaatcatatttaaaatatcatacatgcaaagctttaagaaatttaaaataatttatagagttagagttatttgcggcataaatacctaagtttaactcccagttgcaaataaatacctaannnnnatttttggcggtaataatacctatacctgactgttaattgttaagtaaattgccacatgncaattcctaattggtccaagtcactaaaattttatttttttaaaaaaattaattaaaatataccaataagaaaatggcacgtaaataatgacataaaattttaacggttaggtacctacatagttctaaaaatataacttaggtattattaccgccaaaagttaaacttaggtatttatttgcaactgggagttaaacttaggaatttatgccgcaaattactctattttataatatagaaaatatggtttaaataatctacttcacatacgtataaattaaaagacactcgtgaaataaattgtttgaacttttttttcgacgggttaaaatttttctgaattttataaagtttgcatgatgtcttaaataactacgatgtacatattgtcgtataaaaaaagaattaaaatttaaaactatcgaatgtactcaaaaaacacaaataagaagtatgagtgcacttcttttggaagtcactacaaaaatcttacttttagtaccacaataaacttgtgactaaaattaaaaatattgtgattaataattataaattattatttctatgttgtaattaaaaggtttgtagttaaatgtaatattagtcacaatactaaatgtatttttagtcatagtctttattattgtgactaaaactaaaatagtgacaatttgtatttaaatattatgttttaattataagtaacttttttggtaactaaaatcacatttagt

SEQ ID NO: 45077 - DNA, 1090 bp, Cannabis sativa
aaagagtctatgtggagacaaaaaatcaagggagatctggttgaaagtgggagattggaattcaaagtttttccatgcttccatggtaattagaaggaggagaaatgagatttctgcggtgaagaacaagcttggcagttgggaaacgaaaaaagcataagattgggagtgttttcaatgagttttttttaggaattgtatagctctgaagacacaatattagatgaggccttctatgattttctttttcctgttgtttcagtggaggagaacacaatgataaaaaaattcctactgcagatgaaatatggaatgtggtggatgctatgcattccttgaaagccccgggacccgatggtatgccgagatatttctatagaggatattgggagatagtggggtgcgaggtgatagacatggttcaaaaattcttttaaacagggatattggaaggacaattgaactatacttttatctgtttgatccctaaggaggagaatgcgtgtacggtggacaaattcagacctatcagtctgtgtaacttcgcatacaaaataatttcgaagatttttgctaccaaactgagggaggtcattgataagttgatataccccttccaatcggcttttgtcctggaaggtggattgcgaaatcttcgattttgactcaagaattggttcacacgattaagaaaaagaaaggaaagggaggtctcatggcaattaagttagatatgcttaaagcttatgatagaattgagtggaatttcctccacgaagttctcaaaggcaacagttttgatcatcgggtgtgtgctttgatcatggaatgtgtttggtaggtttcttactcagttttaatcaatggtgttccgcaaaagaagttttatccaaaacgggatcttcgtcaaggtgatcctttgtcccctttcttgtttcttttatgtcatgatgtgctatctaagttgattcttagacaacaaattagtggccagttccatggagtttcaatatccagatctgccccggcggttactgttggaaatttattttaccaggatcttagacctactcacaagtatgttgtttaa

SEQ ID NO: 45078 - DNA, 3111 bp, Cannabis sativa
ctggggtccaggtttggggttcgggtccgagttcaagaccggggtgtgggtctgggcctgggtttgagatctgagtttgagtccgagtcggggtccgggactaggatttgggtttgggtccgggtccaggtctggggtctcgggttcgggtccagatgggatctgagtccagtcttggtcggggtcggggtcgaggtctgggttgggggtctcgggttcaggttccgggtccaagttcggtgtctggtgtctggtgtttgggtcggggtcggtgtcaagtgttagtatccaagtctggaccggggttcgggatttggggtctgggtcgaggttcggggtccatgtttggtttcgggcctagagtctgtatataagttatgaagtcaaacaatccctaagcataagtgctatacatacgtaccataaataagattttttttttttttttttaatttgattaactcacaaatagaattttaaatcacggtaatcgagtaaaagaaaaaaagaacatttgcagcaacttttaacggaaacagaattaatagcagtaaaaaaagaaacagtaaaagcagaattatatatattctctagtaaatttggtcagagatgcatgacttgtagttgaccatattgttaggtttggaccagttcaattaatggattctgaaatcataacttctaaaaacatatttggtgattttttttgggacaaatatttggtgattttttgtacacacaattattggttcgtacctaaaaaaagattaaaaaaaacattattgattgatttaataaagttttgatgcatatgggtccctagctaactcattcaagtgcctgaaactcaaaactacatgacaaattttttttatggttaataaaaattatatatattttaaatgtcattgttattgttgtgggtttacgattaaatatgttctagctcaattaacagtcaagtacaacatctcatctaaaaaatattccaaacaattatatatacaataaatgttagtatatatgagggttaaataaacaaaaacgtttgatcaaatgttaagttgataaatatcagattttgaacattttctttttattttacagtaatgtaaaatataaaaaaatatataagaatgttaattttgtttgtttccagaagtgacatatttttttgtggcataagaggaaccatatttggaattggatatatgaatattgtgatgatgatgatgatgagcatttccactaacaccattttaccacttttgtggatttgatctgacatttcactgcaaagctaattcaaatgattgttccttttatatttatttattttattttattttggggtctgccatttcatatgcatatcccatcaccaacgtcatgattttttttttatgggtgccctatgtattattaatacatatttttttaaccgcgtgcagtcccaaaaatagtgttttttttatggaggaaactttgtgcttcaaaattttttatttataaatatttttatttttttttattttaagtaaataaaattaaatagttactaataattataattaaattatttgttattttaattaatttttaaattaattacaactatttaataatgatccaacaactaaattatgatggttacatatattttgatgtaactattgaaacctcttttatatatatattgcaacgtaggactttatttgtaatgtcctaatggttaagcacgctataatgactttttagttacagtgtacacctttgctaatcaaaaaattttctcaaaaatcgtgataaattaaattttttatttaacttaaacttttataaacttatacattacatatattcacataaaatcgggatcctatttttaaactttacattcacattcaaaataacttttacaaacattttgcacaacgactataaaataaagtccaagtcgttccgagactgaacactccaagtcgcaccgtctcgacatgtataatccctgagctctgaactcactactgttcagctttagcatttcctttacctacacacgaaaataatatctgcgagtcaacagaatcagtaagaaaaacacataacatatgtatataatactgacttgtatctaggcgcccatacacctatccacaaggcttaacaaatgaataagaacgttcttaactaaggtatgaccactgtaccacatgcacgacgtaccgctactgtactagtgttgatagggtttgcaccgtatctcgtgtaccactaagtgctgtaccacatacactacgtacttaaccgtactaatgttggtaacactatattgtactcgttgaatgtcatatattataccaatgcactaagtaccgctaccgtactagtgttggtagcatacgaatcataattagcattcatatattacacatacacatattcatatataaatacattctatgctagtcttacctcatatctaaattcaagtgtgtcggtcgacctgaacgaaaaatcacgcgttgaatggataccctatatcacattcacgtaaatggataaacaacttgctaaaaccctttatggagacctaaacttaaaactaaaagttttcctatcgataaatagcatgaaaataccctaaatattaaggaaacaccaaaactataagcctttaaaaatagcccgaatcggtaaacaggattcctaggatcctcctcaatgaaacagttaatcagttttacaattttagcagaatcggttaaccgattcatagcataatttccaaaaaattacataactcacttaaattgaacccaaactctaccaaaccttccaatcaacttgaaataacacccaacaacaaattttgaccaaaaacagcaagaaaaacacaaagaaactaaaagtgccattgttgagccaactttgatagaattttctaattattttttttcttgaataatacttaataaaattaaacttagatttatctacaataactaggctgaaaagaacattcaccaaaatctactaaagacaaatctctccaaagtggcaaaattataattttgcccttgcttcgcacttaaacaacttaaaggctta

SEQ ID NO: 45079 - DNA, 972 bp, Cannabis sativa
ggtttttattttttctggaggaagtaaatgagaacaatatttttgttacatttacttaatttattttatttatattagtgattagtatcacagaaaaaatattttgtggaaataagagagaatgaaagaaagcaatggctcaacctacattgacatgactctaatctaatcctgcctacacctggctcacctagctattttgtgtgattaaagttcatatgagcaatctcaatccaattcataactgttgtgataagtatatttaattaatgagttatgaactcatcttaaataaacaaataatgcatatatataatggaagtgttgtttaatttatatatttcttcttctataaatgcaatcacaatctttaaccacacattttattttccttctcatatatgtgtaaattcaattttacaaataaattgaacaacaaaaaaatgaaaattgaatttttcaaattatctatcaaatcattttatatataaagcatatgaaatttatcactcaaatattaaagcgcaacattaaatttaccgttatatcacaattgatgtgtcaagttttaattattaaaaataaattatatgactgtgtaaattgcaatatttataagttagaatattgtgtaattaattacaatgtatcatccttatatcaaacacatacacaaaattgttgaataatcaacgtatagctacatataatattttattaagttgatgtacgtgcaacgtataattagtttttcttaattaagtgatgttaagtgaaatatatgtatgttcaatttttttaattaagtaatgtattttaattttttatttttaaaataagatttgagattttgataattttttttaaacattgtgactatattagtgtactctttagatgtgattatatatatatgtacaataaaaaaaaaattcattattataggtatttatattgatctttctatatata

SEQ ID NO: 45080 - DNA, 1439 bp, Cannabis sativa
attcaaaaagaggatcgtatggttcttcgatctgagatgagtattcatataattagggatccttggcttccagataaagataacccatttatgattttagatcatcctagtttgacaaatcaaaaggtatctagccttatgaaggttggagagtcgtcttgggatgaaaatgttcttaaagatactttcatagacgtggatgtaaagcttattttaaacattcctttgttctcctcaatgtttggcggtatatgcagtggaatggtgagagttcttgtgtttattcagtcaagggtgtgtatgggcttcttcaagaacttaagggtgatttaattggagttgataactcgatcttttggaaagagttgagggatttaagagtttctcctaaagtcaagaatttgatttagaatgctgcttccaattgtctttctactagtgtccaattaagcgtgagacatatttttcttctctcgttattgtgtccaaaatgcttgcaagttaaaaagtattttcattatctagtggggtgttcgtttgcttttgcatgctagcaaatgacgggtatttcattgctactacaaactcattaaccaaactgtcacttggcaatgctcatttgaataagatgctttcttttctctattctcatttgcctttttctcaaccaaacaaacattcaaatccgtactaaaaagtaaccacattttaacaaaaataacacatcattaaaaacatcaattaatagtaatacttctactaagttacttaatacatataatctcatcaatacaacaaaagccagaatcattactcaactatcataataatactaataaattatatatataataatacttaataagaagaatattcttcattaacttaattaacctataataataaaataaaaatataaaaataaataaatagatctaaatcaacggtgatggcgagggcaaaaggtaaccaaatagttgccacgtgtacaagtagcaatactagttggatcatcataagcataagaataagccttaggacaagccgccttaaatatcttcgaataagccgtcggcttacacgactgagggctcccgtattttccggtacaacaatacctcggcgaattaaaagccgaacacgcgcttttacaagccaccacgcgcctcccatcggctgaacgaacttgaagactagccggacacatcacattaagatcgcttatacacccggcgtagctacactttcccggcgcgccgccgccgccgccgccagatcgggaagtagtaatcgagatcccgaggttataaccatcaacgaggctgacgtcatagaaatcttgttcgttaccgagtgtgatctcggctaatgtagccggtggagagccgccggttccggcgcagaagagagctccgccgcaatctccggtggcgcagtgg

SEQ ID NO: 45081 - DNA, 1320 bp, Cannabis sativa
tacaaaagtaaagaaattgggctggggcagtaaaaatgttgtttttgccgtgtcccagtatttttgtaaagttttggtccaaaaacagtatatatgtaaatttctcttattataaatagatagtatgtgatgggcataagtcgacgaaaaacataatagttttttaaaaaataaaaaaaaatactgatttggtagtccaaactataaaagacttactaaaaaagcttagaaattttgtattgaggtaacaaaacatgctatatattaagatgaaaattgaatgtgcaagtgcctaaacatttattaccatatttttgttttgataaatggaatttctaatctgtcttgaaatacattgaaaattgcataaaatccaaaaccattgaaagtgatgttatattttgcattctggctagtgacaaatgaatatgattatcatcggtcattaaaaattaatgttcacttattaatattaatatacactataatagtataaaaattttagaaagaaaaaacacttggtcaggatcatcaccctaggccccaagtcattatttaaagatccatcaatatatataataatctcacacaatcgaatgcaggcctaacctttccttaaaaaaaaaactattttttttaaaagtttatgtagcaaattatatcctttcaattttttaattataataataatattctaaactaaatccaaaaccgaatgctatagtatttaaagggaattaaatgccttatatatattattgatcaggcatgcacaatgcaattacatcattattatttatcaataatttgttagttattagttgattggtcttagctgtcattttagttgaatcagttatagttgttatgattgtaaccatttctattttgcagctatataaagcttgcttcacttgtatttgtaactaatggattcatttcaatctcagtaataaagttttattgttttcttcttcttctctctattttttctagtttctagtttataccaactaatatggtatcagagcttgactttgagtaagctctcttcttcgttgctttctcttcttcttgcttccgcttctgttttgtgttcatggctagggaagaaggagagcgaactcgaagtaatcgtgatcttgaggataactcaaacgattcgaatcgattctctattcttggtgagaatttgaaatcgacaagttttaacgatttgtctaattcgtattttctttcaaatggcgataatttaggtgttgttctggttgatagcccttgttgctcgaaataaggtgtaacgccctatttcatagggac

SEQ ID NO: 45082 - DNA, 1780 bp, Cannabis sativa
aaaaaaaaaaaaaacttcttaactatgtgatatttataaaaaaaaaatactaaaaaattatatatgtatttttaaaaggttttttttcttctcttaatccctgagttgggtggactctaaacatagagttaaccttaaggtggcgtttggttgggactttcaaccaaacgacaccttaaatgtaatcttaagtcactttaataattagcgcaaggtgaatcctaaatttacagtatagtatgtgttgtacaacacgcccttaaattaagacaattaatttggacattttaatcatcataaatttcctagtgtaattaatgtatgtatatatatatatatagtaataacatagttgatgatgttaattaataattagtcagtactagacactaataattacatataactatacaagttatatatatataggattaattacctgcgccaggacaaagttcatcacccattctaattcctcttttttcacttggatatatataatatgaatatgtgtatatatattggtgtatatatttttgattgggttttgagggtatttatagataattgaagagatataaaatatgtaataggaaagaagaaaaacccacattctttgactttttagcttattttatttttcttttttctaatttcaatttgaattgtgttatgctattattatatcaataaatatgattggcgtccttatctaattaatttcatgatacgcaatttgagattaattaaacattaagaataactaattgcgtgtcctttaattattaattaatttcatgttaaaattttagatagggttcattaatttttttatttcatagttgacctaattgtaattaaataataattaagtatccttggattgtgatttttatttttattgagaatgttgattaatatagtcttaatttcagagttattctacattaattattatttatttattgtataatagctaagctataaagcaccttatggaagggcggctaatataagttaatttttagctaaaattttcaacttttagctattatgcagacgctatgggagtgctcttagccacgtatatcattcaagattaattacatatacaaaattaattaatgtattttatattaaattaataccttgtacaaaatttataatataattaaaattaaggttaaatagactttacttataatatgttaacattagtaaatagattaacaaccttaattaaattgattaagtataaatgagaggttatattattattataattaattatgtgaaattatttgagatttatcacatttaagatcccatttatgtgttaggggtatttttgtaatttttactcgagaagagtaaaatcgtaattttgttatttattgtacttatagactatattattatatagtatgtttatattttgtcttattgcaggcaattttcgacaaattagcgcgatatggtcacaattgagtattttggactcgaactgtaatttttgacaaattagcgcagtatgttcacaatcaagtattttgaactcaaactgagttccgggtccaaaataatttttatttgtataattatggcataacatgatatttatgaggatatttgaaatattgtgtgtaatgaaaagaccaaactgcccttgtatgccatttatatgctttatgtgctcttagagcaaaatggtcatttggccatctttccaaaattgagtatatatcatgttttatgcgattaagtgatttatgaaatctca

SEQ ID NO: 45083 - DNA, 890 bp, Cannabis sativa
gggtgggaggttgtgaggtgggtggggggttgttgtgttggtttgggtctcggtttggatccattgagtatggtcttgtgggtaggatgatgggtcggacttgaacaaccccacttgttgggtttggccgtggggaggacagctttctagggagccataggtgggaaagggtggtgtgttctcagggggagccacacagactgcactagcctggttagtagtcatgaaggaagccaccggagggttggcaaagttaagctgttcaggacacaaaaaagcattagtagtaactttaactttgcctgatatggttttgatatcataccttagctccggaggatacggggcttcgtcacatgctttcatataatccaaacaccctttgttgtagctatgtcccatgcggccgcagtagaaacagatgtctgtgagattctcatatttcaattcgagcaaaaccactttatcaatacccgagaagtggatgggtattccacgagggagcggctgagcaacatcaaacatgaccataagtcgaaagtagggtccctaggtctcacgaaaagacggtcggtaaacttccaatagatggccgagggaggaggagataagcacagccagctcctccgagcgtttcagaaagggagtgttgaacacttgaaccccaagtggaatcttgagcaagcgatctccatttaggacatccaaagagtttggaatgtccattagaatagcttggtttagataggtccaaggttgttgcagcaaaacccgacgcctatctccatcacaaccaaactcaacaaggaaaaggccattggaacgatcagtgatgatataactggacaccgagagatatggttccagtttttggtcattttttcaataaa

SEQ ID NO: 45084 - DNA, 2407 bp, Cannabis sativa
attgatgttgaataaaatagattacattgaaacggagttttatttagggcataaaacctaacattatttttattgattggtgtgtattcgcatttttactgatgataccaagattttactaaaagttgcgaggtccttttgatacagtgagtttcctttagtgttatccttctcgtgggggaggagaaatttatcccaatatataacaataattaatattttataattatttgataatgatgattataaagcacatatattctatattatataaaataaggttagttgactattctcttatcaaaagcttctcgtcagtatccaggcctcaggcaaatggacaagtggaagctgttaataaaaccttaaaggatactatcaagaagaagctagatgctgccaaaggcagatgagttgacgagctacctcaagtactctgggcccatagaactactgagaagacaacgacgagacacactcctttctcactagcatttggctcggaagcaatgttgcctgttgaagtgaacatattgactcacaaaagagagttttataatcaagaagaaaaccaggaacttttgaaattttccttggatctacttgagaaaaaatgaattgagtcacaattcaccaacgcagtatatcaacaccgagttacgagatacttcaacaaaaaagtcaagaaaagactattcaatgttcgagacttcgtgctaagacaagtatttgcaaatacgagagatgcatctgcaggagttttcaacccaaattgggaaggtccatatgtcatcgaaacagtagttggagttggagtttacaaatttgctcgactcaacagctcgctaataaagaaatactggaacgtggagaatttgcgatcctactaccaataaataaatgatgtaactcgcattactgatgaaaaatataaacttcagttatgaataaagagaatcatttacattaagtaattacaaagctttattttttaaaaattactaaagggacatttatgtatgattaaccagaattcatctagaaatacatggtataatccaaacccaccatttcaatttttttttttaaatttaaatgttctcaacaaaacctctttgatgaaacaggagtcgaattgttataatttcctgaccaaacttttttgacgagagaggggtcaaattgttataacatcttgatcaaacctttttgacgaagaagggatcaaacaactataatttttggttaaaaaactatgtgacgggaaaggaaaatcaaaagttataacttgcgtacaaaactgaatactaacggttctcacgagttaggaaagtgcaaaacgaggcatcacgacactttgaaaaaagtacttgaacctagaaaatggatagataatctaactattcatacgagcaaattaaaagtatgcaaagtgacaaaatcattaaagtatatttaagtttgcttaaggcagattgtaactgctatagcgaggcagaattgacaactactctaaaaaaagaaagtttggtagataaccaactacttaaacaggaagattgcgagcaatagaaaaacttaaaagtactgtacatttgatcaaaatatagttgtttacattgtgaataaaaatgcaagcaaacacaactgtattaagtttgaatgaaaatagtacaaggcatttaagataagaaaaaaaaacccaagttgggttacaaacttgtctttaaaaaaatgccactaggggaaaaccattaagtcatcttcctgaacaaagaatgagagggggtcaataaactcgagaagaccgtctacacatagcttggagaaagaccggctacacgtagctcgagaaagaccatctgcatgtagagagccttgatctctgcacagaccccattctcatcatcagatcccatttcctgaggtcgagacctctttcccagcctcatgaaatttcttgataccagagagaggttggcacgaggatcttctggggcaggttctggtcttgggttggctggattctctaatagaaaccacgccaacctccttcccgggtccattcgaaaccacgccaactttattctgggattccttgtcagcctgaggaggacctctaagatcgctcacaagatctatgtctattcctctggagacgaagaaaaatggtcaatggagcaacaaaaaaaacatataaaattaataatatgtatgattcgactcagatcaccatttacaagggataatactcaccctcaagcatcacttgtgatgatcgcctgtaacaaccaatggggttcccttgatttggattggtcatcatttctggttccaattgaggttttaagtccttgagaacagacggagaggaaaaatggttggtgtattctagagttatgaattt

SEQ ID NO: 45085 - DNA, 819 bp, Cannabis sativa
taaaaatgacagactttaaaaaagagagtaaaaataaaagaggacaatataaaaagagtatagagtgtaattttttcgtttttaaaatacaataagggcccaataagactttccgtaaagcccactaaagtccaatacggtccctgcttgaaatcatatatatatccgtgcagagtacgatttattatgattgaagataaccaaacctctttgcacagcttactgtgtcatccaatatcatctttaaatcatacttgtatgcaaaacccaagtcagtaagcttatgcgaagcccactttattttcctgctcggcccttccaagtacctgaatcaatattctaatagtattattattatgaactctcaaaatctgattgtatgtgaaaatctacattgaatactgtacactcactcctgcttcacgtcaaactctggataattttgggcaaagtaagaggcaatttctgaagatgagacaaagtcgctggcacacaagactcttccatggatggaagggttttccatgcaaaagatgtgagcttcacaaacatcgtcaatgtgcacaattggtattttaccaatcaattcttctaagtacttgagcgacttgttataatcttggttgtttgttagctgagaaactattacttttaaagtatctcctgcggagcgttggactgattctccacccacaaggccacatgcaagagtcacaacctccattggaatattccctgcattttccttctcgaaactcagaacttctttctctgctaatgtctttgattcttgatacgcctgtgtagatatatatatat

SEQ ID NO: 45086 - DNA, 1624 bp, Cannabis sativa
tattcaacacatataaaatcaatgttacaaattttatgtaaaacttgaatcatatataaattgtgtatgaagtgcggaattaatcaaatatatatgcattatgaacaagggatcgaaataccttcagtcattaaatctttgagcttcaatctcacacaagctttgatctgcaaaggaaactgattagcgtgggtaatcgggattccaagctcgatctactatctttagatagatttattatttttcaccgagaccctgtatttatgtaggtgagacctcctattaaagtctctgcacaaattgtcagaatattttaacaattaatgaggaaatataatctggacaactaaaataaattaaattagtaattaaataatgttgaccacatttcgaatatttatcaattaaactaaatactgacttttagttaaatcaattaaaattaatataattaataattccaacattagaaaatattcttatattctctcacttaatcgatattatattaatgtgccactcaagtccaacgattatccaagctaaataacaaatatatgaatcatggcaataggtcctcattatatggtgagtattatctttcatgtattacgatatatatatattcattatataatttcatgtgacaatatacttaagcgaacaaactctaaatcttatgtttattctggtccttttacgataattttctcagataaaattaaggtacacataagtacgataaaatatccaaattaaagtttcattaaataattttagttatacaactaaaaactacataggggtaatgaaatcccatatttactttacgaatcttgaatttgtattacagcatgtctttagttaaggatattgcgatcacccaattcagtagggaaatttgactaattatgcatacattaggggaaaattaaacttatgtgtatcaatattgaaaaaataggtatacaattatgttgagtaaaatgccccttatactcactcaattcctcccaaccgtccctctctttctctcaaacctcattttctctcatcttctctaacaattcaaactaaaattttatttttagtatacaattaacctctccaatggcaaattgttggtaaggacattgaggaagctgtgttatcctttttgaattctgggaagattctcaaagaaataaatgccactaccatcacactcattcccaaatcagtttgtcctaaaagtgtagttgacttcagtcctatctcctgatgtaatgtactatataaggtagctaccaaggttatttgcaataggcttaggaaaattcttcctgctcttattgtagaaaatcaaggtggctttgttcatgggagatatatagcacataacatcttggtttgccaagacttggtcagattatatggaaggaagaattgtaagcctagttgcatgatcaagatagatctaaggaaggcatatgacaccattgattgggacttcttggaggagatgttaactgcctttgagtttcctatgcagttcatacaattaattatgaattgtattaagactccaaagttttctcttctccttaatggttctatgtgtggattttttgaagcaaagagaggg

SEQ ID NO: 45087 - DNA, 2840 bp, Cannabis sativa
gtaggataaatgtaaaacgtactattttggtacacaacaggttcattcagttttgagtgtagggcctttataagtttgattaagttatttatcaagtgtcgttgtcgtgacatagggctgagatcgtcgagcatcattccactcaggtcggtctgcacacttgactttagacttgaggtaaaaaaaaaagtcaattctactacttagcatgtcaacataagatacggtaattaccgttgttacgaaagagttcttactctcttttgaaaccactgttaggttttttacttatcggttgcttaattgagcaacgatagttacataagattctcattggtaacaagggttaaggatgctttattacgtatcgattttggtttgtcttatcaacaaaataattgattattatcgcttaattatgctttgaataattgcttattctgtatgttgtaatctatgttgtgaattgttaaaatgttatgctttatgttatatttgtgttttacctgtttttcttgctgagtctttgtgattcatgggtgctctgtgatgcaggtaagggaaagaagaaactggatcagctatgagtcagaggtctcctggaaatgtacatactaacccgccatgctttagttttcagtggacaaggtcttctttttgttaggggtgttcatataatccgtaattcgtggttccaaactccaactaattcggaccaaatcatttaagatcggaccaaacgaatcttgtgtgaatgatttgactatctagactgtttttaaattctctagttttgtcacagttttagaaatctcggtagcggttcaaaccaaaccaatacgtataattattatatatatacttaatatattttttttgaataaaatgttaatatttgggaacaactttaagttgaatattgatattgagcttaattatattattaccataataatttttttattattacttatatattataaacttattaaaaataacaaaaatactgaaaaaataaacaattattgtaaaaaaaaaaaatattagaacaactacgaaatacaaaccacggttcgaaccaaactaatccgtttttgagtggtttggtttgatcatttcattggtctggtttggttttaaatttttaaaaaaaccataatagtggtttggtttgaaaaaattgaaaattcagaccaaactaatatgtgaacactcctactttttgttatgttttgaacatgtatcaacaatttgtaaccaattgattttgtagtacatagtaaaaggttgtaactgaggggatccccgaacctactggtattttgaatgaaaagtttaagttataatttatataattttactaaaagttttaattaaaccatgtttttcttaaactgttagtttattattataaactaattaataaaaagcacacatatggcggctcgttagggcattacaatgtcaatttgtatttttcatgtaaaaattttatatttatatatataacataatgtcattgtagacattaataatcttagttatgagagtccttaaacaaaaagcatgtatctttatagttaaaaatggttatttaataccaatttttagtttaatgatgctctttttattctgcttctgttgatattaacagagaaactaacagatatcttaatctattcaattaatattattttattaaatattttaattaatcggataatttaaacattataataatattaaataatactagtaatagtagatattttgctataaccatatgcaccaatttttttttttgaaagacatgcaccaatttaagttgactattttcaacttttttttaggagacttcacctctcgccacaaattgatttcttaaacataactataacatttgactgataacataattcaaaaaatggcgagaaatgcatttaataataagagaatttctgtgaacgaattgattgaatttactgataagaatttgaatgaaggaagttccattcactactgccagaacttcattaatgaggttatggatgcagtaagtgaaggggttccttcggttagccattcagtggagaattcctcacacaaattacaaaatggcaatggttatgtatttgaagcagatgtaaaagaaggtgaatctggagagatcgaattaaatgaggaaactgaatcatgtgaaagtaagattagggatgatggttttctcctatacaagaatttatgcaagttgtcaatgagattctcatcgcctgaacatctagatgattgaattttcttaagggagaagatattatatttggagctgctaaaggtagtcatgggcaattgggtattgatttggtgcaccaacaagaggcaaagtgatctatcttgtttcttatgcttatgcataattcaaattgatttgatgtgcatatttttttgttttagattttttatattaaaaatttaaaataaattatttattaatatttttcaggcaccaccaccatcgtcaccaactacagatcacttttccgtcctctttcattcgactagctaagaaagaattttcattatttttgagaaattgagtgctctcaaaatcactaaagaaagggcgagatatccattgtattatttagaatgtcaactgatggagtttgagttctctctcgtaatatattttttttccaatcattcttttaacaaaataaaaaaattatctttattgttgggatgttagttaatttagataattctttttattccgttcttatatttttgtataaatttcaatcaatcgttaaaggttgagagtataaaaaaaaaaaaaaaaa

SEQ ID NO: 45088 - DNA, 1416 bp, Cannabis sativa
atatatattggttcaaatgtgaaaagcatttggaatggataggtttaactcttatctaaagtcagaagcactctttactgcatccaaccactaaagtgtttagactaaaaaggaatctatatatataatttaatattaatacccttataattaatttactatattattcttgttttattttaaaaattgctgtctgaatcgttcaagcatctattctaccaataaagatattattcttctagagaagatgaaatgaaaaagaagatggcgacatatttatatacatatttgaaattcaattaaaaaaatatatataacaaattaaattattagacaattaagttgactaaaccccataataactccatctttaatttgttgatgctcaaagttaagactttcgcaaattaaggtcaaataattaattcactttagatgggtgggttaatgacatgatttgaagaattacaagtattcaaaattaggatactactgaataaataaatgtaattaagacacatatatatatagctcttaaattcctccacttaaagtaaatttattaattaataatctcatctcagtttgatgattttgactaataattagcaaatgttgttattcgtttattggacatatttttctcaatgttgtttggtgtagccacacatgagatatagagggtccaactccaagttacatgtgggtcgtttaagggtatacaatgtctgtagaaattataaaaatggtttcatttgtcatgtcacatttacaacttgtctccaaataaattttgatttagagttctaattacttagcaactctgttcttaggttgttagagtggtctttcggctactctaaccaacctaggactcacaatgctacttcaaaatagcaccgattattattttattattttttctatataggatgctatatcttactcgacactcgagagggtttgctaatattggatatgatcgcgaagaacatatataggtaaactcatatgatcttcaagtcgggattttgggtttgtcttggattctcatatcatttttgattgtgtaattttgtatttttgttaattttagtcaataggcgctgttgttaggttcaatttttgttgttggattagtttttgtattttttttcttgatgaatatgaaagagagataataactagttgttttttttttaagtacagtttctaatcatatttagattattaataagtatatttattaaatttttaatatttaaaatttaattttaagaataaccatactattgtgccccttatttagcttgttaaaaatagtctttgtataattttttatgcttatatttaatctatctatacatttggtttaaaagaattgatattgatgatgtggtagtcaaaggataaagt

SEQ ID NO: 45089 - DNA, 808 bp, Cannabis sativa
taattcgagtaggtttcaaaaactgcgtcctaattacttatatggttttagtgtccagcaatatttgatgtcattacttgtgacacttgagacatattgcaggccaagaattgatataaaaatatgattaattctctataatgtacttattaaaaatttatataattaaagatacttgaaaatttaactacaatatatttatttatttatgggaaatatagtaaagaaaaagaaaaaaaattactggaaaattgagaatggtgtcatgaccccaatatttcaatgcagctaagtcataagcatgtgctgctgcttcctcatcatcatatgcacctgaaaaatttaattaattatttaccacattttattagtgaaaataacaaaaataaattaaagttaaatctcccactaattaaattaattgaataataaacataaagtatatattaattcagaatatataccaagataaactgcatgaaggtagtacggcattaatttcatcatcaatcaccaccagaaaattcccaccaagaaaaaaaaaattaataaaaatcaattagattattaagaattaattatgagaaaattaaatatgataatagctaattaatcataattattaaattaataatttacgtaccttgacgtcctttcttgttctgagattcattccaacaattcttatcccacaaatgagcttcataccgtccagtccatcgatgccttaattaaaattaaaaaaaaaaatcccattttattatcataaatatcatttttcatttttaattataaaaacaaaaaaaaa

SEQ ID NO: 45090 - DNA, 3166 bp, Cannabis sativa
  modified_base (1249)..(1255): a, c, t, g, unknown or other
  modified_base (1323)..(1334): a, c, t, g, unknown or other
ataaagtttaatagttagcaggtgtagcagttatatgatttattattgttattattagtattattttattactttaagacaaatctgttatgacatattagaattaagatgttgtctactatattttatatttagatgttttatattgttattgatgtaattttatatcgagtctcgtataatttaatttatgatacatttgaaaagttatatggtgtaatttgaggtaattaaggaataaggaattttaaattacactctaattctcatggtaattgttagaattttgggataatgtgaataaggttttgatcttaaaagtaactggtaatggaagaagtatctcattcattttatatatgagaatttatttccacatattagtaatatgggactaactctaatacaccctcttcacgtttaggtctgataagtgtgggtataaataaaataacgatctttatgagaccacagggtagggtcaaacgtgacatttgaaagaatctcacaatgtcaaatttcgggaaatttgtagattttgaaacaaatcaaagatctcaacactgaaaactggcacacattgaccgaaaggttccaataaagattaaaagggaaacagtgaaagttttttaatttggctcgcctttttggaccagcggtactttgggctcacaaagaattacaagcggctctgataccatgttagaattttgggataaggtgaatgagattctatctcaaaaccaattggcaatgggagaagtaactcgtttatttttatatatgacaatttatttctacacattaacattgtgagactctctaatagcaattgagtgtaattaaattgtgtaattattaaaaactttctattttaaatattaactgttaaaaaatgttatttttatgtgtaattactaactattttgccaaacaaaatattagtaattcatatataattaccactatgtcttcaaacacaccttgtattttaaaatatagtacaattactagattgtgtaattatcaccctagtattatactacttaataattatacagttacttctttatacactcttaaaaactattataaaatattgttagtcaattacaaaatattacatttaggtagtactaagtatcagaggtggtttatagtaagggaatatttacaaatacacaaaaacaataaaaaaattacaaaaatacaatttcacagaatttcaaatatttttacgatttttttnnnnnnntttacagaaaatacggtcttttatgttatacttttgttaatttgttattgattttttgttatatgtannnnnnnnnnnnttgttgttttgatgttatttagaaattatttttatgtaatttttttgttgttttcgtattgtttctataagaaattataaaaatgtaaacataaaaatataattttttaaaaaaattataccttatgtaattatttcttgtagcaataccaagttgtgtcaaaaaataaataaataataacacattaaagtatggatgatcacatgatatttatagcaaaagtttcataagatcaagaggacttagaggagaagaatatgatgaaaaagaaaaagagagagagcttttgaattgccataaaaataaataaatgtcaacatcatgcagtattgtatcattattaccaaggattttttagacattaaatgttctgaaaatggcaccaaatatgtaatttataattttattttattatgcttttttgtgttttttctttcttctttattatggatagaccatagtaagtactaagtagagtgttatagctacttcacaactaggtaaggcagctttttttacccacttgtggggtgacatgacaatagtttttgacatagcttttatcttttttattttattttattttattaataaaaaaaaaacaattcgttgagtattttataaaaataatttttacaaaattttttattaataaaataattttaaaaaaattattagcaatgctataaacaactattatggtcgcataaaataaattaagtaatattattttataaattttaatattttacattgttaatttagcaattttctcctttatgtttggttttttattttttttttggttggatcctttatgtttagttgggaggtgaaaaatgatggatgtggaggaggtaagagtaggagaaactatagatcacttaaatatgaagattgttaataaatatgaagattctttgtatggtcattttattagtaaatttttaatttttttcaaaaataatttaatttattttttatgttcttgttgtaattatttatgatcacttgtaaatgtaaaaaaaaagtcttaataatttacattatctaaacttaggtttaaacatttacttgcaacttgtataagaaaaaataattgtgtatgcaatgaaatatgtaaatcttatttttgacattgtaaattacaatttacaatttaactataacgtatacaattataaaaataatttgactaaaaagcttttttgtatgccaaaataaataaagaatttactaaaacaactctttaagggtgccctgcaaacttacatatattccccaatattatatattagtacaaagagtgctactgtcaactttctattatcactttttagtcaatattcatgcccgaaaatataagttagaatttttttttcaatttcttttttatggcggtgttctttatgcttataacatcatcattgtaaatttttaaatttttttaaataatttaccgtactgaaaataagtttgaagttttttgaatgcacgtaataaactgaaatatcagaaactctactttcaatattataaattatccaaaactttttaaaaatttacagaaatgataatgtaattataataaatactatgataatttattttttttttagaaaaaaaaatgtaatatgtaattttgagcataaaattaactaaaatattataattaagacttctataatagaaaattgaaggccctacatgattctgtgtttattggttgcagtagttgctgactcatatacagcatggatatatacgtaacacctaaatatgcatacatctatccatttaatttataaatgtaagatagggaaatatattta

SEQ ID NO: 45091 - DNA, 1123 bp, Cannabis sativa
catattgttcactcttcttacagtttgcattggttgtctaaggtaattattagtttgttattaagaatgaaaagtataaattttgtgtccatgcaccatttatagtgttaatttaggattatatttacatgtgtaattaatctcaaattcacatatttaaaactgatagattatgatcatatccaggtataaattagaaaaaaagagtaaaaatatattaattgcgtgtagaaagtgtgtgtaatttatgtgtctctagcattattcttatttttattatatatgtatatatataagtcattcaattttatgaaaatgctataaattctataaaattcacttccaaaattactattttaggaataattttttagtcacaacttattagatttttggtgactactatcaaaattttaagggtagaaaaaattactagcttaattattactaaaaagtagtatttagaatacaagttattactaatttaatttagtcacaatttttttttgctttgagtcataaacaaatttaatttgttgtaactaaaagtaaaaaaaaaaaaattataataaaattgcttttctattatactgatcgaaaagttaatttgggtattattttgagatgaggatgattaattttgaatatttaaatgttcaattgtatttatacaatattataacgattaattgtatatataaattaatattacaaataaataatgaaggttccaagagagttagtgaatgatgaaagtggagaagcacataacaaaggaaatatttacattacgaatacaagtcctcctattgtattcaaatcttatttggatcaatttcaaaaggatttcacaaatttcttaagatatcgttctcaagaaatagtgagtggtggtatcatgatattaacattcattggaagtattcaaagtgattctcctaacaatatttatgaaatactgggaagaacacttaatgacatggtcaaagaggtatatatgcattaattataattattattagagaattttattttatttatttaatttgaattataataatgtgttttatttattaataatatttcagaatataattgaagcaaaatgtgtagagaattttaa

SEQ ID NO: 45092 - DNA, 933 bp, Cannabis sativa
ctcaccccatgagtaggggggcgcataagaagcagctagagtaactctactctgtcatcaataaacaatctgacagcacaaaaactaaagctagaggattgaaaatagatgagaaaccttttctctaatgtagaggtaaatgtgttacatttaacaaatattgaagtgatactttttatatacaataatctattatatatcttgagttagttttcatcactgtgtgatttctatatgcaggccagagcagctacaaaacacagtacttgttctttttaagagcctcgactggagaagaaagctccactgcattttttttttttaaaaaaaaatgtgaattggaatcatcaatgatgatagtttgttcctgattttgtttttgttggggttaatggtgtgttttatatcatttctaagagggtaatggcctgttttggttattaattaattatctagagtttaggaagggatatgattacttacatccatcccacctcgtttttggattaatggtcgtagaatgtatgtactctgtttgtcgtttgtaatttcaactagaatgattttcttttgactgttagtgttttattgtaaaggttgtgtacattaattaatggataaatattatcaacaacacaacaaacaaaaaagaaagcatcttatatgcaagaaaagaagaataatataacagcaaaacgtctatttcgagacataagaattatggggagtggaaaaataaaaagtaaaatattataaaaggatgcacagaaagagaattcaaacaagtaaaactcagtgaacaatgaccagatcacacctagcatccaaccaagttatatcctgatacagcaataagttaatacttctataatcaagaagatacaagaacacaatacatatacatataaccaggagcacacttgagcacaacaa

SEQ ID NO: 45093 - DNA, 1174 bp, Cannabis sativa
aggctcatctggtccttagtgtattaacatcaaattcgtgtccacttttgtagtcctgcacttattgcgaagtttgtttggaacctcagaatcaagtcttggtatgagtttattgcgaagtttgtccacatattcctccctgaacctgttgatgaatttctccaaaggctcctctggtccttggtgtattaacatcaaatctgtgtccacttttgtcgtcgtgcacttatttcaaagtttttttggacccttagaatcaagtcttggtctgagtttcttgtgcccgatgcaaggttgtggaaccattgaagagcagggccccttaacccttacatgaaggtcttttattttattgcttctaaatcctctagagggactgacaggttaacatcttctgtttgaactgacacacgtactccgatgggtctccagttctgttatattctagtaacttcgaggctacgtaacgttccggggcttctacgcgcaaaatgtggtttccaaaggttcaatgagtggatccctccatcctcacccattcgctttgtattcccacctaactttttgcttccaaagccaacagcttattccacatcatttattgcagcttgtttacttccttatttatcattgacgggttttctacagctgtaggttcggtgattcgcttcctaggcactgtgcaaagtgcttctgcctctgttatttcctccacttcttccctggctcttcttggttgttcctatgggtgctctgtagatccttgtgccatttagttttctttcctcacggatccttcatgcatgcaatgagtgcggttgccagtgtgattgttactgtagttgtttcccttctcagcggttttacccgtctattggttgtttatttcttctgcatgtggggggcattggtatccttcaagaactaccttcatcctgttttcattttctagtctctggacgtgctccttttggaaagcaatttcagttccctgtgttgtcattttgtcctcttaatgctttaacctttctagaatctcacgccatggtgggtcttagagaaccgtttcattagtagtgtttacttgggtctctcgggtattgccgtgattgtcaagtggggtcagattttcttgttcatttgccatatctatgtattttttttacagttgggg

SEQ ID NO: 45094 - DNA, 1803 bp, Cannabis sativa
  modified_base (1761)..(1778): a, c, t, g, unknown or other
caatcccacatcgcctggggaaggtcaagtgtgatgattttgagactgtgtaggtatgggactgcacaattaaagagagtttaaatggattgattggtaccacatatatcaataaggcgcatcttattttctggtaacccatctcgaaagaactccacagttaagcgtgaacgacatccaatccaatccaaatgaactaaactgattaattataaaaaattggatatccaattacaaattagattggatgttaaagttgaattctaattgaattagatagattcttggatgtcaatctcaaaagtttatataattagatattcaatttaaaaattgattcaatcctattaatcaaagtttaattaaattggatggaatgataatttttttaaatctaattactaattaaattgaattagattataataaaaatattggattgaatatatatactcaacccttccaccatgatcaaatcaataaaacaattacttatccactttttaagcacatctaataatatataaattagcatatattgtacgtacttgaattaatatgatatatagtgttagaattaatcctcttttgaaacttcataatcataccgaccctccaaattcaatcatatataaatatgattagaaatgagaaaacataatttgaatccattaatggtttctaaatattatgttagtgtgttctttgaattttagaaatgtgtattaaaaatgattgagagagagagaaatgataattagggtaaagagttgtgtagcattacacaaaaattaatgtaatatttattattaacttaagctattgttgaaaaattagggtgtatatatattatgaagtacatatgtcattagtcaagttgtgatttcataattaaataatcatatgtataaacttgtgataacaaattatatatttaacatgtattttgtgtacaataattagcttattatataatacccaatacaaaccgatttcaacaaaattttaaattaaattatatagatcaatatttgttttagatatataaaacacacacatatatatatatttctcgaatgtgtatctttatctttgacaagggattgtccatccatgcttctcttaatttgaataataatctcaattaatatatatatttatatatatatggtgacaaaataccatcttgattcttgaaagatcaacttcaaatattgatatttttgtatgaagatatttatagaataatatgatgtatgttaatatgtttttgtagtaattggaaaattaaaaaaggttgaccattgaataaattgatatgtagctaattaagctccatatttaataaactaattcaatgtgattaggactatactataacacaattatacacctatatacatatttaaatatgtaacgatatttgttattatagcaattggcgaacctttgatataagttgatggaggtgtactttttttttaagggaagaacatatttttttttatatgatataacatgttaaaaattgatataaatttatatttttaaatattaaatagtttaaaattaaaaaaaaaataacataaaaatgctgactttggtttaaaaagtaaattttaaatagttaaacacaaaatgtttttgtggaaatttgaaatctcttttatatttataagttaatttaataattatactaaaattaatattatatttaattataaatatatatttgttatgaaataatataaaataatatannnnnnnnnnnnnnnnnnaagaagaagatgaagagagaaagag

SEQ ID NO: 45095 - DNA, 1405 bp, Cannabis sativa
aaagttcaacccgcccaatgattttgtcggtttggtcgggttaacccgtccaaacggttttttttttttttttttttgtttcatggctggcacagagacatttgagtttgttgcagatttccttaaaatatttcagttatttcacaattatctgttgtcgttttcttttgttttctctcaacgacattggactcttacaaatattacttgttttgttgataagttgagttcatatgtgtgcaactagtttgtattgttgagtacgttgcgttatatatttttcttgtgaaaatttcaagctattagtactcttgccagttatatatataaatatatattttataaaatcacactaaagataagttatcacaggtatacttttataatttgtaaatatcatgttatgtatacattaagtagcattaagtaaataaacaaataaattattgcaaatttaaacgaaaagtttcctttaagtaacgaatgtagaccacaccgttggacaaaattaattaattaaagagtaaaacgtttctcagaaccaatttaatatgttctcattttagctttggaaggttttttatattttccttatttcctcttaaataaatcaagaacaaaatgattattattttttgaaaaaatctataatgtactatttaaataattatttaatatatattctgttcacaaaaataattttttgaaaggtgattacaatatgtaagattttctttttgtatttataataatcactaaggtggcaacacaagttgaagaagaaaacacgattcgaaaacccaaagctgggtcataatttttttttttttttttttgagcagagtgacttgttgaattacaacaaatagggaaatgggtcacttctattccaaaactaagtgttatctaatttaatagacatttgtgctaagttgtgagctgttgtattccttagcctgatagtgtggcataaggatataatttagaagaaagagaatacttttttaagagattccactagctagagctctataatatgtgaggatggtttcttgtgcttggatgacccgaacaaggttcaagcagtctacctcaacctggtgtacagtaatttggcagtctttacactaagttaatgcttggagtaaggatcagacctcagctgtctttagggacatcgtacctatgttcctacacctgttctttgtttcctgggaagtacacgactgtagggattttatgccctaaataaaacttatttcaatataattttatttgccatcaagtgttggccaaatatcatcaagtccctaaactacccctgcacataacagaattaaccaactgtctgttatgacagttggtgatctagcccctactattcagctaccacattactatataa

SEQ ID NO: 45096 - DNA, 4410 bp, Cannabis sativa
  modified_base (4369)..(4375): a, c, t, g, unknown or other
taagtttatgatatattatctaagtttaatattggtccagtccgatgtatactccatacatctaatcctagcatactttgccaataccctgaaaaggacataatctatcgctgattatcatgtcagttcagtgtactaacaaaccatgggtcataaactttgaaatatataatgatgattatattctattgtgttgacatcactataatcatgaataactatatgtttttgatttaatagaatttatacattaaacatataaccatgaaagcaatcatgtgaaccatgcaacataaaatgatttctgatattttattaattagtaaatctgatatattgaaattggttttatttagggtacaaaacccaacatcaagttagttacagaatttttttgaaattgtgaaacaactcatagcatatgtaagtatcgattggacaacgactttcaagagcacttcttctcctccaatggagaataatttttcctttcaaacattgagcaatttccaaattttttctttgatgttactgaacatttatgtattttctctagaagagtatgcaggaagtctaagatatctttcatgacaatcacttatagacatgttcaatgtttgatggaaaaacatttaaatagcttcttcaatattgggtgagaaggacatgacaaatttttgagtgttgagaagttgacctgatgttcaatgacaaatttttgagtgttgagaagttgacctgatgttcagtgataagtttgaagaactctctgtatagccaaggctgatttgtttgtagcatgacaaaacaagaggttgtcatatgcaaataaaaggtgtgatatcaatggggcatgtcttgtgagacgaagtacttcaagattaccaatagcttcctcatgattcaataagctagataatccttcataacatatcaaaaataagtagagtgataatggactgccctatctcagtcctctccctggaatgacattcccaacaatttcaccatttaaagaaaaagaaaaacttgttgaagaaaggcatttcataatgagtgatatccatcgttcttcaaaccccattttttccatcatagctgcaatatatgcccattcaacatgattgaaagccttactcatatctagcttaagtgttgagtagcctttccccccttgatttgtatgcttgagatgatggactaactcaaatgctacaaagatattatcagtaataagacagatttataataaagcactcttagtctatgtgatgacaatggaagaacatctttgaatctgaggactaacacttttgagatcagtttgtaaatgacattgtacaaaattattggcctataatcactcattccagtttggttattgatttttggaataagagtgataattgatttattcagcatatccatatcctaaccatcgttgagaactcccaaaaccacattagtaactgagggtccaacaatttcccaatagttttgatagaacatggttgacataccatcactactaggactcttattaggactcatagatttcaaggccacaagtgtttcatcaggtgtaaatggctacgtaagattttcattcattgaagtagagactgttgtaggaaagatgtttattgtgtgctgaagtgccgaggtgccaacgggagatgcagtgaaaagctcctcaaaataagatgaaataatcgttgccattcccttctttgaattttctgtaacaccagctacattttaaagtgatttgattgcattattgttctgtctaaatgttgcatgagcatgaaaaaactttgtatctttgtctccattctacatccaattcactcgtgatctttgctaccaataagtctcttcttgtgccaataatttatcaagagttgtctcagaattttttagctccaccattgcttacttttttctattgctgtcattatttaatgcaaaaatttccttctacattattgttattttctgcttcatattcccatacttttggacatgccaatgttgtaaagatgaagtataaccttgcaaattatccttgaaaacctccacggcttttgttgctgttgatgagttccaattttgtttaatgatagcagcagcttcctcttcattaagccacaatttcttgaatctcaatcaaggtttgtgtttgacttgttcatgcctttgattgcttgtttcgacatcaatagtaatagtttgatgatctgatctatagtagtctatgtgattagtgatcaatggctcaaactgtgtttgtccatttaccattgaaaaaataccagtcgagtctctctttgatggtattagctttgtgtcgacttttaatctaagtcaattgatctccttgaaatggtaattcagacatattgcagtggtccaaagcttgcctaaagtcatccatttgatatttatttctcaaagctctcccttgcttatttgcattagaaagtatctcgttaaaatccccaatcactagtcatggtaaaagtggagctacatcacgtaacctctttaatgtcgtcaatgaatggcgtcgattattctgttttggagaaccataaaaaagcaataaaatgccaagtagggctgttgcaaaaagccatatagcagtcaaaatatttgaattaaaatttaaaagtattacatttacatcatccttccaaagtaaaagtgaaccccctcctagaccttcccgtgggacttcaagtccatcattaaaatgtaaagcatgacaaaaatgagaaatcacattagaaataagtttagtttctctaataaataatacatgaggagattgctctttgacaagcaaacaaagatgacaggatacattcggattcctcagactttgtgcattccaactaataattttcatgactttttgcgaggctgtgagccagccaccgtagaattgtcaaagaaactcgagtgattcaaggactagaaacactctagtttggctcatctctaggagacaaagttagagataacaaggcttgcttaggtccctagcatctttcaacgttttcctcatagagaggctgtcaaattgtctctttatgatttgatttggggatacattttccttatttatagttgactgcttcattgatgaacatatgacaacatctgatgctgcaatggtggacatttgcagaggcttgaaaccaggtttatcatgaggatcgtgtatatcgttgatggaattggaggataagtggcaatagtgccaacatctggtatgtaaaggtcagagagatcatctacatccagagtctttactgctagtttatttgttacaattgctgaagaggattgacttgaggcttcattttttgcaccagaagttttgctgatgatatttgttaagagtactatttatgtaaattgtacaattgttgttgatcgtgtgtttgcagtggcaattatatttgtgttcgtgactgctacactttgaacaaaagcactagaaggagcattgttcatcaagggagaggttacacttaagggtggagtggatcttggagtaatggcttcaattctatcattttgttgcttcttagatgattctcctagcagaagaggccatggatgtggtgatgttctgctagagaggcccggaactgctgacactaatgaatttcgagccaagcgcgtgagtaaaggccaagcattctgaaaaatatgttctgcacctatcataaccaaatgtggggagcataaccctttttaattcagggccatatggtaattcaggttcaataccattatctattttttccatccattttaagtatttttgaaatggatgtccaagccttccacattccatacaccattccaatagcctttcataacaaaaatctacccagaatttgtatttgcataagtcgtatgttgcaacctcttaataatatcttagtgacatccagtttgacctgaaactgaagaaaatgatcccaaccttcttccaacgaatcttcatggacttccagaaattcaccaatgatgtctcctaaagctttggctaatgtttttgacttactaagaaaaggaagtttatagcattggaccgaaaaaggagagaagataaattcttcaaatgtgacattcaacagaacacttagcgtgcatagcataatatggtggctttgaaagtgataggtctccctgagaagcacccttcatttgtctccttcacatccgaatgtaagaacaaacaaattaagtggttttttagttatcattgtgtggtaccttccattccaatgatctttcatttgcctttgtagtgtagagaggaaaacaaattttgtaaagcccgcttagttannnnnnnaattagcagttaatcatgattatttatgaaattat

SEQ ID NO: 45097 - DNA, 1191 bp, Cannabis sativa
taatggtacaggttcagtagtaggaggagcgaaagatcctaggtccggccccggcggccgctacgtacggcgttgtaaacagccttacaggcgaaattgcataaagaactaatgaataatatcacaacgtggtcgagtcgagacacttatatataataattattaagttataaacctaatatataataagaggaacatgtatatgtaagggcttgaaattgtggggaatatatatatgtttcggcgggtctcgatggtctatataatatgatcatgattattagtaagtgtacgttattgatgtgttaattaagatcatcaattatatagtaagttttcttttgatataatatatattttctgatttgttaaaggagattgtgtataaaatatagtttccaaagtaaaaatgtagattatatatatacatgtcttaaagaagaaagaaaaaaacatattgattatccataattagtttcacttttacacaaagaaatggttagtatataaaagatcgaagagtactttgtcttgatcttgtttttggatatatgcaaaattttagttacatgcaacttttatcctttttatagctgaaaaatgaagtcgggtgataaaatagtgtattttttttaaagtaattttataatattacagacttaattttctggaaaaaaaaattgcagggaaagttattacacccaaattgatgattttgtctcattattaggatatctattggtataggtgattttaacatctcaaatagaggtgtaaataagctgtaaaaagttaaaatatagctcatttaacaaaaagtatacttcaatagtatgttaaaaagtaatataaattgacacatagcaaattttgtgccaaatttagcacaacatttgctataatgtaaaatttataccacaataaatgcactattttttcatctatatttatgtcatttctattattttattagtatatttaactatcacattaaattatgaaacatttatattatttttttattgtctcacatattaaaataataataaaattaattataaaattattaatttttttttaataaaatattaattggataataaattttacattaaaattttgtaattgtatattggagcacaaagctaaaatttgatataaatttaccacaaaattattttttgtgtcaaa

SEQ ID NO: 45098 - DNA, 1059 bp, Cannabis sativa
  modified_base (921)..(928): a, c, t, g, unknown or other
cattcgtcattttcttcttcatttgagtcatttgagtttctttgcaagccagaaaactaaaaaccctcagaaagtaccctctgcgctgaaagagagtagtgaaccctactttgtatcaccctaatatataatctaaccaaattcccattttacccttcacgtacaacgttgttcttttaggaataggaaatatagaaacaaggaaataattaatataattaacaaaaaaggaaataatctagttaccactttattaattaatggtttctaacacataaaatatttcattataacagagaagatttaaaaggatatgtcataacaatcctcactctcaattaaaataggacatcatttttaacacagattttttgtaatacctttctaagagcttataatacacttaacagaaatattttaagattttcttctaatattatttttttaaaaaaaaaattgaaaaagtattatcacataaaaaaattatacacattttttaacaatttaatttttgttcttggactacattttattttattttcttaagtggtgtttactaacacttttgtttttaaattttttaattacaaaaataaaagtaatatttttatttttaaaattttgattttgaaaaacaaaaaataaaaatgtgttatgtaaattttatttttattttccatttgttaattttattataagtcgggtctgaggtcgggaccggggcgggtccaagtccgggattagggtcgggttcggtttcatgatttaagttggggtcggagtacaaaatattaattaaaaaaattatttaaaaaaatgttgaaaaagtaattttttttcaaatttagatttttaattaaaaaattgaaaagcaaaaccagtttatcgaacataactttagaaaatattttcacttttctnnnnnnnnaaacaaaaaactgattaaaaaaatattgccaaacacacccttaatgaaaaaaaaaatctctatctataaaaaaatgttataaaataatatagaatggagaaagaaataagacactacaagaaatatcactt

SEQ ID NO: 45099 - DNA, 1572 bp, Cannabis sativa
tcttagaattgccatgggcttgggaacctatgggctcaacaattcattaaggatcttgtgatccaaaagaaacccaatttcttgtttttatgtgaaactttggcaagaaaagaagtggtggagaaggttcgggttttgcttgggtttgaaggggctctttcggtggatgttcaaggaaggagtggaggggtggctttgctttggagagttgaagatgaagttaaggtgttgggatatgggagaacgtttattgatgtggtggtctgtggtcacgatcaaggtgaatggcgtttgacggggttgtatggagaaccaaatagaagtttaagaaagaaaacttgggagttgatgggggagctgaaaaacaaatcaaacttaccttggtgcattattggggacattaacaatgttacttcccaagacgataaaaggggaggtaatccttatcctagttggttagttgatggttttaatgaagcgttgggtgaatgcggtctctatgatatggagctcaatggttacccatttacatgggaacgtggccgtggttcttcagattgggtggaggttcgtatcgatcgcgctttggtgaaccaagcttggttagatatctttcctcttgctaaactttttaatttagaagtttccacttccgatcattgtcctatacatttggttattgataataaaataatggctgcttctaatcggagattccggtttgaaaattcatggttgaaagaacctttgtgtatgaagattatagaagaaagttggaatgttgatcctttgctgtccattattgaaaaattaaaagtttgtggcgagaaactttcggaatggggtactgtgtattcgggtaatttttctaagagattaaaagagtgcaaaatggagattaaaaggtggaagaggggtcgggatgctttgtctatagaaaatcataagcttgctactgtgaagttgaatgatattttgttgcaaagggaaatcttttggaagcagaggagtaaacaaatgtggcttagagagggggataataattctaagtacttccatgccatagcttcagcaaggagaagagggaatttgatccagagattaagaagtgatgaaggggactgggttgactggcaaggaggcttgcccacggtgattactgagtatttctctcagttatttacggcttcaaatgttgatgtttctgaggttgttaattgcacctcagcagtgttatcaaatgaagacaacaggcggctgttagagcctgttttggaggatgagattcgacatgctctgtttcaaatgcatcccgataaatcgtcgggtccggatggaatgtcgcctggcttttatcaaaagagttggaatattgttggtggagatattgtgaaatttgtgcaaacgttctttgttacgggttcttttccaagagagctaaattgtacaaatgtagttcttattccaaagaagaaacaccccgaagttatgacgaaccttaggccaatttccttatgtaatgtcttgtataaggttatttcgaaagtcatggcgaatcgaatcaaacaagtg

SEQ ID NO: 45100 - DNA, 1282 bp, Cannabis sativa
aggccaaggatgaggtcgtggctgggacgaggagggacctttgggattccaaggaagcagttcaagaactgaccgctaagctgaagtctttaaaggattttcactaggtgaaaacttgcagacaacaactaacttgactgttgaggtgaaggggcttcttgagtaaaaggagcaagctcaaaaggaagcagctaaagcaaagagggatgctctcctggccccaatcacctgtcagcactgcaagaaacgcttcgatgatggggttttcatggcttggcagactaatggccagaatctttgtcttaacttttacccttagactgaagaggttttggctcgcttccgggagaagaagaagaggctggatgcagtgctggaggagcgcaggggccctcatattcctcctcgggctgactaagaaatttattttatatctcttcctatgttattgttaatgtttttttatcctgtccttccccttacttctaagacaatttcttctttttttaaggggatacttttatggcccatcccaggccttttctttttaagattctcttactcaaacaatttatgtctagatatatttgatctttcagttttcttatgcttgtcctgtttatatttgcccgtatgatatgccttaataccctctaagtgacatgaaaattagttttgaagtcacttactcttacaagtttaaataagaagtttcatatattttttcggtacaaattcttttacagaatataaactttgttttttaactattgataatactttcggaggtgatcagcattctaggtcgtaggcactgtggttctgtccattctttttagcttgtaggtctcggagccgatttcatcctcaatctcatatggtccttcccaatttggcccaagtacccaactccgagttcttgagtttctgggaagactcttcttaagactagatcactaatggtgaatttccattttttgactttggcgttgaagtgtttagccacctttctttgataagctgctatccgtacttaagactcatcctagagttcgtcaatttgatccagtgcttcttgtaataaagctttgtttgttgtcagatcatatgtcgcccttctgtgggatgggaacaaggtttccaccaggaccatagcttcacagtcgtacaccattgaaaattgtgagtgtccggttctgtttcttggagtggttcggtaggcccataatactcttggcaattcttcaggccaattatttttgcaggccagcagcttcttctt

SEQ ID NO: 45101 - DNA, 1406 bp, Cannabis sativa
aaagttccacgagcaggagagccgaccataacctaaatgaatgcttatctctcgatctcacaccacctaaatttatctacttgatgcccgactgtttaaaattttccctcttgagtaatatatatcacaatctagataatagcctcaattataatcatataaggtagaacaatatataggacatagttatggcaacaattaaacaaggtagaatcacatgaaaaatattaaactaaactaaactttgcattaaatcataaaatcaaagtcataattagagatccatctaactctaacaactaagaaagccacacatagtgtggtttatcatatcaaaatattgtttataatctaagtaatactgagaaataaagaagaaagaagaagaacaatagatgaaaactctttaatgtagctttaggttgcttcattgatctctcgaggttgtttctctctataaagttgtatttttctctatcttttgggtttttggagctgaaattataatgcttttttataggcgagaaaagatgaaaatgatgatgtttgaaaaagataaaaattcaaaacgtgtacggatggcactatggcgcctaagagatagtgctatggtgctaagcgagattcccaaaatcgcgaacgtgcaaatattatctttttttttatctttttccttggctggcgctatggcgccaaaggcctttttttgtcattttttttactactttgaccttgttcagtaaaatatgcataacttttatgtccaaagtccaaataagatgttttaacatgtttgaaaatctgagaaagagctctatcagtttgtatttcacaatgtctttgaaaaaatgaagaaaacatggttaaaaattatcttaaagatctcagcccatcataaaattatctttcaagcataaacctacacaattagagaaaatacataaaatccaataaaaaaactcaagaaaaacatcctaaaaaaagaataaaaaagagtaaatgaatgcataaaagcattcatcactaggttataggcttcactctagcgagctcctaacaacgctcctaaaatataactaaaataattttttaaagagttattttcttaaaaaaaaaatatggtagatatttttttttatatatgtctaaatttaaatttaaattaaattttgttatttaaaaaatatgataaaattgaatcaaattattttttttattatttggattaataattttatctttgcatatatataatacaaaaattagttaatgcaatacgtatttgctatatttattaattattatttatttttgtaatttttacataactttaatcgtcatttaaacatatgtttagttacaatttttttacttttaataacaaattttattttaactaaaagtaa

SEQ ID NO: 45102 - DNA, 852 bp, Cannabis sativa
tgctatatattaatctaattgtaataattttggttaatttattggtaggagtttaatcacttttgctgaggtggggtgtgaaggaccaggtgctcacatgtctaaaagagtaacatgggagaagaaattaacgaatgtagagttgcaaaagttgatcaatgtcaataatttcataaatcaagatggatggttgcaaaaacaaccataattaatatatacatcgactttaattatatattactttatgtactcataatgagaaaattatgatcatagaagcaaaaagtgctagtggaacacattcttctatggctatgtaattcttaaaatgtcatatgctatagtggtcggtgtatattaatgttttgacttccctaataaagcttatttatttatttcacatgaattgtgtttacttcgaaattgatttaggtgacgtgaacatcaatgtttaacgtgaaaagaaaaaaaaatatttatgaagttaagtagtcccgagtcataacagtcgacctagggtacctagccttatacctaagttgactttattgagaactctaaaatgggtgttggatcccgccaatttattttcaactcaccattcttcagtattctgaaagacaagaagaatccaagtccgaagcctggagcctaaaaagagacgaaataacaccccagaagtcaacctaggtgcctagggtctctacccagcaccaaagtcgacattcccagctagagtttcaatttttggatccgtcttagtgtaaaacaactatattatcacaattatcaatcccatagtacctttgggtaataataggtaaatacgacctgtgttttgtaaaagttacc

SEQ ID NO: 45103 - DNA, 3970 bp, Cannabis sativa
agtctttctatgtgttgattataccaaaatttttatttttatctctatatatattcaattaataattaaaatgcaacaactcacttaataaaataaatataaacatatggtagaaaatattattagtggtattgattggtttttctttgtttgtatcaaaagtttgcaacccacatacataatccctcttgaaagagatttgcttggcccttgcaagctaaagcttattgtggtggcgccatcctttagatggtaacttttgaggtgataccgatgatccaactaaggttggctaaggtataaggctcatgtagttgacacccactataaaaaaatttacttttaatcataataaaacttatgactaaaagtgaaaaaattgtgactaattataaattactattcttatattgttactaaaaaaatctgtaactaaaaaggtactaattacaaaaatcacaatttgttgtaactaaatgtatttatagttacaatatttgttatgactaaaactaaattattgaaaacttgtatcaaaatactatgttttagtcacaaataattttttgttgcgactacaagtcacatttaatcacaaaaaatttatgttgtgactaaaagattgtcactagaggtagttttttttttttgtagtgactatgcaatagaaaattaaataacccaagaaataaatttgtatataatttacaacacaataataatcgtacaaaaattaggtttgcatacatgatttatccatagcaattaccgcaatttgatagtgcaatactatcaactaagtcttcctccttagatctctaaatcagaaataaatttatttatctggttatcaaatgatatacaattatgatgagacaatatgtatttatagaattagtgtaatatctcgaaaatttgattatgaataactaaggcacattttataaaatatggattgataaaagtttaataagtaggattataatcttactaatctaattctgagagaattagggaattttctataaataaataagcaaaatgtattaattacagacattctattagaatatgtgggtaacatgcatgttatttatgaaataaaaatatttttcagtctagcaactgtggactcgatcggtggccagaaatatcacaatggtattaattatagtattagtgaaatcgggaagtttaattgatttggggtttattggcgtatatcgaggtatttggttatgacctaaatacccctaggttggtaagtacttaagagttaagtaggaggggcattgtggaatttgtatttatgtaagagataaccttttttatccttttgtttcttttagttaggctaaatattattattagtattttatttaattgtcttaaagatagattttagaaggataagtattaatcaaccaacacttatccatcaatctctttccctctttaattgtacgttaagaagaaccaagagaaaatcccaaactaaaattcttatttctcctcatctttagcaagtttcagcaagagtaattgataaagcttgaagtgaagaaataggtaaggctctagttcttccttttattttatttcttgaataaggataggtttcaattttgaattttggtgctgcaagtttagacaaggctttgattgagttcctaggtttaaattagagttgttttgaagtttctaagcttttattgcaactggttttgttggatgaagcaagcttgagttcttggaactcaaagtttgagtgttaatggcagatttttgtttgtgatataatttaaatttctattaattgggttatgtcatatggatgatattgagttgttctgtgaagtttggtaggattcggttgaattttgaaaggttagagatatttgaaactcagagttttcgcttcttgcaaaaaatggcaaaccttttttgggaaaacaatctaccatttttcagggcagggaaacctaaaaaaatgatctatcattttgggtgatgctcaggaacctcgtttttagtgttttcctaatatttaggatattttcacgctatttatcgatagaaaaacttctggttatgaatttaagatttagaacgggttatatcaagttgttgatcgatttacagttgttgtaacatagggccaagattatcgggcgtttctccactcaagttggctggcatgcatgagtttagattaaatgtaagaaaagtatgatcgtacaacataacatgtcatgttgagttacaattattatcgtttatgaatcattagttatcgaaattaagatatggtaattactgttatgtaatgaaaaggttgtctctttagataatggtaaaaatattattttattggataactctaagtcatgactattgatggaaattattgttaggtttcttacttgtcagttatctcattaggtaatgaaggtgacatatggaagtcgtattaggattttcttatgaggcaacattagttatatgaatgtttatatacttgtgaatgtgtgagtgtgattacctgattgtgatttatctgaatttgagtggatgatatttatgtactaatttgtgatattatattatttcttttcttgttgagtctttgtgactcataggtgttatgtggtgcaagtaagtgatatgaaatatttggcaaccgtgagttatgaatcttctccaacaaatgtacatatcatcttatccgacaacttgagctgagtttgggatccatgttttacgatgttctaaaatttaaattgtaatcttttgtaatattttaaaggagatctccaatcttaaaaaatttatgccaagtaattttatgttttgaattttattagcaagattttaattaaatcacaatttttcttaaactattagtttatcattataaactaatttataaaagcacacatgtggcatccttaggaagcagagcgttacaacttggtatcagagcagccatggtcttaaaggtcctgaagactgactagatttatttgatgtgaagataagctcgactcatagtatagtaagtattattttcttacctattatgtgattaattgtttatatgatattgttagaaatatgttttaaaaagtatgagttgagattatttgtgttatattaattatatattgattgagaaagcctggtagaaaatatgtgttaattgctcaagtaaagtatagagaaaatgattattagcatcgtaactgcttaagaactatataatcagtgcaagtcaaagatcggtgaagtattgagcaacgtgtctaaggtgatttgacagatttaacgaggagtgacagctcgggaatgatcagagaaatgcactcattacaactgcaaattgcgagaagatgtatgttatcactcagtatattatttggtgaagtgagtatataagagaattaagagaagtaagtgttgaaacttattttagcaagatctagatttactaacacgtatgttgattatagaactataatctaacatcttaaatatgaattccctaaaataataaaataaacacatataaagttataaaaaaccttacattagtagcagcggaatataatgtctccttccgtttagatctctaacccttgatccaaatggtcgcagagtatgatcaagatctaaagcttgatcttcttcggttgttggaattcttcacaatcttccacaaaggtcaaagtattggcttgaattgtatgggtaattcctcaattcactaaatgggttgaaaatatgaaaagaaagggagaggttgatttcaaattcaagagaggctctttctttattttctaggttatctaacaaagtagtgtgattattatattccgctactaccaatgtaaggttttctataactttatatgttattgttttaggaaattcatatttaggatgttaaattatagctctataatcaacatac

SEQ ID NO: 45104 - DNA, 886 bp, Cannabis sativa
ttaggaaatatacatttaattgaggtggagcattttaattggattgggatagagagacagagaaaaattgggacagaagatttggctccttttaccaatagtgtctagttagtaatatcttataataataattacattaaattatgtaaaacctgatactaaattacactgatatcgatataacacattcatatcaatatttcataacagtactaggaatattgttattattaaggtttctagaatgatgacatgtataatttcaaagcccaaataccaactaaggttggtcaaaacctaggctccttttgatttactattcacccaaataactaagtcacgctattgatctgatccagacataagcccatctcactaactcgccaagatcaaatctccctagctaattcggaaaaggccctttgacccagaagctaagagcttgcccggacaagtttggataccttcaaaagactgcctgaaagcgagtaatcaaagactcgtctaggtataacatccagacattgccttactcgaaaccctccccacagtatcagttggtagagcacgtacgctaccgggtccgagtatgtccatacctaattttcccctataaatagaatattatttcttcatgcaatgagttggaaattgaatactgagaattagggtttttcaattaaggttctagttcaataatattgactcgtgaactaatattcattaacactcgaactgtataaaaaattggtttcttcttctctagtttacttttttcttaagcttatttattttataatcaattttaaaaaatttcagtaaacaattagtatttgatattttaaggtaactaatataataccgatgtgatactttataattgaat

SEQ ID NO: 45105 - DNA, 1748 bp, Cannabis sativa
  modified_base (306)..(306): a, c, t, g, unknown or other
aagagatactttctttagaataaaagatatttatttgttttaatatttatatctgtggtctaatttcaacaagtctagtctgaaataattaaatataattttaaaaaatatttctttctggtgaaaagggccttgtgactagctgctttcgatatgttcaaagctaagaagataaggcattattaaatttgtattgtaccttaaggttaccagatgaaaatgacttcttcgtccactctctttaaagtcttatgatcttgcctaacttacccatacaattatttcctctttttttctttttttttnttttttttttattattttttaataaaaatggtcttactaaaatattaaggtcactattagttgaaaggaataaaaatataaaaataagaatgtcaatgagaataaaaacaagaatcaaaattgaatcaaatttaaaatgcataaaaaaaattaacaaaaacattaatttttttttcatctttttaaaataaaataatcattttaccgaaataatggaaaagtcattctgttggaatgatattctaatacttgtaaatacaactaaataaaaaaaatagaataaatctttaccatttgattaccttcaatgaaatgctagttaaaaataaaactcagtgaaaaaaattttgagacataaaaagtgcgccataagaaaacattaatcatgaatgtcttcttgaaaacacacatgaacacaagacaggtagtcaagccctcaaactcatataagagtatatctaatgtagtgctatacatgtactttatatatttttttagttcacgttcataaaattaaactacaattatagtgtataatgtgatctaaatttgatacatgtttaaagttgagctaaatttgacacacaatataacatgaactaaattttactgcacaataaatattatttttttgtttatttttttcactaattaatgcaattaataattttttatatttttatttatatatttaatatgttttttatatactttcaataaaaatttaatattttaattaaaatttttatcccattttattaaaataagatttattttacttttagtgcattgtataattataaaatttgaatcaaatataaaattgactgaacttacatcaattggatctaataatcatccataaaaagagtttattttactaaagtgtgtgtctagcatatgtggtacaaaacacaatagtgcaaccaagataagaatgatgcagtgaacaattgttaatggcgttgataacattacaactgtctgattcaaccattacctaagaataaccaagtctagagcatagaaataagctattgtaaggagaaggagcctcatccacaacaagagataaggtagcattgaaagacaaaatagcataaaatttgatacctcaatgaatcaaagaacccaaaccgatgttctgtttattagcactgatggcagaatccaagttaaactttaaacaaccatttcgaggctttacccaagttgaacctgtataacacaggcagcagcgagactacccacttagtgccatttttttttttttttttttccaattaaagcgttaaagttgattttttatgcttacatatacttaaattttttttcctaaaatcataatatttgatatttgtggaatatgacacattttataatatccctaaaataccctccatttacatcaccccccttctctcttcttctctcttttattt

SEQ ID NO: 45106 - DNA, 1914 bp, Cannabis sativa
ttattggtttagaaatcaaattttttgattttctaagtatagaaaatcaaatttccctatcaatattcagtataaaacaaaaagagcactccaacttttttactcttatcatttaaaaactattatcaaaatttcattttatttattttatcttaaacttttatattattaattacattatacaacttttttttattttttctctatttcattaaaacaatatatttttaactaattaggaatgtgtgtgtgatatatgtgattagaaaagtcaaattaatattaagacttttaaaaatcactattcagtctattcttctagctaaatgtacatggatataaaaagttattttagctcaaaagcttgtgaggtcaaacaaaaatgagtttacttaatttgatagaatggagcatatatttagaggactcacatcagtttctctactctatcttttaaaatattttattaaaatttattttctttattttaccttacatttacattacatcatatatcaatttttctatttttttctgtttatatcattttaatattatatttcaattactttaataattaaaattgtataagaatatatataacaaaaatagtttatttgacagagaaagagaaaaagtaaataataataaaaaaaaaaaattagagcatgatctgctcttcttcactgtgctctttaaatatattttgtaaaataggaagtgaacttaaaaatatgagttccaactatacaaaatatggttccctataataaaaaatagatacagagttttttaatgtagagagctctctatttttttggggaatttctttaataatattttaagataaacattattattacgttttcaattatttcattaaattaatttatgtttaataaatttaaattataaaatattaagataattaaattaatactacctaaagtagagagcatgattggaataatttttttaaaaaaaaaaaaaaaaaaattgctctttattttataaattttttagctatattagttaaaatttagctgaaaattaatagaaagtataggtagttgaagatactcttagaatctttctctaattttttacatttaactattataaaccaagagtgctctaaaattgctttaaaaattattataaaatcgacttatatattcattactaataaattgctaaatataaaatgtatttataaaatgtaaataaaataaaatgtaaaatgtatttatataaatatatatatgtgtatatatgcttaaatatatagtacttgaatttttgtcatcatttgagatgagctcgatccaccattacaatatttatagagagagagaaaaaaaaaaagacatatatggagatgagatatatatatatataggtatatatatatatgcaggtggagctagctagctgtggatgatggtatttttcataataaatttgaaaatatatatataggtacgtacagagaaagcaccaattatgaatatacatatattgttgtgtaaaaagttgaaaagactgtaattgggttggtgttggggccaaggaggaccatacaatacatattttaagtcatgcatgcatgtgaattgaccaacttattaattaaatgtactcttctttccattcattctatttcaccaacaaaccttttatttttctatcgaacttcttcaatttcctacctacctctctctctctctctagaaaatccacttaattcacattatatatatgtatatgtgaatatatgtataattaattaatgtggggtcattatattataatttaccaatgcattataatatatatatggcaaacgctaatcccgcctggtaatttgtattattaattattatgaaatgacaccatgagatgaataattcaatt

SEQ ID NO: 45107 - DNA, 1210 bp, Cannabis sativa
aactttctaatttgattggttttggacatgtctattatagtacaacacccctctaaatcagcataatttggttggtttatttgtattttttcttgccgtgtttgtggtttaggtggtatttgcctttaaatctttttaattacaaaaataaaaataaaatttttattttaaaaaataaaaatatgttatataaccacatttgtttttgaattttgaaaacaaaaaatagtaattaaatgattaagttaaataggtgtttatatattatggcatgttaaggactctaatgacagttagtgacagttggtgccagctcattacagctgcatcagtttgttatagtctgttcattcggttattcctttctgttgcattctgttattttgtccagctgtcctagatattttccttatgaatctttgtgtataaatggttgtatagaagtttagatcaatgagatcattctttcttctcctacctttctctttttttctgcctttgttcattttcattatttgatctttcttctggtttaatggtggtatggctcgaaggtttaacatggtatcaaagcacttcccttcgctcaatgctaatatggctactcttggtggtgctggaaactcgaacaacacacctggtttgaatggatctcaagttgctcagcctcgtgctcaatctcatcaagatcctgtctactttaatcatagtatttcaattcgcctcaatgatcacaacttcctcttatggaagcaacaagttcttgctgcaatcaaagggaatcgattgctaaagtacatcaaagatactcccccagctgaatttcttactgctgaagatcgtaacagagtaaatcaagcgtttgtcgattgggaagtgcaggatcagctcttggtttcttggttactgtcgtccatgactgaaagccttctcactcggatggttggttgcaactcagctcaacagatctggtccacgctcgaaaaacacttcactctgcaagtgtcttcgaagatccttgaatttcgcataaagttgcagagcttaaggaagggaaatttgagtctcaatgactatcttttgaaagtgaagcagacagtggaccttcttgcatctgtaggggaagtcttgagcgatagagatcatgtagcaacaatcttcaagggacttccaagtgaatatgacacctttgtcatatccactaatacaa

SEQ ID NO: 45108 - DNA, 657 bp, Cannabis sativa
  modified_base (352)..(355): a, c, t, g, unknown or other
  modified_base (417)..(418): a, c, t, g, unknown or other
gaccaaacccaaacctggactcgtacccagactcggacctggacccaaacccgagaccccgaccctgacccgaacccgtgacccaagactcgaacccggaaccgggacccgaacaggactcgaacttgaacccgagaccccggactggacctggacctgaactcggacccgaaacccaaaccagacccggacccggacccaagaccggtttccagaaccagggcccgaactcggatccagacccaaaatcgggtgctaaacccaggatccgagacccggactgggacctagacccgaacctgacccgtagttggtgttggggtcgaatttattgaaaatatattataacttnnnncaatctattaatacaagtcaataacaaacataacattgtattaaataatactaatacaaaannaaaatagatataaaattataagcttagatatatatatataagtgagctcgcgttcgatccgaataagtcgggtcaaacctgaatcgatcgagtatctcatcttgtaaggtggggcggaacagatccttacttgatttagatcaggtcgaattatggccgaatcagatctgaccttatctatttacactcctatgacaaacaatatttcccggaccgaagtgatccacccttgttgagtt

SEQ ID NO: 45109 - DNA, 1459 bp, Cannabis sativa
  modified_base (414)..(414): a, c, t, g, unknown or other
aactctatttttatttatagatttgatatttaatgtacataatttactaattaaataaattacacacaaaaagatagaattttcctctttatttattaatatatataaaaatatagaattttacctctcctaaataaatgtttatataatatgtgaatgaattatggctgcttaaataatataatgcaacattaataataattattattatatatttttatatatattatataaattaatttcaatattagaagcacacaactttgaaaaatagggcttttgttaataaaaatgagtcattaagacaatcattagcaattgataatgttaattaaacgaaagtcatgtctcattaatctaattttgcaagccaatattgaagcaaagaaatagaatatatatttatatatatanatatatatatatatttacataatgtaaaagatctagatggcagtttaattagttggaataccaccaacattattgaagaaattattaattaatttatttatatattataaaggaaattaagactgaaaaagttggacttattttaaagtttaaaccactcacagaaaatcaaggcaaatggatatatcatcggactacctaaattgatatttcatgattttgacatattcaaattaataacctaattaatattataaattccttgttaattaacactttaattaattccaaaaaggaatttgattattattatcatgagtttcctcctactttcccctctttttggtactcataattttatttattaatttctttttaatcatcaaaaagttataaaataaagtatagtaatgttgtgcgatggagggttctttcttctaaaaatattcatcatctattttgtaacgctcccgcttcaaatttattggccatattgtatattctcacggactaatgacttatacatataggtatatcactagttgctttcttgaataacgaatatgatcctccaatgagtgaggacaaagtgttttcaacatattttttcttcactcgcacactttaagaggtcacccatcttaagattattccaagtcaaacacacttaattttggagttcttaagtgatcccatcaatccattaagctcttaaattgtgcagttccatatttacatagtctcagagtcatcacattgacatttaatgtacaattgcataacttacctgatattttttcttacagatcacgagattactgtctgtatcatatatttcaaaggcatatgttaaactaatatccatatttcataacattaaagttgcaactaatgtgagaaaaggttacgccaaaaaaaaataaacaatttaaaactttaatatgagaaaatatataacttctaaaagatacattgaatgagtattgtaacgtccccgcttcaagcctctattgggcccttacacccacggaatgaatgactctta

SEQ ID NO: 45110 - DNA, 1169 bp, Cannabis sativa
ataggatttgcaaaacaaagtctaccccaattaaataaacttaaacctctttgtttgttggagcaagggactgaacaggtggaagagaatgagtctgattgacctcaccaaatatcttcctaaagtttgggagattaaccatggtccagaagtacctctcaacatgaggaaactctgaagtgaaggccttagtcatgagcttggtgaacccataaaccaaattgcatgttgtaatgatatcagcaagggttacagaatggccaaccatgtatgtgttagaagcaaggtgtgtgttcaatgcacccaatcctctcttcaaacctgagattgcagcttcctcaacaggaccatagtatggggctctcccaactgttggtctaaaccatgtcaaaaggttagcatcaatctccaaagttgtaaaatcaatccactgctcaatctgggcctgtcacatgaaaacaacaatctttttatacacagatgaatcaaaagtaaacgtgttcaattggaccacatccaatatttttaaattttttcaaattcgttcaaattaatttcagtcattcaatcgatccaatatttattgggtatattggttttatccaacattttagacctattactttttcgatcgaatcggatctattcaatattttagaaaaagagtaaatttttaatattaattttcatatatatatatattttacctgtaacaacataaaaaattactcatctaatgtattagaatatattggataggatcaatcccgtcataagcaagacggaagagcaaatggaaatagagagttttacatacatggttgattggatgaaaatttaattactcgtctaaactaaatgaaaatagtaattggttagatagaatattggatgtattgaaacatattgaatcggtcgaatattattagattggatcaatttatagaaacgctgatcaaaagcaagaaggaagagcaaatagaaatagagagttttacatattcaatcaaagaagagccataaagagcattgtctgccttggagttggagcgtgcaactgcatcaaaaataagtgcacacacatattataacaactatcccaacaccaaaaggaatggaaaaaagattggatggatggatggatggaaacatgccataacgcgcaatgg

SEQ ID NO: 45111 - DNA, 2440 bp, Cannabis sativa
agtttagccgccaaaaattcagtttttgtggttaactgttacaaaccgttaagttcaggtggtttagccgccaatattcctaaataatactatttgtttggtacgtcgtattacaccgtattgtattgtatagtattatattgaactgtattttatgcaatatttttatgtaaaactatacgtggtattgatttttatggacacttaaatatataatattttagcataagttaaaatttaacatagtaatatataaaaatatgatgtatataatccaattcaatataatacaatacaatataatctaacataatacaatacaatacaacatataacaggaaccctagaagaatgtatttagccacgtgtttattctccatttttaagtttcatttatctcaaaatagaaaaaaaaataataaatttatatatggttggataaaataaagtagctattaaatgttttgtacaattaacatgaaataataataataatgtttaaaggaaaaatagaaaataaattaaagttaataaaataaaaaaaaaagttggtttccaacaaattaataaaattattttttaatgtacttttataattcaattaattgaaaacacgagaagttaaagatgttaatgtttttaaatttataatgaactaaaatcaataaatgtttcttatttttaaatttaaatttgatttccgtacaaaaaaaaataaaattaaacttaatattttaatttctcacttttttttctactgacaaattatttgatgattttatcgtgtctatatatttatattctttcttgttggcgactttttttaaatattgcaattgagtaattagagaggttgctgatggatcaaactagtttgttaataaatatataatttaaataaattaaattaaattaaataagctgaaaaaaaatccttaggtctttgccgtcgtttcctaaggctgtatatggcgtcggttatttgctaggaaccaacgccatatacacccctatggcatcagttcctagcaaataaccgacatcatatgtaccctaatggtgtcgattatttaatttagactctacagcgtcacttggatcagcctcggtagtaaattttatcaaaaccgacgctaaaaggtcttaaaaacctctaaatgatgattttgaagtagtgccaaaatattgtaattaaattgctctcccaatcgacttattttgtccatgtttaaaaaatagtcctttacaaacatcatttttaatacttttggcaacaaaagaaactagaggcatcttgaggttccaaagagcctcatttatagccttctaaataggataaatactagcacttagtgtataattattatataaagtcttacttttaatcataataaaatttgtgactaaaagttaaaaaaaaaattgtgactaattataaattattattcctataatgtgattaaaaggtccgtggctaaatgtatatttagtcacaaaaattataatttattatgactatatatattttgtcacaatacttgttgccactaaaactatattagtgacaatttgtatctaaatactatattttagtaacaaatagttttttattgtgtctaaaaattacatttagtcacaacaaaatttatgttgtgattaaaaaaatatattaaaagtaattattttttataatgaatgttacacactcggacgggttcgagaatgcctacatcatctaatccaattaacaagcccacataattcataattatgagtggcatgtactcatacaatcaaacacttcagacaaatagtgctaacactcaaaaaattaatgttcatgtgactcattattattctcacagattaagcagctagattcagtaatcattccaaattttattgttatttcgatttttgcctaccagacgtggcatgcttacatagccgatgtcagcgccacgtaacagtatagcttaccgacaaggatgtcaagtaagcaccctagccaacggggatcccgacacttaaacgggatggcgggcaacagaccaaccacctcaagggggctggccagccctatggccgctagcttctggacatcgcaaggctggctagcctacatcctgcaggtgcatggccaacaaggattggatctggtaagacctcgatgcacacctttacacgtcgactgcaagctaaagtgcgaattaggccctaacaacccaataaagtagatagaaaatacctatttttaagggacattttagtcttttgtattttactaatttaatatgtaactatctcttattttaactactaattagggtttaagctctcctatataaatagtcttaactcaaccctaaaaccctaagtcattaagtcataactaagtaagctataagttatagagtatattctctctttctctctctct

SEQ ID NO: 45112 - DNA, 3131 bp, Cannabis sativa
aactagcaatacgtggctcggcacgtacattcacctagtatatatatgtacatttatatatacaataaagaaaaaatggaaatcaatcgtaattatctaaaacttgatttaaaatagtaccacgtcatttataatgtgcaatgtttattttgagtacactataattgttttggaatagccgacatgtaaaattatatacatataagcatgcatatgtatattatatatcaataatacttacaattaaaatctctagtttatttctattcatgttaaaatagataacacatgtatatatatatttatatatatatatatatccttctcttcattccctagctagcttattgagatctctagtactacacaaaacaaagtattaaaagaaaaggaagggtcaagccgttaaggtggaccaaaaaattaattagagacaccaatctattatttatttgagactgtgaaacatgtaatagtgggcaaatagtaagcactttcggctctttgcgacaataaataatataagatcaaaaacacagacactacacgtacactactgaccaaagactatagtgaagaaaataatattatggaccatgatgatgatgatgtgcccaagttttttttaaccctatttgcacgtgcaaacgatatatgtaatcatgatagagatgtccaattctcacagtatatgattccctatccctacttaattctactactactactactaatgcttttagtttggtttggtcactggaaatgaaaaaaaattggaccatcacaacatgtacagagagttcaaaaatgaaaaaagggcaaaaaattgaagtgggaatggtccaaaataaggtggaattaaattcttttggggccaatgagtagttgccatctcattgtacagaggacccgtgagaaggtttgattggtcaacagggcagccttattatcatgcccacgtgcaattcattaatactacaatatcaatgtccccacatatatctctttctcatcatgtgtgaacataccccattattccaaatttattcttatgtacattactcactagctactttattatttataattcattcaattcaatttaacttcttcttattcttattattttttgaaaaacacttattttaatttagatattggaaaaaaaaaaatatcttaattaaggttactaagagcacaaaggtttaacaatatccttgaagcctaatctaccttcattatctttacatattttattctacgaaacaaaccccgaaccattagacaaatcagcccccttccaaaaaaaaagcacgatagatttagttaattttgtggataattgttttaagaagaatcactatttaccaataaagcattgatagtgaggagaactaagttgatgaagataatcctacccgcataaaacaaatttctactgctcctcattcaaattctactagtcattttatcaacaagcaactcacaatctgccttggaaagcttttggagaaaattcacataccaagatattttaaaggaagaaaactcttgtagcaactgaagatatcaacaattttatccaaaaaaaaaaaaaaaaacaaaaatagaatccatacctaacctatacactgctgatttatcgagattattttgaaggcccgaagagttagcgaaaagcttgaaacctcttaattaaagagttgccgagatgtaaatctccctaacaaaacaaaaggaggttaaggttcaagcttttacaccttggatgaaatttgaagtctttctttcttgctactttcttcaagtttcttgataaatattcaatgtcaataacaaacaaaagaggtgacataaaatcacattgtcttagacccctttgaggttgaagaaaactatgaagtgctcgatttataaagaaggagaagcgagttgttgttaagaagctcataatgagatccacaaatttctttggaaagttaagagcctttagcatttcttccaagaactcccaatctagagtgtcataggttttttttaacgatgtatcttgaataaaaaaagtctatttcacactctttctatcgtattccctacatcttgacaaatcataatgtcatgagctatttgctttcctttaatgaaattattttaatttttcaaaatgattcctagaagaatttctcttgagtaattacatatcattttggtgcaattttatagaccatattgtaataagaaatgggcctataatcattcactgagtcagaacaaatcattttagtaaaacttaccgcaatagcatttatttcttaaaaaatcttacccgaattcaggaaagatagaatagccctaatcacttcatgaccaattatctcccaagtgtcctttataaaagcactattatatccgtcaaggcctagggctttatcatctggaatggaattcaaggccctttcgaccttatcctttgaataatcttgaattaaccattttgattgatcctgatttactctcgatccatctttaacaattcgagaatgaactctggtatttttcccgagtttttgttcttaaaagagtcataaaatcttaagaaatcttgtaggactccatcttggtcttcaatccgattcctagcttaatctctgatggaatgtattgcattttgttgtctccttttcttcaaactggcatggaacatcttggtattatcatccccaccttcaatctaagaaatcttagttttttgaccaatggaattggctgtagtttctgtgggcttcaacatatacaaatatcgtgctttgatttctgagtttattaaatccatattactaggattttgctgaagcttttgctgcacagtgaccatttcaataaaagtttcctgctctgcaattaacattcacatctcctttgtattgtcgatttaaaactttgagactatttttgagctacttcaagtgagagacaaggcgatacatagagaatcaaccatctccttccaatgattattcacaacattagaaaaaccactcaaatccttccaaaaaaattaaagtacttgaatggtttatttgttttgaatattcagataataggaaaggatcgttggggaatgatcgaaa

SEQ ID NO: 45113 - DNA, 2144 bp, Cannabis sativa
  modified_base (58)..(64): a, c, t, g, unknown or other
cagaaaatgtgtgagtactcaaccaagaagggcgagtattcaagctatgaacacacannnnnnntggaaatataaagaacacaaggaaatatagtgattcagtcagataacggtctacttagtccactgttggatgggtttactatcttgtccatttcatcttgaatcactccttaatatacaaagcaagtgtcctttgattacacaaagattgttttcattatcaatccgtttgtacattgaatataacatttaaatcagtaaaaaacataaatacaataaatgaagaaaagtttcaacccaactcactaaatacagcaacgtatggggacttctataggtatgagttgtctgttcatattcttgcataagctcgcaagcttaagatgcgcacaagactaatcattctgggatgtctgcgtcctattcgagtcacttatacggacatcctacagtaggtcgataacttaagacatgcgagtccttaaaataaaagggctttagccttcaccgagagccagtatacaaggagccttctgagaaacaaaaggaaaatagacaagcgtctatctaaacaaacatcaacaccaacatcagataatacattgagtatatatatgttcttttatagcataaaaattatactaatcttatggctttctcgcagaaatgacgttcctgaagcaggctccaattctcaaccgaaagcttaaggctggaattgtgacaacatctcctgttatcccggagaagaggaagagtgaggttgtcgtgactcctgtggctgactcctctaagaagcaggtcaagattgcacaagacaaggggaagaaagtcatgatcgaacctgcttttacggctcgcaacatcataactctccaagataagttcgtgagtgatgagctcgtgtccaaggtcaagggagttcctaccgaggaattgttgccgcgctctggagaactggcctcgcagttcatgaccatgttctcgaagggttttgtcacaggtaccaaggaggtcgatcttttgaggaagcaaaacagtcttcttcaggagaatgtgaagaaactaaagttggatgtgacctcgaaggagaaagacgtcgaggaccttgggaaggctaaggagtaggcagaggagaaggctaagcaggcagaggacaaggccaaactcttggaattgcgagttgaggaattgactcacaatcgtgaggagcatgggaacaaatagtacgatcaagctatttctaactacatctacacgactttgtccaaattgcctaacttcgacttaacagtccttggagcggaagcagctgaaatagccgaggcttttcgtgctatgtcgcctacctaaattcaaggatgtgggggaaaccttttccctgcggaggccgagaacgcggatgctgaggaagtcgctgatggtgctctaagcaaggtcgcaaatgactccatcattccaggtccttaattcttctaagttctttttattattatcaagctttaatttcttttttttgttagcagtacacgggtactcgtgctttgtacctcagagaaattttatttgtttacctaacactacatcttttcgaggatatttacttttgcatatttattaagcgatacaggggtactcgcataatgaaactactcttttgatgattgtctttcatattactgttcgcaatatttttatcattacagcttggttagaagataaaaattttctaaaaactttggaaacttcttcttaataatcaatagtacaatataaggttatactccctatacttagcattttattgaaataaattgactaagtataaatacaatgcgagtactattgatattaatactataaactcttgccattccaagccctcttgattgctgttccatcgaggtctgaaaatcggtaagttgcactaccaatttttttagcgattaggtatggtccttcccagtaatcacctaaaactccatgtgcttattttcgtgtgtttggtaataccttttgtagaaccaaatctcctacttgcaaactttgttctttaactttcgagttgaaataatgatctgttcgctactgataggctacatttttcaaatgtgcctgatcgcgtatctcttccagaagat

SEQ ID NO: 45114 - DNA, 1891 bp, Cannabis sativa
taatttgttgatgatatatatattcgaaatctttgttgatgatatagtaaagccaataatttaaatctaataattaatttgatgttacgcttaatagttaatgaattttataaagtataatttcaattattacttggaaatgcatgttatacattattttaatatttttaaattattttaattgatttacttgtgagtcttattaagatttctattcttttacgtatatatattctatatttttgtgtgttgttagacggtcatagttacaaatattataatttgtctgatacaaatatgtatattatagctatttagactttttaatattaattcttgagtattaaagttatttagttattgtaataaaagatttagaattttggcaacttcaaatgatatttaaggctgcttagttaaagaacatgtttaggaaataagtttattcttttatgataccttcattctcattagaaatagtttttaacaattttaattacttgcttattacattcttaatttgtctttgttaacttagaagtggcatgatggagcttttcaataatttacgcagaacctatgacaattttagtggcgatgaatatgatttttttttcttcatatttttgttgcagtactctatttttaagtagttatatatattacaataaataatttggtactcgaacccaaaattttcaatacacgcaccttcttatagccacttgagctaacctcaagttgtttgatcatattttgttgtacaattttattgatgactccgagtccttaatatttttgtgtctacttttgtttagctgaattgaaattaacacttagaatttttctcatattaaatgtataagtagtacaaagggcttaatcatcatatatcacaaaattttatgttagtatttgttacttaattatttttgtaaaataccatcataaaatacaagtacgttaaagaaatatacctatgtaataaaactgtaatatcaacgaaagatgaacattttatcaactacgtacggtacaatcttttagttaaatttttccggaaaaataagcaaattaaccaaacacagtgttatatatatatatacatgtataggatgcatttataaaagtatatgaacaagaagattatgttaatatgtaacaatttcatggatagagataaaataattattgacgtagtatggtagttttttgataatataacgtactatcataattggaaaagtgtattcagtactaaagtagtgactagttgtcatatattgtctgcctcttataacatgtaatgtttgagctgaaagccactttcgtaagatgatgaccaaacaatagctagctagcatatataattggttcaaaaaacaattaaaatgtaataaatgaaagacaatttcgtaagatgatgacttatcattattattatatgaacttgcaatatatatgtatgtaggggcagcttcttgggtggttcacacaacatatttaagataagataagcataacgccatatagtaaagaaactcactagcttcttttctaagaaattttagggtaatttgtattctcactttgttattatatttatatttatttatatatacaatatgaatcgagtgatgacatcagatatagttctaattttaatttttttcacataataacaatattatacaatgtagttttttttagaaatttaaaatataaaaaatttaattcaaataatccatatctcctacattattataaattaataacaaaaaaaaagtactgcttaatgttagaattatttatttgtggactaatataataccataatcacaatcattaactatgtgcccaatatttattcactaccataatgggatggtta

SEQ ID NO: 45115 - DNA, 1439 bp, Cannabis sativa
atctcttctttatgatttactcaaagctgattttttttcaatgaaattgttcgttgttcaaaaaaaaaaagaatatatagaaaataaataataaaataagcttagtctaacaaattctaacctccatttcattagaatgcatccgaaccaagcgaggaacctgtaccaaggagttaatagacctttaggatgtgatgtaaacaaatacagacaaaagcatcacaataccattgtgggagaaaaaaggagcttcaataaagagaaacaaaataagtcaacagtcctgctatttaattatgaggcatctaaagtagacttaagataataatattttccgttaaaaaagctgattcgaattgaagcatgcatctatattctatagtataataaaaaaaaggtaaagaaaaagttaaagacaaatgataccatgcaaaaagttatagagataatgataatcagaccacatgaccactacagcttaggcacagaaattagcttggaaccaaaacctaatagtgttcaaactcaccttaactttcttgcctgtgttaacattgatgatgaaatcacccttccgaataataccttcataaattctttatttaaagaaaattattagccaaactgatttgctaagtgatattaatgcgaaaataagataagcaacatgacaaacacagcactactcaaagataccttagatatgtcaattgcccaaaacgaccttcctccaatttaaaggccaaggccacaagaggtccatcaggcgttccagacaatgtaacctacatgctaattcacaaattacacaccagaacaagaattacaaaataaatgttcaggaatacaagtgccccagcttaagtaccttctcttcattcttcgtctgatccagagcatagttattgacttctactggacagggcaaataattaagcacagcatccaaaagtggctgtacaccctgagcaccaaattgacaaaagataaacggataccaatgaaaatatatacagcaaaaatgagagtggagaactttttactccagtatgagacataatgatattcatgataattcactataccacccaagacggtactcaaatgttcagccatgtcatttgcccccacacagtataaggttcatataactcctcctgggtactcacagggtacctaatttttctaaaactcatactaataatagataatttactactaattttctttttataaactggtgggccaccaattggactaacatattccagggcaaaattagaattaattaaaatagggatgaggtttttaaatgtaaaatctgattgattggatagtttaagtaatggtaagttgtttacgaactttgataagagagtttgctgactgtataaatataccaacagctgccttcgtaaggcatctgattattgtgttta

SEQ ID NO: 45116 - DNA, 703 bp, Cannabis sativa
tttgattggttagataatgccataattagtgtcatttactttttatgccatatttatcataaccttaataatttttcccatatttttgaaaataacccatcttaataactaatttttaacagataaatttgggccactagtacctaggccgcaagcccacaattttggaggtccaagaaaattaaaattgatatatttttttttttttgaaggaaactttggtttcattgaactaaaaaagactgggaagcacaggaggattccctccccttggaaaatgccagtaaaactactagagcgtctagctcttttggctaacccgtccacaaactcgagtctacatctattaacgaaaagaaaactacaatgctgaaagctattaataaggttcaaaacagttaaggacaaatctaagatcctccaattagggatacttctcttttgatcaaaggcgtgacttgcagcttgacagtccgaaagtacttggatatcattccaattactttggctagcccacgataactctaaagctgaattagctgacacttgcttgacttgataagcccaggtaccatcccttgtatcaacctggagaattgctatgcctcctagaccatcataccacgaagcatcatatatcaagatcagtcttgcaaaaggacctctggtttcagctattagaatatttctaattaaggaaata

SEQ ID NO: 45117 - DNA, 1238 bp, Cannabis sativa
cctatctttatccattcaaacttttctccatcatgattgtttcctcattacaaatgagtaaataaactcattctcggccaagaaaagctttcactatcatcttcccttttctaactaagaaaaagactacattgaatcattgaaatttgcacacacaacagacattaatttcttaattctggaccttgaaagtacaagaacagagtaaatgaatcataacaaatcaaacttatattcaaatgagtaagtgaacacatacattcttgtccaataaaagatttcactatcatcttccctttagaaaaggactaatattagaacaattcatgtgttaatcatgacaaaattgaaaattacacaaagatatagtattgaaaattgatcagtatgtatagtaggtagctatagacaacggtaatattatgattatgattaggattaggattaggattaggctgaagaggatcaaatcaattggcagtgggcattgagtaacggcacaaagggcagaaatgactggtctccaaccatcgaacaatacaatccttgtgaaacacatgagaacaaggcatctcaacaaccactctgctgctcatctcaatctcatcatcatcatcatcatcacacgaatcacccaacgacggcaccatcttctcgaaacatatggtacaattgcaactactcatcaaacccacatcgtttaactccttgagagcccttacggagtctttcgctgcaggaatattgacgttaatatttatattctcctgattttgctcttgttgttgttggtgttggtattcaatactagcagttagggcagtgatatcgagacagatattgagacccaaagcttgggagttattagaataataatcatgaattatgggcaaaacgtaagcagtagcaattcgtgaagttaatgaagatgggatttggatggaaggggtgcccattactccagccagaatatattcagtgattgctaaataatcagataagtattgggcaaaaggaaccaccgtatagtagtgacgactgtcgatgaggcggtggatatcaaggagtatgtggcgaaagttgacatgaaaggctatgaatttatcattcgtcgtcactattggccgccgttgttgctgctgttgttgctgtaagactgcttctccatcgttacagaccacgtttatgtcgtaatgacaatcaaacagaggcagtgccgccattgtaaaattaaaatt

SEQ ID NO: 45118 - DNA, 1199 bp, Cannabis sativa
  modified_base (33)..(63): a, c, t, g, unknown or other
attggcaatgggaggagtagcccattcatcttnnnnnnnnnnnnnnnnnnnnnnnnnnnnnnnatgtgggactaactctaatagtttctgactacatcaataaattatctcaaaaaaaagttaaatgcaataaaagaggaaaatttgcaattccataactcaacgggaacttcttacaaaagaaaaatataataataatttaagggacaaaaccttagttcgagggtaaacatcttaattattctaataactaatatgaacatacgaacaagaatcatacataccatcaaagaatccagagttcctacaatagagttcgaaaggccattttcgcgaacatgttaacaccgacacgagaaaattagtaaagattattgcaattcgatgaatgaaaccgaaagttatgagtatgttcaaacctttatcaagaacaccatcgaatgattcgtcggggaagacgctcatatccctaacatccatttgcatatctgtgacaatttttataggaaataacttttaagcaaaataagattatgttatgtttatgaaaagtttcatttgttaaggatacatttcagctgaggagtattcacatgttttcttttcatcatttcaatggcgaccgatgaaatatcgatgttcattatgtcttcgtacccgtccttaaccatgtcttcggacataactacacaaaatcgaaagatccaatcgaaattgtgtcattaaatacaagttcctctaatcaagctacaatgatatagcaacaaaaacattgaaagaataagaagaaatattatgatatgtcctaagttactatgatttgtcctaagaaatattatgattgtttggaatttttgggaaacttaaaagggctaatcgcaaaatacttgattagtttgttgttttcgaaaaccaaatccaaataagaattcgagttttaagctgaaaaatgaaaacacaaatgttatgttttcttagttttcgaatcattatttccaaaaactctccaaatattctcgttacctttttattttaagattaccaaccaatcacaaattcaattttgaaaaacaatatataacataaccaatcaaatcctccaatttccccttctatcaatttttcttcttgtatttactttgaatgaatttcaatgaagaagtctcaaaataaagaaattgaataaagctttattcact

SEQ ID NO: 45119 - DNA, 1243 bp, Cannabis sativa
aaactgaaaccaagaccgagagagagagagagagtgtgtgtgagtttgtaagtgagagaaagaagagtagtctgttaatggcgaagtaatatatttttatatttctatttatgggttttgattttggagttttattaattattttagagtttaatttaatattattttattgatggtatgattcctttgacgattcgtttgctttgcgcgtctctctctctcttaaattggaagccgtcgtctcttccgtctccctctgcttcaacacatctcccactttcagccggcgatttatttatttatttatttattttattctctctcacgctctccgaagcgcgtgtagttcactataaactttgtttgggaaatataattacctcgtttctttcacatcaaaattgaattgaacgggtcatcatttacctgttaaaactcgacacggaatatttctaaaaaaaattaaattaacacgaaacaagtggagttgaatttatggatttatgtatttattttgtgaagattgctattgctttggtcttcaaatgcctagtgcatattaaattaagagatttttttatttttacgtttcaaaataaatttttttttgcatttttacgaaattttacataaaaatttatattgtaactagcgttgcaacctaaattgcacaaaaaatcgtacagaaacctctattgcaactagcgctgcaactactttagaaactcaaaccgtaaatttgaaagaaaaaaaaaaagttaaaaaaatagtatatgcggtaatttcccttaaattaaaggctaattaggatttttatcccttaatttttaatgtatattaaattatgtctcctgaatttttttggaaattaaaaatttctttgaactattaagattattagatttaaggactcttatctaatttcattcaattttactatttcagtgattgtttatgtactaaatcatactctccagactttattatttaccaaatcatgccccttgaactttgatatgtactaaatcatgctcactgaactttcgtccatgttagacttttttttactaaaattggacaaaaatccttaaatccaataatctcaatagttcatgaggcaattttaacgaccttaaaagtttagaaaacattatttggtatatgtcaaagttcgagagacaaaaatcctaatcagcctaaattaaaataagtgggattccatattaaattctaacttcatatg

SEQ ID NO: 45120 - DNA, 1019 bp, Cannabis sativa
attagtcaaagaatcaagtgctttaatgtaagaaacgaatcgatctagggactacaatgaggacccaacgccttggttgacactttgtcaacctgggccatttctagcatcagttcaaaagaaatcttcatggcatattctctatttttgtcaatagttaagatatgggtgcttttggagaacaaacagagtcatttatgagccagaactgggacctagtgcccatgttgacctaggtactgggcccagcgcttaggttaatattttttcaacctgggctacttccaatcaatttttttgagaagtctaccagtcatattctctgtttcacaaatcattgagatacgagtgttattggcaaccaaacaaaaccatccaggggcaaaaagatagactcagcaccatggttgacactagtactgggcctagtgcccaagttggcatttttttcaacttgggctatttctagtcatttttctcgaaaagtgttccaagcaacttttttgttttcagaattaaagaagatacaagtgatctcgaggagcaaaatagatcttttgggggttgaaataaggacccagcgcccaagttgacataggcactaggccctacacccaggttgaaatgtttctactcctcaaatgcaaattctactatgatctttcttctaattttggtcaaaaatggagaaggagacctcgttttcaatctcgaatgcctttgaagtataaatatgagcctcgggaagtcacccgagaagcactcagcgcccaggttgacgtctggcctagtgcgctaggttatacttattgaaatctaatttcatctggacctatgactattttttcatagtaaacgagagctacttcttgtgacaagtgaaattcacacttcgatatttcaccctttctacaaggtggaatatcgaaaaaatcaaggagtttcgagtctacctgtaacaccctggaatttagaaatggattagcaaaaccctgactagataattatgaataattgag

SEQ ID NO: 45121 - DNA, 1217 bp, Cannabis sativa
tttggttcagaccattaataatatgaaaatatcttcccagcctaagaatatgaaaatatgaaatatcttccacaagcaaatatgaaaatatcttcccagactaaaaatctatcatacttgaagaagctagggtaattcattttaaggaacatatatactctaacactttgagtaggtggaagaaaaacatatgggtcgaatccccatagtcaaaacgattcaaattttttaaacacgtagaacgaattaaacgaaagaatggattacatattccagttgtaatcgctcccaaagtaacttcattggggataactggatccctaactcttctttctcatgcaaaggctctggatgaagccaattctagtcagctagccattcctgatctttcttaaaggccttctgttccttgtcagtgagaatctctgcaattgttttcttaagttttggaggatatccatgaaggagatcttggagtaagtctttaacatggaaggaatatatgctttgatgaggagaaagtaaaccaaccttcctaagcttgattgaggtggtgagttttcccacctcaagtcttcaggtgaaaaactctaatataaaattcatctaacctccaagaaaggagcatctaccagatgagttattgtattgaaagataaaaaagataaaggaaggatgctagtaagaaactgaatatggaagataaagaaaagagaggaaaattaaaatatagaagttggccccacttactcgcaatgttgaattccaaagtaagggtgggaacccttctcaataagaaacccatggtgtagaacaagtgattgcggatcatgagtgtgcttcatggagctgactgggcaggccatggatttggaatatctatcaagttgatagaagcctatcttgctcttattattcctcatagcttgaggcttaacttggtagaaatagagaatttcctctggagtagggacctccacatttttagttttgcacaaaacatacaatcccgcaagtagcttatatatttggggaataaagtgcaaaggagctatcacaactattacatagaatcccacaaaaaagctcctaagtaaaagatgtgcgcccatctctacatagcctcatctccaaatgccaaagcttccatccacgcatttattgggtaactctccctgaacggagagcctgtaccaaataaatcttggaatactctg

SEQ ID NO: 45122 - DNA, 1861 bp, Cannabis sativa
aaggtgattcgagatttcctgtattagatgaaataaacatgtcatacttagaattctttgagctccattggatcatttaattctaaactaaaatgagactgcaactttggatgacgacaatttgtttgagttttatttacctgagaacataggatttgttttcattctcttttagaagacagagaacatgaagattctactccaagatctcaatgattttctgcaaaacattccaaaaatcattttcaaatacttaatcacttcaactcacaaataatcattcatttacccaaactaagcatttcaaaagaaacccatatctgtattatcatcaatggtgcaaaattaagtgtcagctcaatttcaaaagaaacccagctcatctttattgttagaaacccatatatagttatctcttctcaatcccagaaatgaaaagttagcaatataatcaaccatatatacagagatttacaaaattacagtaaaaatcacataccttagttgcaatattttaaagtttcttcttctctttgtagatcatcctctgctggatcatctcactactctcacatctggaatatgagatatgttccaatcctcccctacttccttctcacatctctgctctagttttgggcacttatgaatatacaatgtctttaggttggtcagcctttgcatgctcataggaatacattccatatccggacaacatatgatgtttaactctttaagagttgtaagatttccaagccaatcaggcaacgacgcaagctccgagaacatggatattttcaaatgttcaagtgaggaaaggtgctgcaagctttcgggcagaacaggcaacctttgagaagcatcataggagcctcctatatatagatgttggagagatatgagttgattaggaccacctggaaagccttcttcaattgctggacaattatcaagttctagatggttaagcatagtaagattctgaaaactttcagatagtgatcttaacttttcacaatcagcgatgcaaattctctgcaacgaacaatctcgaaacattccctctggtaggcacgtgagttcaggacaacttctgatttctagaaactgtagcgaattaaggttgtgtagcatattttggggaagggaagtcaaatgacaatgctccatgtgaagctgagtaagaccatagagattagagatggattctagtaacacttgtctcccatcatccaccctcagagatttaacagatcctagtttaggtaagctcaatttcgggcatatagtcacttccaaggaagacaaacatgggaacatttcatttccaacttcatgccttgaaaatccttccaaatttggtaaattcacaatctcaagactttctaaacatccaaagctacttcttaagtctccatgactgtgaataaactgcactaacttcattcttgatacttcaagatatcgaagagatgttagtttaccaaaatgcggaagttctctacagttatggcagtaagataaagtgatgcgaacaacacttccaaggatgtcatcacggaaccaagacgagaagtgggcacctttgtaatagtgaatttccaaccatttcaaactcgcgggaggagcaagagcttcgagtacctcttttgcattctcttcagattcatcttcattgttattccaacataaatacagtccttctagacttcttttggctgatagattagcaaatctagcttcaattggattcatgatcacattttctaggttcctgatgtgtagaacacctcctatgttcaggtctttcaattcatccaattgacaacctttttttttatccacaatgaaatttgtcaaa

SEQ ID NO: 45123 - DNA, 2759 bp, Cannabis sativa
gtagactgaagagtaaccttggaaagttgtcctgtgactagttctatgccagctcgttccatgtcttccaatatcttctttgatactccttgtaaagaagaaacaattcctggccctctacggctgagtgcatcagccacgacattggctttaccggggtggtataatatgtcacaatcataatctttgactaactccaaccacctcctctgcctcatatttaactccttctgggtgaagaagtattttaggctcttgtgatcggtgtaaatctcacatttcaccccataaaggtaatgacaccaaatcttcagtgcaaagacaactgctgctaattctagatcatgcgtcggatatctttgttcataatcttttagttgtctagaggcatatgctatcaccttaccagcctgcatcaatacacatcccaatccttgttttgatgcatcacaataaaccataaactgcccattctttgaaggtaagctgagtacaggtgctgatataagtcgaccctttaattcttggaagcttcgctcgcatttatctgaccaggtgaacttttgattttttcttgtcaattctgtcattggtgcagctatctttgaaaacccttcgacaaatcttctataatagcccgccaaacccagaaaacttcggatttctgaggcattctttggtcttggccattcttttactgcagcaatctttgcaggatcaactttcactcctccatcggtgacaatatgacatagaaaaccaacctcgtgtaaccagaactcacacttcttatacttggcatacagctggtgctctcttaatcgctgcaaggtcaaacataaatgctcctcatgttcttcttctgacttggagtaaaccaatatatcatctatgaatacgatgacaaattgatctaagtactccttaaaaaccctattcatgagatccataaatgctgctggggcatttgtgagtccaaatgacatcaccaaaaatttgtaatgtccatacctggttctaaaggctgtttttggtatatcgccattcttgactctcagttgatggtattcggaccgaagatcgattttcgaaaatactttagtcccctgaagttggtcgaatagatcgtcaattctcggcaaaggatatttgttctttactataaccttattcaactcccgataatcaatgcacatcctcatggacccgtctttcttcttgacaaaaaaaactagtgcgccccaaggagaactcggtctgatgaaccccaacttaagcaattcctccaattgagttttgagctctttgagttctgtcggtgccatcctgtatggtgctcgagatactggtgttgtttcaggcattagatcgattacaaattctatatctctgtgtggaggtaaccctagcaattctgctggaaagacatcgagaaactcagccacaactctcgtctcttccggtttctttcctatttcttgggcttcattgactatattcactagatatcccaaacatccgtgttgcaacatttccctagctttcatcgctgaaatgaatggagttctaggtttcttgcgtaagccttcgaattcaaacgaatcttcgccttctggtgcaaaaaccactttcttgcgtttgcagtcaatagatgctccgtatttggaaagaaaatccatccccagaattacatcaaaatcagataattctaatacaattaggtctacaaacaattccctaccatctattcttaaaggcactgctttaacccaatatttagatattacaatttccccggaaggtaacatagtttcaaaccccacattaaataattctctaggtgcatcaacaacatttatagttttactagaaataaaagaatgtgatgccccagaatcaaataaaactttacatgaggtattggccatagggatctgacctgttacaacggaagggcttgagtcagcttcagcttgggtgagggcaaagactctggctggaacatacttgtcattctccttctgttcctccttatgtccagattgagccaatgttggacagttgtacttcatgtgaccttctttcccacatttgtagcaagctccagctctacactcaccagaatgacgctttgtgcacttagggcaaggtgggatggttttgccaccatttccaccataacgattgtcattgttgggcttgggtcgtttatcatttctggcttggctaggttgctcatgtcccctcttcctgttgtcattagaggtcgctgtcccactccttttggcatcccttctagcggcattatccttccatattctctcttcgctcctctcagccataagagccatttctactacttcagcataggtgaaagcacctctagaaacaatctctacatctcgagctatcattggctttagacctctcacaaatcggtctgctcgtatcttatcagtaggtacgagatccttggcaaacttcgccaatcgatcaaacttctgtgcgtaatctgtcaccgagagattaccttgagtcaacttggtaaattcatctatttttgctgctagcactgccaagttatagtatttatcattaaacacttgtttgaatccatcccactccatagtgttgacgtcccgtgattgttccaccacctcccacgaaattcgagcatcttttctaagcataaaagatgcacacaccactcgttcattgccttgaacccccatcatgttcaagatcctctccatcccgct

SEQ ID NO: 45124 - DNA, 749 bp, Cannabis sativa
ttttttttttttttttttctaggaaaggaatctcgattttttacaatggaatcgttcacgaatttaggagatccaatcttccattacacattgcaaaactagaaaatgcttattcgagaagacggaggaattttctagtattcaatcacatttgggagaaaaatcaaagttctctacaacttaagagttacggcagataaattgattatttaaggagtgttaagctccctctcttttggccatggcagaaagtttttatgaatttctctctacttgaggtgggttttcaatcattttgctgagtaattttgttttatataataagaatgatgctgatttacatcactttggatgttttgaagagtgaaatttaaattttggtagttgttttcatttctagcatatattatatttcacattgagactaatgtaggtagctaacaaatttctacaggagtcctccaactttctttcattcattttttgtgtccataagttcaattccaaggcttgtatagtcttttagtgttcctgcttctcttaatcttaataatctcaaggattctaatttcacaaattttgtgggactctagacaccttggtgtgtaaaaattatccaaactattgagttgttggggtgcattggatcagctaacttggtgtttgatttttctattcttgtttattttgtagtgaattttccctttaatattgaagagttttgattaattggatcaagaacatgttaa

SEQ ID NO: 45125 - DNA, 2106 bp, Cannabis sativa
taattctgtcatgaaatgcaggaattgattacttatctgttgctgcctatgatgatttgattccttctcatcttgtttttctaaaagaaagggtaagaaagagtttaatgcttcagagttaagatgatcaaattatcagtatcatttgagacttcattttaatctatcaatgaaaatctttttctttttgccatctacctttttactttcaaggttgttgtgtctgtgtaggtgtttttattgctatcctttaccacttgattctatttgcatcttgaaattgaaatttcacaaaatagtgttccgatttcacccagggttgcaattttgggcagttgatgagagtaaactgtgattatctgataaatgcattacatatgatttatgtgctatatctgtccaatttaaatgtgtggtcttatgtttcattaagaattggttccaccacaggaatgggtttatttcttcaaaaggaccgatttttctaaattggtttttggtgcaagagtaaatataagtgaaaagattagcactaacacctccaattctgcaggaaatcatccttgtggaaggactaaaacttgataatattcagccaggaatttattctatccactgtttgccactgagattgaaaggcgcagaaggatcgcccataagatgcattctcatcaaatgatttgctttctcagtaagttctacatttttctcaagggccatactttttaaccatcaccttggtaatcagggaccatctctatccttggctgtacaactttcatgccctttctgttcatactatgcaggcattgtaaagtttatgtgggagattaggactaaatattaaatttgtttcaggaagcaatgctagactcctggatgagacatggcgattcaaacgggcttcgaagctgaatattccacttggtttctacattttcttttcacatgtaaataaaaataaagactggtttgatggatactactatcaactagaataatcttaggcagtctgtatcgttgaactgatcagtgacataaattataatggaacattgaaattgtgggatttgtgcaaatctgcaatgagaaaatgttgcttttgttattcgagttttcttttgaccatgtacagatggagttaattgatggtctcagatttatgattatgattagtttcaaatagatggtaatacacttatgggcactttgacatggcatataattctgagtagctggtcgattttaaatgataaattctttgtgtatattggttgaaaaaacttttatgttaatactatataaattaatttcacgtatatatgttgggttgaggtatcattacttaaaaataactataatacattcaaatattgtaatgatatcattatattagaaaatggaaattatgtattttttaatattgacttcattagtcactaacatatcttttggtaccgtttgactttaatatatatacgtttatatatataaatatatttagtatttagtattttttttttggtatagtaagaaactaaacaataggacgcacttcagagaaacaatcttttaattgaagtacacagcttgtagaaaaataagaataagagttttctgctaagtaatagccaaccaagttaattatttaacttacattggtatgtacataaaattataattacatcgacatttttttttaatagaatcacacttaacatcgtcaaaactaaattattaaaaatatgtaaaatagttaaagtttaattcacttgttggagaagttaaattttataatcttctctttctaatttaaagattaagttattttagctctagagctcttgtacatacatctcaaactaaataatacgttaaaatagtatttaacgaatgcttcacttgggcagcagagtgatacataatttgcttcaaatgggattggaaagtgaggatatatatagaaagcaaggtaaggtgtatacatccatacgtctaggtcccaacatatgggaataatctagttgcatttgttaaaagaatagacgagtcgtaccatttcataaaagtagtcttggttatcaagtgatgccaatttcagtccaa

SEQ ID NO: 45126 - DNA, 2280 bp, Cannabis sativa
caatagaacagttgataagaaactgacctgacatcactgaaaaactatcttcaactttgatttgggtaatggccaatacccaaacatggagtggcaaattcctcttaaagtaccctagtaaaacgcattggaaataagtcttacagatacactctcccagatgatgcttcttagcattctggaaaactgtaatgaccttcaaggccaccctgacccaatttactacgaaacctcttcttctggctcaagcccactgatgtagatagagcttttcttttctgatcatccaaagaatcagtgccacctcttccaaggttggtcgtaggagagttaacatctctacaaatacccaaagtccctcgagattcttgaacaaactctataatacatgcgacttaaggggtatttattacttctagattttccaacctaactaaaggtccttgcatcctatattttccaccggatagttccatttggttaccagccataaatttttctgctggcaactctggaatcaacacaactagtacttgagatgaaggcagaataggaagtccatactgctttaatttcctaatctcctcctctatctagctattgaattctaacttccatattttatgaacctttgctccaattccaacggaccctacggtggatttttgtaattacctctatagattcttccccagttcctaacttagccctgtgaaaaagggggatcccattcttctccatctgccaccagtatcatctatcttaaccaaattgcatgatttttgccaggcttccattctataggacaaactcgtgcattcatgagttagctcgatcaggtagcgattgtaattgaaatataactaccgcttacatgggaacttagtatgctcctatttagctatcaatctactaaaatgctttctatcatattttctaatcattcataacaaataaaactaataaaatacgcaaaaacttaccgaaccatgagtcaagcttatctctgataatgattgtgtacatatcttgacaatcttcgaagaacaacctcgcggctctgaaataaaaattgtaacaccctactagattaggcatgttacggtgttttctaaatactgtgcacacctttgctaatcaaagaatttattgaaaaatatgaataattaaaactttattaaataaatttactttaataattaaacataataatttacataatctgagatcccgttctaaacgttacaaaatatttaaacttcaaaagttgtcatctagcgactagcaaagtgagccaacatcgtcccgaagaccctgaatactccaggtttaattgtcttgatatgtacaatcttcatccttagctttaagctttagactcacaatggttcagttctagcttttacctacacatatatgtaataactgagagtcgacagactcagtaagaaaagtataatcataaacataaacatatatctagaccgtaactaggcacccatacagctaatcacgatctgataagtgcgtcaggaacattctcgacaaagtatgactaactacgaatccagcctatacttagtactctggtcatactgataaagtagaagttaattcatactatctggaggcctaacatatggaatctgtgtgaaactctatgtacacttcacggataccctgatatgctaatctaatggccactgattttcttaatatatatttgttggtacctcggtgcaactctacgtacacctcagtggtaccatgatatgttattcttatggcaattaatatgcacgctaaacatgtatacgtatatgcaaataattctaataatcttaccttaattccgaatgcaagtatgtcaaaaaccctgagtggaaactactgctcgacgatttataggcccctgagtcacaacatacgtaaaacttataagtgatacgctaaaccactttctagggacttaaaatcaaaactaaaagtctcccattcgatggataacatggcagtaccctaaacattttaaaaacatgaaattcaagggtaccgtaaactgtcccaactagtagaccggttccccaaccagaataccaattctgaggggtctgcctggggatgaactagaattctgattcctacaggtccaaactgaactggtcgactggttcagtgtagggaccccaaaaaaccttctaaattattcaaatcgactcaaaatcaatttaaacattacaggtcacctattcaagccataaattgttggaatttatttta

SEQ ID NO: 45127 - DNA, 1358 bp, Cannabis sativa
actcaagaattaaatttggatgtaattagaggtaagataattcagagactattacaattcaaaataattagtaagttatcccataattccatgcctctcaatatagtttttattttattttttaaaatatatattattgtataaaatagtatacatagttgtaccatacatatatactctaataaagctactagacaatggtttagtggtgtggcacatcatgtcaacaagttaagttttgctataaaaagttagaaaaaagagaaaatcatgtgtctttatatactctcttgttttcttatattatttttttaattttgtcttcttttaatgtatataattaagaaaatttatgtaatagactccttaaataatcattttggtagattttttttatctgtttcagtatttagataacttttttagtctaattttttttgatgatcacgtatgtagtaactatttagaaccacttgtaaatttttaaaaaatttagaatattttacgatgccaaaaataaaatactccttctaagctctcctaataactttgggtattgtaaaagtgaattttcttcaaaaaaaaaaaaaatagattgattaagtgattaaaaataattaagaaaatcaatatgcaacaataataaatatacatttaaaaaaattatgataaaatataattgttagaagggcactctcattaatatctctactatattctttaaaatatcttattaaaattttacctttttctttttattttatctcacatatttacattatactaattttttttatatttttctctctatcatataagaaaataatatataatatctttatgtcactatgtagctaaaagtgttagaattttgggataagataagtgtggttccatctcaaaatcaattggcaatgggaagagtaacacattcatcttatatatcacaatttatttccatacattaacaatgttggactaactcttaataaaaagaatagttataagttattttttagctcactatttatctcacataatgggaatacagttttttaaagagctattttacctcttaatcttatatcaaaaatgctcttagatgagatcttgataattcattcaaagtgtgataaataattagactctttatcattgagtaatgatatatacacataaatttaaagcagatatataaaaatgtggcttaactatgtaattctaactttttcaaacttaacttttaagaagtcctttttgtttaaccattaagggtctgtttggaagtaactatgtaattactaggtagggtaattactagggtaataattacacagtttagtaattacactatattt

SEQ ID NO: 45128 - DNA, 2713 bp, Cannabis sativa
ctagtagtagtactatcgcagcttcttcttctttccaccattttcataatcaccaaccagttcggtgcggctaaagccaccgatatcggcgtaaactatgggatgctaggcaacaacctaccaccggcggcggaagttatcaacctatacaagaaaaatggcgtatcaaagcttaggctcttcgatcccgacccagccgcactcgcagccctgaaaggtagcaaaatcgaagtggctttggatctgaagaaccaggatctgcctatctttgcttccagcccaccagccctccaacaatggttcatccaaaacgtggagccctacctaaacgacatcgatttcccatatcttgtggttggaaatgaggtcatccctggtgaccttggtcactacgtttggcctgtcatgatgtccttacaaaatattctggatactaagaaccttcacggaataaaagtcactacaactcttcccggcactgctttgtcgacttcttatcctccctccctcggccaattctccgctcaggccgctgccgacctcaaaggtgttctgaggtgagccatgcatatatattaaccatattttcatatatatacatgaaaaatacgaggagtattttaatatggagtgtaataattaatataaaaatagctcactaattataaaatatagtaattaagtgcatttacattagtgaaaaaagtttacatatataaatatctcggtggtaaattaatatctaaatttatttttggcagtaataatatagttaagttaaatttctaaaactctataggtatttcatgcctataaatgtcaagttatatcatcaattattttttttatttatatatttaaattaatttttttaaaataaaaatttaataacctagatcaattgtcacgtgacaatttactttaacacttaataataaaattcttacagttgagagttaaatttaaatattaaatatagatgacaccagtaatcactaataccttctattagcaatattccgtccaaattatcttcttaccaaatacttaattactcacgagtagtgcattctaatatttctcaataatataataagttttatactttttttttcttttaaaatcataaattttataccttatttctacacacatctatattattataataaaaagtactaatttctatcttttccctatatattatactggtgtcagctacgtatgaccaatattttccttttaccacaatcaatcaacataatgacaatatcatctctctcaatatatatatatatatatacgtttcagtttcttatcgagtcaaggatcgccgttaatgatcaacgtgtacccatacttcgcttacgcatcagacccagcgcacgttcggctagactacgcgcagttcacagcgacagaagttgtcgttcaggacggtccctatggttacaagaacctgttcgacgccatggtcgactctttcgtggcagccatggaatcagcaggcgtgccagacgtggagctggtagtgtcggagagcggttggccttcggcggggaacggtgagcttacgacgcaggctttggcgtccacttacaacaccaacttcatcaaacatgtcagttcgggtgttgggacaccaagacggcctaataagcgcctggaaggctatattttcgccatgtttaatgagaatcttaagtctccaggggtagagcagaattttggcctattttatcccgatatgacccctgtttatcctgttttcagtcaactctaaatcaaattatagtattgttagtttcatctttagcaatcatttattttattgtcttcgtagggttaatatgtagctacacagagagatcattggagttaattataattttctcaataaaaattagttggatttttttttcttattttgtcatttctcttctttaagaacaataaacaagaaaccatatggaaagaaattaagaaatagcaattttgatagctggaattaatattatggcttgataataattataatttattataatatttttttggaattaaaataaatagccagctctacaatatttccattagtattattagtacttatctatttcaaactcttccatattaggggaatccaacattaattgttttcaatttattaattattaaatacataaaatattaatctttcaaggagagagaattggataggattgaataggtttatgtagtataaactagattaattacaggataatactgaataaatatgtaatgtatgtttcttgaaaattggatattaattaaattttatattgagtaaaatatacattcacacataaatattttcttaatggaaaattcaaactttataaactaacaatttatgctaccaaacatgaaataacaaattagtcaagacatcttcaaactaaaatctagagtagttctaacaaattcataaacaacaacattagttaatggttcaacggaaacaattataatatttcttaactcagaaagtaaaattttagattcataaataacaataccaaatattgaaaccataaccagccacccccttaaggcttggacaattgccaagcaatcaatctcaaaaataacataattgtctttgaaccaatttaaagcttctatatataactcccattagctttcgtttactacaaaaaactgttacttt

SEQ ID NO: 45129 - DNA, 2341 bp, Cannabis sativa
caggctgttcttggctcagtttcgatgccatctcaatttggttacttggttcaagattgtcgctctttactttcttctcttaatagtgtgtctttaaactttgttaaacggtctacaaatagggctgctcattgtgttgctcgagcgtcttgtttaagcccaaatcgtatttttaatgagcataacgctccttctgaacttttggctattgttgatgcggaatgttacaaaataaaataaatcaacttttgttcaaaaaaaaaaaaaaaaaccctagtttaacaccataagtaatgtaggctaacttttatttttgttctaaaaatacccctcccgttttaaaaactcatttctctttttgtttcatctctttttccctctctctcgtatccgcccaaactcatgtcccctcccattctggcaataccactgtcacccaccgactctaaactcctcccttagaacactgatgtgttgcccatggagacagggtagcctcgacttccatagaaccaccgagatcgagacccataaccgaagaaaccatcaagattttttttgttattgttgtttagatatttgatatgtgatttctctgtattttttggtaaaaaatcaagtttttgtgaaatttatgatttcttgattctttgtgttttttttttttcatatatggtatgatggggcacaaaagaagtacgatagtagtgtaatttagaaattagggatgaatgttcaataggatacgattgtaatgcctactaacttaggtgcaatacattttttaattattgttgttgaaattgcttttagttgagagtcacaaactcaattgctactaaatcttataaacaacttgaatttatcatcactcaccaaaataaataactgaatttataattatttgcaaaatataagtaccactttattactgtaaagttcttagttggtatatttagtaaatatggcaaaattaattatgtatgttattttcgaactagagttgagatattggtttggtgtatgtttttaaaatcagaatattctatctatgctaataaatattagtatttttatataagtatacaatatcttgatatttatatttatgaaaattttatttatttaatttgaatcttttaatctgatttattgactaaaaagtcgtgtatatcttgcagattaaatgagaatattgtatccttatttattttagaaaattttgttcaaaactgttcaaattcgtttgaatctgtccaatggattatcagtctatttgaaaaggtcctgacttttttttttttttttgaaatatttttcacttattacttgattattttcttacttataaagcatgacctatagtgtatttattgagtatatattcttacttatgttttagtttgatacgaaaagaataaagtgatttattatgaaaatatactaaatctatataaggtatttctttgtatttgatatatattattctatttatgatatgatctgcattacttttccagttaggattggtggtgtctaaagagaattcatgggatgattttgatttgatagagtctagattcacaatattgactagacagatcacgatttcatttgcatagattagaatttcatctacacacattccatacatgtttggacaaaattttgtcattttatgaatttttctaaggaaactatataatgtcttctctttgtattcagaacttttgagctcaattttatttgttatttatccttataaatatcatctaaaccaacatcaaaaggttaaactattctactccttaaatttttatattttttaaaagaaagtatttttttaaaaggatagttgttctgctattccttggtgagtttgtgtgtccttgtgattacttttatgtaaagtaaatttcaaagtgaagaatgtgaagaacaaaattcgagagaaggttcatcatttaagtctcgcattgggaggaagcaagcgctgctatcttcggaaaaatatttttacaagtcttacatcgagagaaagcaagcaccgctatcttcgaaagaaaatctctataagtctagcttacatcaggagaaagtaagcattcttcaagtaatttgaagagagttcaaaccttagtgtcttaaggatatttgttcagtaaataggagtacatcaaaacttgcggcaaaattattagagggagtttgagttttgtttaagtcaattactttgtacttgttgaaatttgactaatgaatcttatttctgggcatgacccgtggacttgtaaatattttcaaaaattgctaatagcatgtataaaatatcgcgtgtctt

SEQ ID NO: 45130 - DNA, 1355 bp, Cannabis sativa
aaattacacaatttttttgctgattttgaaaaatatatttttttttttttctaaataaggatccaaaaataatattttttcctatagtccactaaatttcaggaccggccctgtacggtaaaaatatttggatatctatattttggctagacataagaaaaagtgatatactatgtgtaatacttggtaccaggtcaaggatatgtggatatatttcatgattggtaagtatcaatagaaatctttttccaaaaacaaaaaaaatccaatagaaattttcaaatttcaacacaaattaattatgactgatctaaatttcaaacccatcatatacgtaaaagactattaagtagtatttgcctgcccctactcatactatagtgatactaaaaatagcattaataatgacaatgagtggaaaatcattttcaattcacacctacgagaaatattcatgtcggtttctcaccagaaattatcattaatagttattatattttttatatataaaataaaattaattaaccaatttgtcatatataatatttttgctttactattaatctagcttctctttttattcattagtcatgatcaaaaggggcaaaagctacgcggttagtaattacagtttgagaaagattgaacaaaattttgggtaccaattattaattaatatgttgtcaaacagtttcactctcactttcgaaacaccaaccatgcaatttcttatattcaaaaaatattaaataatgaaaaataaagcatgcaatttcttggaaattaattttacatctttattatatatttacattcagaatattttgaaaaagaagaatgatcatcatatattatccactatatccacccgtatttaattacaaagtactgtttcaattattcttccattactatatattgcttattacttggaaaacttaaaaattatgagcaagtatctatccaaaaatacattctgttagaaattttcaatggtgtgttattttattaaattagtgtagcattttcacataattttattctaacaatacatgtgtattgaattttacactatttataatgttgaattttgaatatttaaattggttcataacttttttttttttttatcttaacatttcttttaatttgatttaaaatatgatcactaattatttgtttacactatgtataattatatcataaattaattattaatgtaaataatataaaatataaaaattttaagtaaaatatatttatttagtgtcatattagtattaagttattggagttgctgcactaaaaataataaattttacgccaaattaataaaaaatgttcgccaaaatagt

SEQ ID NO: 45131 - DNA, 3623 bp, Cannabis sativa
agaacatctttgtaactcaaagcaggtggcacaagagaatcatcactgaactttaagagtttttcacacttgttaaaagtatggtcaagcattccgcagtagtaacaataattttgaatcccctcatacataaatttaaaccatttagtgcatgagagagatctaaacttaatgttcatacccctgcgaagaggcttggtaacatcaacaaggactcttatatgcatgaaaggagtaatagtatcataaagggaaggaatgtgaacttcaataagatcaccaatttgttcagacagaaattgggcaagggtagtagatcttttaccaaacagaatgagatgaatctgaacccaaagaggaacatacttaacttgaaaagaagagatagtatctacctcaccaggaatagcaacgaggatcaagttacgatcaaaatgccaaggttttccttccattacccttctcctatctccttcatagccaaaatgcaccatgaacataccagaatggtagttcgagaaagagaatggatagcaaactatccaagcatccctcacagcattggccacccaatcagatttgatagttttagaggtaagaattatggcaacaagacaaaaggattggagggatgagtcagaatgcatagagatatgatcaaattcatggacaagtgcttcctcttcagtgaggttgatactaaattctgggttttggggggaaatactcatagtgaaaaggtgacgagaagaacaagaggtttggtggtaaagagagtacaaggctaagtacagaaccataaaattgaagttaatagagatccttaaatagacaagaatagagtaatatctagagtagaaggggctcataggaaacctggaagatgccaaattgatccaccctagccatagcccagatcctgaattcgtagactctctgtggaggaaaatccactaggagaggaaacaacaacaatcaaatggctgatatgatggtgaaaagtgttttggccaaagaaaaaaacctcagcattaaattacaataagaaaaggaagtattagcagtaaaaattaattgccctgatgcaatcttctcctgcctctcaaacccgagctgtagagctaatttattacctctgaaaagagagaataagtttatgaataataaatgcaaagatttagttagaaaatagtaaaagatgaaagatttgggattagaaattatagaaagagaaaggaagaggctggcaatggaaccagaacacgaagaggatgcacccctaggaaacttctagagcatactcagagactgtgagttgtgtaacctgtgctaacaagatttagtgaaaagcgtgtaattcagtacaggcttaaagcatgagagatattacgaggtagacaaaaattgtacttgataactaacatcaattatacatatttagagcattgatattagttaaatggtgcccaacatacagatgtgtgatgtgattggttattaataccatttacaccaataaccacatgccacatcttgtggtgcttgacagcgtaagagctggtagtattatttaaaggtgttaaaaatctccacatcatctaaaaatataatattttattttatctctcttccacattatttttgacactcttatttcaacaaatactctaattgtataacacttttcaataatgttataattatgatctcagatattattatttgatatattatttattgtaattataaatattgtcacactattatttacctttaattttttattttttacaaaaaaaaaaatatagcatcaatgccatgaagtggcatcaacgcaattttttataatgacacttatttatctccaatgttgtagcattcttgtgttttgccaaataaacaattcacataagcaagcatcttcaaaatttttgccattagagatgctctaagagagcatctccaataggggacaacattaatagtttcaaaatacacacatcattttaaaatataattttttattttctttctcattcacataagatttgtcatattttctttaaaaaaatgctctaatggtttacaactataaaaggttccaactatggtctcacatcacattaaattaatgagcttttaggtaaaaaacaatacatttttttctaataaaaaattaaaaaagaaaaaaaagacatgtggacattgtctatattgagcaacactttacgtaaaattagtctttaaaattggaccacattgcatatgtgccaagaccactccaatggccaatgggggtccaaggtgccccttagcatttctcatatatttattgtgcccctaaatttttcagctcatttctttaaaaaaaaaaaaaaaaaaacctcagcccattataaatgatatttgaactatttacaattttttttaagagaaggtaatgctcaaggacaccaattcaattaaaccagaaacacaatgcataatagctaaccaaaaacaccagtggcaatagaaaacacaaaaagataactgttactaacataaataaccaaaagaaaacaagacagaaaaatcagcaaactgacatagagtagtcactatgatagagcagccttgactagtgtttcataaatttgatacgcaagtatatgaaatcgaaaccagtaatataatgacaaataaagtattgttccctcgaagactgattatctattactaattgattaattatttagttatatttgatgaataataattgttagaaaaaaagtaaataaaacaaataataattaaattttttaaaaaataacaatgataaaaataaggattattatgatccccactattatttattttacttcataatgtgattacccaatttctcttcttcctattcaattgataagctgagttaagaaatttataatatggttaagatttataaactcaatctatatgaaaacttcttatatttcaatggtaagtttaatcacaaagatagcattaagcatagcaactagtaaaaatcatacaaataatctagaatactctcgtcctaaattgatttttatccataacaatcatagcatatttaaatctcactttttaaattttaattttaatttataaataataattaagggtgatcaatagggatgcacaaaggacggggaattggcggggagttctccctgattctccatctctgttaaagattttaatctccatcttcgcttattttccatcgagaatggggcagggaatcctttaatgggggtgggaacggggcagggaatcccttaataaaaaaaaataaagtttataataaacatttaaatatataaaaatattaaactacataaaaattaaaatattttacgtcaattattattcaataaactaattatttaaaatgtgcatccctagtgattagtaaataacttcaaaattaaaaaagattttgtatggaattgaataaaaagaagaagaagaaattgaataatcacattaatccataaaatatactcaagtggttcacataataattcataaaagaacttagctactaaaagacattctaaaattaacgaaatttaactaaagatataaaagatagagtt

SEQ ID NO: 45132 - DNA, 2360 bp, Cannabis sativa
ataataaaataataaaataataaacattagtgctaattgcctttactaatcagaatttactagagcggtcattacatcatggatgcttctgcacgatgctcccagagcatttctcaaggtaaatcccctgtgcttagatctggatcagtgttaagaaacctagagaaatcatattcgaatgtttctggtagtagtaaagtaaagattaccaatgaggatattaaagatgaaattgatttttggagcccctcaattgtttgctatgtgttgggagcaaatcctccattgtcaattttggaaggttttgctaggagactgtggaatgataaggttgaaagagcagggctattgtcttatggcatttttctgattagatttaactcgatggaagatagggaggaaattcttaggggtggatacatcttcttcaataggaggccggttgttatgaaaccttgggaccccaaagtcaatttcaagaaagaggatgttagggtggttccaatttgggtccatcttgatgaccttgatctaaaaatattgaggtcaaaaatccctttcaaaataatagggcaagttggcaagcctattatggtagatgatgcaacaaaaaacagagaaaagcttagcttccttagagttttgatagaggttgagatgcagcaagtgtttctagatctcattgagtttgaagatgaaaatggtagcaatgttatcgtggctcaatcctatgaatggaagccaatcttatgtggaaatttccaaggtttgggacatagtctagctaattgtaggaagaaaattaaagtaaaacaagcttgggttgttaagaaaactgaaatggaaaagaagaagcagattgtgatagatgaagagggtttacagcctgtgttgaagggttggaaatctaaggaaattgggtactctgaaccggcacaaaccagtaatcattttctggttttggatgatggtatagagaagttaaatggaggagaaaatatggaaaacttgagcaaggataaggagattaacacaggagaggggggagatccttctcctactaatggatagaatcatggcttggaacgtccgaggaatcaacagtcaacaaaaacaactttcagtcaagcaattgattggaaagcaacgaataggacttgttggtctccttgagacgagagttaaggatcggaatttaggaaccttgtctgtgataatgttttctagatggtgctttacctccaatattgtgtggcataatggaggaagaataattgtttgttggaacctgaatactttcaatgttaatattgtaaaatgctcaagtcaactcatccatctctttgttgaaaacatagatagaaaaacaagtttttttatttcttttgtctatcctttcaatgattaaattggaagaaggagtttgtggagagaacttggagaattggctgggattgaaccttggattgtccttggagatttcaatgagatcctcaatcaagatgaaaggataggtagacatgcaaagtttaataactcgaatgagttcaagagttgtgttgaaacttgccatcttgaagatgtgaagtttacggggaagttttacacttggagtaacaagcaaatgggagaagatcgcatttactcaaagatagatagagttcttccaaactagaaatgacttgatatgcatgaagctgctgaagttaattttctcaccgagggattatttgatcattcgccaaaaatcttgactgtctatgacactattccagggggaaaaaagccatttagatacttccggatgtggtcttcgcatcccagttacccgactctagttgctgaaatctgaaatcagcatgtttcttttctggtgttaaaatgtttcaaatcgtgtcgaaattgaagaagctcaaactagctttttgaaatctaaaccataaagcttatgctgacttacctgctactgctgctgctaaggttgcaaaaaacttggaatttcagcaacaactacttcaccaagatccactcaatgaagggctgcagctacaagaaaaaaattaagggaggattatgctattatatagaaggattacttgtcttttcttcagcaaaaatctaatttgagctggatgaaagatggtgattcaaactcaaacttcttccacaattgtataagggcacgaagagcacaaaacagagtcttatctatcaccggtgtgagtgtagatgaccctcaataggtatctaatgctttccttgattattatatgaccttattgggtagcaagctgcataacaagaaacagatagtgttatctgtcataaatcaaggccctataatttttggacagcatgtt

SEQ ID NO: 45133 - DNA, 1427 bp, Cannabis sativa
ttttgttatatgcatattatttttcgttattgttttgatgttatttaaatgttatttttcatgtaattttcttattattttcgtgtttttttttttatgaaaaatcttaaaaaatgttaaaaaaaaaattctgtaaacattaaaatgtaatttttttaaaaaaaatatggtgagtcatgtaattatccttaaattctattctaagactttccagttcggatacttgtattatgcaatctttttcttattcttttttttttccaaaaataacatatactttacgtcatattttgttagaaaaacatatcttgaaaattgtaatcttcgtacatatgatctgtttgtaccataaaataatatgtcattattatagtatgagagagagaccaatggaccattgatgattttccatactttgtcagaaaaaaccatcaaggttattatcaaataataaaaataagagcacgactattaggtactaattttctatattatttattaaattaaattgttttggagtgatttgaactaataacacgataccatccaccaccacaagtattgtcttccactccaatcaatcataataacaacattgctttttccttgcttaaaggttattactttctccaaattaaccagagaaaaatgttcaactcaagagggcttcttgctctgaacttgttcaccatagttgtcctcctcaatctccatctgggtattcttgtttcgagcttctctaatgacccacttactcaacagaagcttgatagagttggaaagctccctggtcaaactttcaacgttgggtttgaacactattctggctatgttacagtgaataaggagtctgagagagctcttttttattggtttattgaggctcttgaggatcctgattctaagccccttgttctctggcttaatggaggtcaaagcttcatacttgatttttactctttttttcttcgtttgatgattaagttgacttttagtagtgtttgtgataatgcgtcaatgacatttagacctttatttttgattgtttaatggcagtttatggaggaaaaaagagatactcttacttccttttcccactaaatttggttttctaagctgtaacttttcattgatcaagcttttgtaatttgctaaaatgttattatttcaaaggtggtcttgctcttttgtttgatttgtgtgtatttgctaatttgttaactttgacttctttcaggtcctggttgctcatcaattgcttttggagaagccgaggaaattggcccatttcatattaagccagattccaagaccctttacttgaacccttactcttggaatcaaggtatgttcatgttgtaacttctacaaatgttggtattaatggtagatattattactatgatagttgaagtttaaaattaact

SEQ ID NO: 45134 - DNA, 2239 bp, Cannabis sativa
tgtggagttctttcgtaatgggctgccgaaaaacaagatgcaccttgttgatataggtagtaccaatcaatccatttaagctttcttaagctgtgtagtcccatacctaaatagtctcagaatcatcacacttgacattccccagacaatgtgggattacaaagcttacccgatgtttcccatatcacaggactactaactgtcacatatattggttaattctcattgattcactctttcaccttgagaatttgtttacactccacaatcttttttgttctctggcttcagtacaataacccaagtcttgttcttttggagtgaatctatctcttcatccatggcttggagccattttgatttgtttccacctaaaattgcatcttcgtacctttcgggctcttcaatttcagtttgttgtactacttctaggacaaattctattaagtctactttcacaaaccttgctgaaagggtaaaactctcttctggttttatcttgtgtcaactgataaccttccacatacttgtctgtctgagtactcttctggaacctctatttggtctttgttattttcaagctcagaatcagcttccgcctacgcactgtcttctggttccacaatagcttccgtcaatgaaccttcttctaaatgtttcgttccgtattccatttccatacgtgtagtgttcttgttatttttcctacatcacacggagatacactacctttcttggatgttaagtgaggatattctaactcattcaaaataatatttctagcaatcacaacctttggtcttctcttcttggaaatatagattctataccccttggtacttaaggcataacctagaaaagtttccttaactgatctaggttccaacttttcaattgtacataagttacacccaaagattctcaaattttttaggtttggaattctcttgtaccacatttcataagaggtttttaagcctataacttggtttgggcttctatttataaggtaggctgcaatttcttgagctcccccccataatggtttctctattcttgaacaaaatagcagacatctaacgttgttcaatagaattcggttcatcctttaagcaacacaattttgctttggagactttactacagttctatgcctagtgatcccatattcttgacacaacatgtcatattcacagttaacaaactctaacccattgtccatccgaaggttcttaacttttagatcagtttggtgtcccacctgagtttttcaaattctaaactgttctaggcactcatccttagttgctagtaaacaggtccaaacacacctactataatcatcaactatagaaagaaaatattgcttaccagaatgagtaggaactttttatggcccccaaagatcagcatgcaaatatcgaattatcttcttagttgtgtgccttgccagagtgaatttcagcttatggtgtttccctaaaacacaagcttcacaaaatagtaaggcataagaatttaaatttttaattataccttgtttttgtagttctttgaggccttattcactgatatgcccaagcctgcaatgccacagttgcatatatgatactagcctttttcactaaacctgcttctctagctggaacaatttctccttggagaacatataaaccattgatcttcttacctttcatcactgtaagcgaacctttagtaattctcaagcttccgttcatggatttttatctgtaaccttcatcttcaagcgcacccaaggacataaagttttttctcaagtttgaaatgtgtcgttcgtcagaaccttgattctgccattatattatttgatggcaaccaattcgattccaatgaccctgcatgaatgatcattttccacgagaactttagctccatcaactaatctataattaataaatgattcttaactcagacacaagggataaatgcatccggagtcaagtatccactccctatttattgaagatattgaatggagaacgattctcgatccattgagcagtcatcactatctttcgcgactccagctgaatctttcatgtggttatgatgcatgttgtccttcctatctccattatgagatttgttgaagtcttgctgcaccttgtactttttgcaaaaaaatttcaattgtccagaccttccacaaaagtaacactttcgaatttccttctctctggacttcgatcttgattga

SEQ ID NO: 45135 - DNA, 1053 bp, Cannabis sativa
tttcaagaaaaaaaatggtggcagtccttagggtttatgttgtcttcgccttcagcctcgtctaagtatttcataaggataactttgaaaaataacacaaacccatccatttcattaggtattttctcatcaatattaaataataataaatctaaaccaaattttaccaagaaaaacaagagcgtgataagaatagtaagaattataatacaataaaaaaataaagatgttaactaggaaagaaaatctaagcaaaaagacatagtgtgatgaagtaactccatttggtgtactatttgctttacttatttggtaacatctttggtaaaccaaataataaggcgattcataataaagcagtaataatatttcagtcacctaggcagtgaatcccaactaaaccaccaaacacatcaatattacccagggaaaaattaaagggaaatagtgtctcatcttgatataataataagccatctcgttatataatttcaaaccaaataaaaacagatcagatttagagcatagcaagcaaaacttcctatgattataacatattgatattccaaggtggagttgacaaaaaccacaaaatctaacagagaaagaaattcctggacaaaaaagactcacttaggacccctatgatcttcattcttcgtcttcttcatctccatctccacctgaagccttcttggcagctgccttttggttctttcgcttcacacggccagggcgaccacctccgaagggacttgtgagggagaaatcaatgtgcttctgagagtcaaccctcaccatgaatgaggggatgttgactacctgccttccaactctgagaaaaaacaatgctagctaatttacaaatgtgcacataacgataaaaacaaattaagtaatacaggtgtaaaaccaaccaattgggacacaagtaattaaagttacttgtcgaaaataaaatttcacaaagcattctactgagatgaaatcaaacaataaagaatgctgtgacataaagccaaactcaatataggtgaaaacaaactcaatata

SEQ ID NO: 45136 - DNA, 977 bp, Cannabis sativa
tgcactggtttgcaacttatgacaatgttctacaatgtctctttatggggaactctggttatttcagtgaagttttctctgaactcattattagatttttttttttttgaaaaaaaattatttgctattgtaaagagtgacaatcagatttttactgtcagttttgtattttattttatgacatcaggtgatccaacaaagatggcaatggttaatgttgaaactaagcttcctcctatccagagatatgagaaaatgtctcaaaatctcactgctttgctaccataccttggtgtaagaactttgtttccttttttcaaaatatcatctactttcagtatagcacattcttaatgtgtgaaactagtttttttttcctctgttgattctcatgcagtctttggcttgctggcatttattcataaaagttttcgttttgggtcatgcacaaaagcacctttcgagtttatagtacatattaattccgttctctgtctgtctctgtctctcaatctcttttatttctttcaagatgtatctaagaatagttcaatctctgggattatttagaggcaatagttttacttttacttctcacttcggcttgcagtctttagctgatatcataccacgggatactcttctatggaagttgaagttgcttaaatcagctgctgcttatgctaattctcgtcttcatgctgttaaagctgaagtgctgatccttgccaggttttcactcactacattagtagattgttccctttatttggcatctattgatagtaatacttcttgatttctctgtatatttttagtttctgtagaagttaggttgtgtttttatacctaactaatgtgaagctgtatagataagcctgttaatgtcaaatcattattgacttttgagacatgctatgatcattattcattagagcttagactaacatgatcagtgtcagaagaaattatttatt

SEQ ID NO: 45137 - DNA, 1755 bp, Cannabis sativa
tttttttgtttgaaagaaataatgctcgagaaaatgacaagggtggaagctatgatgacagccctcaccgctagaaacaaaactaaacaaatgactccaacaaatgatttcactagaaaagttgatcctaaagatcctagaacctctaatcctcataaggacaaagggaaagggaaaataggtgaaacatcaaagaaggattctcaggccaaacaacaaaaaaaattaaaactgtcagccaacctcaacagaaaaagaaaggaaaccatacttcaaggcatggtgaccagactaattttggagacagagctgcagagaaagataagtctgatgctggaatcaagaagcctacttctcggaaggacaagagtcactataatgattctagtagttaaagtgatgatgccgatgaagtgcatccagtttcagacaacaacagtggaagtctctccagaaataatcttcgaagaaggttaaatgaaaagaaaaaaaaaggctagaatagaaaaagccagaccttgtggaaattatttgaggaatcatatcaattattaggtccgcgagagggaatcttaaagtgataaaactcagtgcttggaacgcaaagttgaagagttaacaaagctcacaaagaagatttcctgaaggcaggatggatccctgtctgatttagagaaagaagacacaaaaccatgtgtgaagagaattaaagatgcacatgtgtcagagcgcttcagattgtctcaaatggaattgtatgaaggcaggacaggccctagggaccacttgtccaaatacaatcgcatgatgcaggtcactaaggctagtgatgatgtaaagtgtctttgtttttcactaagtctttgttttatctgggagtgctatcagttggatctaaatatattatgagattatagattaaatgtttacattgaattaatggtacataagaaattcaagagataatttgaactacttatattgattatatcaatagactaatagaaagagttttgtacatataattctatattttcaaagagtacaattccatatctatagtgtagaaataatagaattaataaacttgattattttattgaagagttctatcagtggatgacatggagtcccctccaccaacatatgcggttgggaccccgtgctcctgtgggtggctttagtaccaaaagtgtgaggcttggctttatcctttgagtatgtcactcaacactttttgtttttcagccaccgttgtttctagcctttggttcttcaagtagagatcttttatctcctcttgtggtagcagttcaggagctggagctcattgagtacacttccttctcctttctaggtccacatcttgaagtgtcggggtcttatggcacaaatggtggagggtgccacattagagatggccttctcaatggttgaatgcttccaccgacgaggttatccatcgatgtcgtcatcaaaccatgttgtgctgggggctctttttgagcattggcttggtggttcacgctttgatttctatccctttggtcttctccgacgacgggaggtggaggttctcttatgatggtgaccagttggttgtcatttgatatactccattatcttggagatattgtgaacatttacgcatagtagttggttaatactcagggaaagacgtagctatggacttgaatttctgacaaatggcatctgttgatggcagtcatttaaactttagttagaaaattaaat

SEQ ID NO: 45138 - DNA, 1159 bp, Cannabis sativa
tgtctataatcttgcttaaggttagtttgttcaagctctacaaatcttccttctctagaacaatgtttgcattccaattaggacaactttggataattatttagagttcccacaatattttggtggatataataatgatagttttaaattaaattagagatagagtttagtcctcttgaatacttagaggaaatggtcttacttatgtgaatcaaactttttaaaatgaaaatttaatagggttttcattctttcttgattgatagggtttttgctacttagattccaccgattttttttttttttatctttattaacctcacaactattacctgtttctttgattttaagaagtattaattggatcttatagtttgaaacacttttaaacctgcgacccacgagcctggccaacccaaccatttcacaggatgggtctgaatataattttttaaactcgaaattagataaatatactcgatgttcagtcttacttgtactattattgttaacttttttatttacctttgtattattatcattatatattttttaatatattattaaatgaacaatgacatattaaatttgacattaaaatttataattatgaaatggaacacaataataaaaattaatttttttgtaccaaatatagcacaatggtaataaatctaaattgaattgtcattattattgtataacaataaatgaaatatatacaaggaagtgtaaatgtatatttaaatagaataaatagaatattatcttccaaaatatacttactttcagattgtgttctcttttttgtgttgttaaatactctcaaactactctaattacggctactatctacctaaatatttagacgtatgtgtttaaagtagttgtgataagtttcaaagccaaaaaaaaaaagtagttgtaataattagaaggcacaaattttataataattaattcaggaataccactacaaaataacactttaagaagtgaaataaattacacatttatttatggtataatttaatagtggtaatataaagattttttttaatgacattttttttgaaaataaaggaagctttattaataaacttctttcatgattacatcacgaatatcaggagtgaaatcattactcctaaaaacacga

SEQ ID NO: 45139 - DNA, 1395 bp, Cannabis sativa
  modified_base (1104)..(1104): a, c, t, g, unknown or other
taaatttttaaaataacaaaaaaccgttttctattctcacttttaaaaacacaattttaaaaactgaaaactgaaaacacagccaaacaagctctaagatattccaccaacctccccttcctctttttgggttcagcaaattgtacagagcgaacaaccttcaaatgagccttaagatcatctcttttcctttcaatgacatgattccaacaaaagtaatttcagatcataaattaaagagaaatcatacctattgtaatatacaatcaaagagaagactcaatgataagatgtcttgagattttcaaatttacattaaaccataaatttcaaggatctttattttagatccaagattacataggtgcacttatattaagtgtgtgattaaaaggaattttcaagcaatagagtgtagtgtagaatgtaccttcctataagtaaggaaatagttaattaattattatcataagaagtaatcttcttagttgaagctttttgatcctagagatcttctgggctattacctcactgcatctaaccaaaatctctgctgtgatggcctgaaattaatcaagatgatcaatacttaatcaaattattaattataagtttcagaattaactggtgaaacttaaagaaaaaacagtaccttggtcctgagaggatgaagatgaagttggttaagatacttttgccaaaattcgttcactatctcagacatggctactacttcgaacaaggggctaggtagaaggggctaggtagcatcctattaagttatttattgtacaattttcaaaaaaaagcaagagaaaattatgcccattgtcatcggctcacctttttcaggcagcgaaacacccgtgcggaactgcggaaccttggaaccttgacgacttctctaagccaaggttagcctttgaaccatccgagtaacaacgagctcatttttcgcgcgactcccgccgactcatgctcgcaagcatccatgagtgcatcgctgcattgaggctctatagccaagatactcgcactgtccgtaggttcccactatgataaggcaaatcccaacaccgacgctcaccctgtcactcgtgaccnaggtagcatatgtggcaagatgccaacaccaagttaacgtgccaacgcttctatcatgccccattcgatactgtccgaacaatctccctcgtcacccaaggactcccatacgtccatggaccaatcctcaaggcacaatgcctccacgcatgttggtaggccctcgagacaagccaccaaacttagcagcatacgctagacttctgtctctttccaacatggtgcatccatcccatgcgcatatgcaaactagcccacgaatgactatccgtgtcatctcgtgttgagact

SEQ ID NO: 45140 - DNA, 2586 bp, Cannabis sativa
  modified_base (1885)..(1888): a, c, t, g, unknown or other
ctcttgggagaaggtgtacgcctcccaaaggcttatggtgggattaacttcaaggacagctcgaattggaatagggcttcacttgcaaaatacatctgagctattacaaaaaaaatatgacttgttgtgggttaaatagatcaatacaatttatttgaagggatcaaattttttgggtttacaactacaattcaaactcaagtttgtattggcaaaggctatgtcatttaaggaagactttcaacaagcaaagcctagttacaacttactgtggaggtatattccgagcagggaaactttatagtagcttgttacattataatcaagttgagtataaaaagaaagtttgggatggtttgagcattcctaagcatagatacatactttggtaggctttaaactcccaccaattgataagagacttatatcaagatttcatattcctattgattctcttgattgtccagtttgtggcctggagaaagagagtaattcccatctcttctttgctggctatttcttaatcagagtggtgagttatactttttattggttgggttttccaacttggccattgagttttgatagttggaagaattgggttaatagcacaagatcaagccgtgtggcttctagtgtgtgcactaattgcagctacagtgcatggtatttggctcaaccgaaataaattctttcatgagaattcttcctatacaattgctcacatagtgaaagaaatcaagtttatgttgcaatacaaatttcatagtgttaaaggaaaaaagatgaattcctgtgaagaataattaattaatttcttgaatctcaaactaagtgttaggagttgatgttttattatagaggctttagcctatatcattttgtttgattgtaattagtttggttgattagtgaaatttttttccttaatcaacaaaaaataagatatattaataacaccatatttttgtacttttttttatatacattgacacgtagcagtaaagtgatgcttccacaccataattttatacagaaatataataaaataattgaaaaaaattctacaatgcacccttaaaaaggggtctattgatgcactatttatctgtttcaccatttaagagaaatttatagtctaatttttttttatggtagtctacgttttagttatttacgacatcctccaaaatttaaagaaattcagagaaaagtttaacacacaaaaattagggttcaaaaagtatttttctcatgcgtataaaataaaaaatatctctggtgtaacatactatttgaaccctatttttagcgtgttaaatttttcccaatctctcaaaattttataagtatcttaaataactacaacgtattcgaccagaagaaaaatgagatgaaaaaaattctctcagatgccaaaacaaaaagagagtgtgttagtgaactccttttaaggggtgcattgttaagtatctaaataattagttttaatagaataggaaatggaatagttataataataaaaaaattgagatattgacgacaaaactacctcaattttaaacttttaatacttaactataaattctgattttttaacgacaaaacctaccaaactgatattttgttttgttctttatactttcgtccaaaatcctctgttaagtgtcacggtggactgcctacgtgtacacaagagtacacgtggcaaaaatttagtggtgcacgtaaatttaaatttaaatataataaaaataaattataaattataaaaagtaatttgtaagaataaaaaaatagaaaatatttttgtttttttcttcttctttttttttctttctctttcttcttgaaccagaaccccctttcttcttcttcttcttcnnnntcttcttcttcttcttccttctactattaccatcactacacaaccaccatcccactacaacaattgtcacacctcaaccaccattatcaccatcactgtcccaccattaccatcacccttattaccaccaccaccagtatccccaccataacaccatagccaccaccatatttttactaaatctacaaaaaattcaaccactattatcaccatcgtcgcaagattttatctaaatcaaaaaacaaaaaaaaaacatacagatttgaaaaaaaaaatatcaatgccgagagaggaagggtggggttcatcgcccaacgtcttcaacgattgatgaccaaagatgagaccttgtggtccactaccctttttcatcaaagagagagaggagagtgagcatgagagagaccgagagaggcgcatggagtcatgagagaattggggtaggggtttttgggtcttaggggttgttcgtctatctgggtattggggttgggggatttgttgatggctaacagtggaggagagggagagctgcgagatagagagaaagagagagattagggttcgtagaagaaagaagaaagaagaaatcagaagaagaataaaaaattttaaaaaaatatttttattttttacttttttctagattcaataaatttttaaatacttttttatttttaaatttctaaatatttaaa

SEQ ID NO: 45141 - DNA, 1445 bp, Cannabis sativa
taattaatgtgttcatcacattgaattggctcttcaaaaagcaatcatatcaatctcattacatatacacaaattgtattatgtgttgtgacttgtgactaggtaaacagatcatattatgtaatgtattgtatgcattgcataccaaaatggttttcaattctatcctatgtgctctgtttattataattatatgattttgttgttagaaaatcaaaatcagcaatataaaatttgtatataataattagatgataagtaagtatgtatatttaattgattcatagtaaatttgatagtgaaatattaactaagttttcttcactaaaattgtaaattagaaccaattttatttatctgattattaaaaaatatataattatgataagacaatatgtatttataaagttagggaggtgacttagctaggtaaccctaattggattgagtctgtttatcaaaaacttttgttaactaaaaaagttcacacttctgttttagctatactttatacacagagatgttaagctcattaaatattgaccactaacacaaaactatccaatcaacccatattttatcaaaactaataaaaattaatgtaaatgtaaataaaaagttacatatgttgtatatgtatatatatttatatacatgggaaatattaaaaggcacatatagtgcctagtacccttgtgaagtataatatgattattagtgcaactcaatattatgtcctacttgttttattttaataaatattataaaaaatggttaattaattatatagtgatattttatcgtgatactattactaagcacaatgttctatattcatatctcatcaatgatgtaaactcaagagctagccttaggtcaaggcagtttattaggcttgcgcttaaggtccactcctattaagggtccaaataaaaaaaaaaaacttttaataaatatatatttttcaataatgtttaaaaatactatttattttcataaaaaaaaattaaaaaaattatttttttttgaggaccagattaatgataaaatttatatatatgtaccaattctagtactcatcataaaagtagtttagattttattttattttattaatttctttcttattaatatgaacatggttgtcaatcaactactttcattgattgaattattatttctcttttttgggaaagcttaatttgtttttttgttgaaaagaaattatattaatattggtaaaggaatcaattgtgatgagtacagacatttttgaagctgttatttggccaaaagtggtttttaaattaagggtgttccttccttgtcttcaaatcgattaaaagtctttcatgtaacatgtttatgatattagatcctatgataataatatacaatatacatgtatctatatatctaacatatattaagaaaaataaaattaa

SEQ ID NO: 45142 - DNA, 2005 bp, Cannabis sativa
  modified_base (1400)..(1400): a, c, t, g, unknown or other
ctaatttaattttaatcacaacaattattataattaactaaaatcatatttagtcacaacaaattatgatttttaaaataaataattttaattatatacattttagttacaacataaaaataataatttataattaattataatttttttattttcagtaatttttgttgtgattaaaaataaattcttttttatcaaaaataataatagtgttttttatcatatattctaaataaaaaaaaatgacaataattaagttaaatggctaaagtcaactatcttttgatcaccaaaacacatgtcatgctctcattggtaactctacttcaaaacttgaaaaattcaaacttaagaaagaaaaaagagaaaagggaaaaaagatcacactaactcatctacagaatgttatccacaaaaaatataaataaactatgactattcccatatttcaaaccaaccaaattaagaaactctcaactaaaccatggaagaagctctcatctccaaaacccagctcacaattctctccttcctcctaaccctaaccctagttttcgcccttacaaaacccgaagatggtttcgtcagagccatggatagaaagcttctagggctaaaaaaggaaaagttcagccactttcggttcttctggcacgacatatacagcggccgaaaccctagcgcggtgtccataatccaaccaccgaaaaacacatcgaaaaatgggttcgggtcgattagcatgattgatgatccactaacagaagggccagaactaagctcaaaattgctaggaaaagctcaagggttttatgccttggcttcacaaaatgaggctgccatacttatgtctatgaattttcatataattcaaggaaaatacaatgggagcactctctcaccattcttgggagaaacaatgtgttcaataaggttagagaaatgtctgtaattggtggaagtggtctttttaggttcgcacgtgggtatgttcttgcaagtactcacaaattagatgatccttctaagggtgatgttgtagttgagtataatgtttatgtgcttcattactagctacctagttgtataattcttcttttagatcatatattataattaatgttttagttttgttgattttttgaattagtttataacaaaatgataattatacactacaaaaagtgaaataaaattggtgactaaaagagaaaaaattgtaattatttataaatcgttgtttttatatgtcactacaaaaatttgttacttttagtgacaattttttagtcacaacgtaaattttttgtcattaaatgtgatttttagtcacaacaaaaagttacttgtgactaaaacatattatttaattatatggttgtcactaatttagttttagncacaacaaatattgtgactaaaaacacatttaggcacaacaaattgtaatttttgtgactaatacttttagccacgaatcttttagtcacaacacaataatgataatttataattagccacaatttttttatttttagtcacaaatatttttgttgtgactaaaaataagagtttttgcagtggttgtaactaaaaaatttgaacctaactaaaagtattaatcataaaaattataatttagtgattaaatatggtttatgtcacaatacatacatgtgacaaacttgacaacatgtatctaaaagttatatagtcacaaaaatttatattattactaaaatgttgtcattaaatatagcttttttatagtgatatgtgacatgtttagtgagtgtcttatatcatgtttatatggctcctttaaagtttcctccatgaggggtgatttcaaaaaagtaaaataaaaaagtttccatgagtgggctaaagctatacatattaaagatataataaatataggtaatggcggcaaaactttactttcgttttggtttcactaaactcccacaacttaaatttatgcgggtaaaccccaaaaaccacg

SEQ ID NO: 45143 - DNA, 1941 bp, Cannabis sativa
ttttatatattttgttcttttattgttttattttgtaaaattcaaattctttttaaaaagataaagaaaaatattaattaaacaaaaaaataaaaatcaaagtagtttctgagaactctggtgtgagttgggttggagaggttgttctgatgaagtttgtcgaagttagggttagaatcgaagccaagctacgtctctatgcaatttcacaaaaattctcttcttcctcaattttcgaacgatgagtgctgtcagcattacaaacgtcactgttcttgacaatccttcctcctttttgaaacctttccagttcgagatctcttacgagtgtttgactcctcttaaagacggtatcaatcagctcttcttcttttttgttttttgagaatttgaattcggttaaggtttgcttactttcttaaatcaaaatatgaagaaatcaattgcattgcatttcagttcgttcatattatttctgattcagtactgtttggattaattttctggttcatttctgactggtgaaatagggatttagggtttgcgaattaaataatttgtctgctctactaatgtgctctttaagaagaaataaaaaatctacgtattttatgtcttcaaactcttgaagagtgtagggaataatttacatttaatttattaaaaattataataataataaagaaaattgcatgcaaatgtatgtaatgtatctctatgtattaagagaagctattcattgtttgtgtttaatatttccttaatatatttatttgctctgacgatatgatactctgaaattggttgaatgctataaacgtacttttaatatctgtttccttgtttttggcctgttttgccagttttggtaactcaagctgtcatgtgtatgcaattggtctagttttcaatttaaacattgaggtatggagacttatccatactaatcctgttgatatcatgtttctttcttgtgaaatgattacaattttgtctcttatataaattagttgtacaatcctgataacaatcagattgagggccattatggatctggaattcactctgttgctctttgtatgagattctgagctattcccagttctgttactgaaagtcttggcattactttttttcttttttgtttacttccaagttctaattgcagtatatgctgattaaagtatgatgcttgttgaaaaaaaaaaaaaataatgatgcggttgaaaacttgtttaactagaaaatgtgaagataatcttaaacgaaagagaaaggagaatctacggaggagattttgtattttttttttttgtgaaaatgattgaatttaggatgtgatttgtgatggaaaatttttgttttcttttataatttaaaaacttattgttcatataactggcatttgattgattattgtcaatatcatattaggtacttttttagtgcctttctgcataattttgttgaatattttcaaagaaaaaatttcagtcacttcttgttatagaaggaagatttgatcttcccttccccgtgttgtgcccaacttaatatactacacataaatgttagttatccgaccaagtttgaaggatcccaacatgatggttttgttttatcagaatcttgtggtgattatgtctgcatcttgactcttgagttgaattagtaactgttttgttcatcattttatcttgcaaagataagaatatgttttgtaatcgtgttacagatttggaatggaagcttatatacgtaggatcagctgaggatgagacgtatgaccagcaattggagagcgtacttgtggggcctgtgaatgttggaaattaccgttttgtgttacaggtaatttgctacaaatcatgtaagatttgttattgtttgaatgacgtgtggttgggatatatgatatgactattatatgctgaaattttt

SEQ ID NO: 45144 - DNA, 4533 bp, Cannabis sativa
tgggtttgttttcctggtaaaatctctctctcctctctctctgtatttgaatttatatttcttttatgtatttggtgcccttacatttttattttttggggtgaaatgggaaatggggctactttcgttttccgggcagtgagaaaattggaggtttcgcccccacctctttttctttgattttaattgggtttgtatgttctccatgatgtattatactatgaaaataaaatggtcattgttcaaaataataataaaaaaattggggtataaaattcaactatttaaactctcaaaaaagctatgagaggcgagttggtatgcactgtgcttttgggtaatgtgtgatatatggatgattgtgatggcagtgttaatgatatttaaaataaaaaatttaaaaacaattttcatgtattgtctttgttaatgtgatgtgggagttagagaagagaatttcattcattctacctacgttacacttactcacactcaaacaaaggtgcatctaaaatattcttagttttccatactctacaaacagagataaagaagtagtggagaaagatagctcatagctctcatgttcttttagacaagcaactattaaagtcattgaatcaataactatttaatatacaatctaataaaaataaccataaattcattgaaaccagtttgccttcaaaggaatctagttttagaaaccccttattgtgattacaaataatggtgggagcggctgcaacatatacacaaagccacattattttcatataaattaaagcaaacaagtccatgaatgaatgcatcattaaaaagatgatcaatattttgattgttagggagatagacaataagattgacagcttcaacttattcctttcttcattctaataatccttgaccttctgtgatcaattgtagcagcattgcataaactatgctagaaggatacatatattttctttttgattttaatgggatcaacttgtttgttccatgtagtttgataggatgattaactcagacactgtttttaaatcaccaatgagaatgtgatggcatttgatcactaaattgtctacttttcattatagtgttatattgtctggatactttttagggtgtgatttaagtgttgcttctttagaaatgaagtgttctcttattttagcagcaattgataacttccattaccctatggcaagtttgctatttctctgtgaagtattgtaatggaaataaaagaaaggaattaaaatgtctaaaatctatccctaaatgtgtaagaacataatggatgagaggttttttcttgtgataattatctatcatcaaacttttgtcgtaattgccattggatcctaaatcaaattttaaaagaaaatcaatcagcttgataagtgttaaaattttaacaattgggttgtcatgttaattttatggacactttgatattttctttcttgttcttatgattctaatttgattatttaatctttctctagtactctttagacctcttactgtttcctttcacgttgagtacttgttggcatcatattagtggtacttcttgcttttgtgcagaaaacattgaaagctggaaagcttaacgagagagttctcaagttgttcattgcaactggcaaagatgaagtacttgcattaattcagtcacttaatattcgcgagattattgctcctgtaatacctagtagtacgtggttgtctaaactttcacttttccaattctctctcttccctcttttatggaataattattgtccacaaactttaaactaacatctgttctgttcatttctgacatccatattttgtttcaggatgttcacaaaggttcttctaacctatgtagtggttgcataatccaaattcaataagttgcagtacaaacatcaactgtgttaagaagccttgaaaagtcctttttttctttttcattattttcattaagattattggaagatgtctagcaccaacttcactgtcatggatgatgagattgacattgtgattgctgccctccatcctgacctgacaccattcctaaatgcttggagacctatattttctccttaccacctgacaatagtgaaagatcttgatatgaaagaggaacttataatacctgatggctttaatgtcgatatctttacaaagtctgacatggaccgtgtggttggttcctcttctgcaattcttttctctggttactcctgtcgttattttggcttccttgtgtccaggaagaaatatattgtctctgttgacgatgactgcatccctgtcaagaatgatgatggttctgtagtagatgttgtggcccagcatattgccaaccttacaagtccagccactcctttctttttcaacacactttatgacccatatcgaaagggagcagatttcgttcgcggttaccccttcagcctgcggactggggttacatgtgctctgtcatgtggactgtggctcaatttggcagactatgatgcaccaacacaagctctcaaaccagaactaaggaattcaagaatcgtggatgctgtcctgactgttccagctagaaccttgatgcctttaagtggaatcaacattgcttttgatcgtgagttggttggaccggcattgtttccagctttaaggttggcaggagaggggaagtttaggtgggaaacaatggaagatatttggtctggaatgtgtgtgaaagtcatttgtgatcaccttggctacggggttaaaagtggactgccatatgtggagagagcagagagaggcaatgctgccgacagcttgagaaaagagtgggaaggggtcaagctgatggaggaagttgttcctttctttcagaagctgaagttaaaacgagcgaccgttaaagctgaggattgtgttattgaagttgccaaagaagtgaaggaccaactgggaaaggtggatcccgtgtttggtcgtgctgctgaagccatggtggactgggtgaggctttggaaagcagtgggatctggctcttcctgaacgtggtgactggtgctgttgctttgatttcaacttatttctcatatgttttttcttttttacttggttttccatttgtcgtttgttgttgacgtatgttttgacttataagttatagctgacataattaatatgatgtgaaataatagatggcatattaactgctgtcgttatgaagagttttatatatctatggtttattatatattatatgcaacttgattgcttctatttagtcaagcatgtttcttttcccttttctcctatacaaatcccaaatttgaacacttcaataaggatttgaactatccatcttgtagccgatataggcctaattgatattagacacaatactagggttatttcagttctgtacaaaagaaaaatggaaacacagccaacttcatagtgcattcttcttcctaaccaaataaaatcccaagatggattgataaatttattcagcaagctattttaatttgcaactgaacaaaccaaaaaagaattgaaattgaactacttccatcaagacctgcattgtggatttttcagttacacgacccaaaacacacctgctgcatatataggtattatgcatcatgcaatggaccctaccttacaattctcatttattagatggtgttgttcatataaaatttattgatcatcttagtcctcttttcttggtacagaataaaactcattttatgcaaacttaagtgtagtgtatagatactaactggtatggtttttctttaatgaactccttggtccaagttaaagttgagaatttacagatgaaaccatcaatacatctgattatcaaaggatcaaatctctgtggaaagccaaacttcaaatgcttaaaacgagttctaaatagagtaacctatataattgtcctataatagtggatcttctttgaccattgaggtaggttagtttttcaccagtcatctgcgtagaatactctcaatacatacataaagtaagcaaaaaagtctctcatgcttctttatatacccaatttctcaagacatattcttccttcgtacagaaaaagttagaaaaaaaatcataaacagaagagctgtagagaaagaaaagacaaagatggcgtctactaccctcctcaccagccttctgaaatcttctcaagttgctagaaacaccccaaatcccatactactattggcttcctacatgagacgttttcatgtaagctgcagccaaaattttctgatctaatatgaaaattctatttacatatttttttggccaataacttattatgtagcaatgttaatactgctcttaaagttttcaatcagttagatcgtgttgtgcttatgaattttatggtgaatgtttctgatgtattacaggctagttcaacatgggcaagccaagtgaaagacatcaaagaaagtaccagctctgctgcagaccatgtaagcgtttcaccatttattttgttaatgacat

SEQ ID NO: 45145 - DNA, 1940 bp, Cannabis sativa
tgtaataaatgcatgatgtgattttgtattgtcacattagtgatagcttttttttttttttttccttttaactaaaattgtattatatttttgaaataatataaatttatgatttgacttttgagagagttttattttaatttttctttaataaaattaatgatgaaaaatttgatatcctaaacattaataccctttcagatcactttaatcccacttccccattattctctcttcctattcatcatcattatcttcttctgatttttactttttgctttctcaagttctctctttctccattaatatataggtttttttattttttttttcttgttcagttcttcttcttcatctttttttcattttttttatttagttttggaagtttttagtcacgttttttttgaaaagataagagttagtgtgatttttttattctgatttttcagaactgagcttgcaaatatagcatctattgcatctagtgttgagattgtgcaaaaaatggttagttttgtttaatcattttttttatttttttaatttgttttattattgttttacggttgttttccataatttatttgttgacgtcgattttacagttccaactccatctccctagaattaatgattattgtctgggtgttctcatggtgctgtggtggttctattcgtgggtgtggaagatagaggctataaaatacatttattcttccttatttatggttattttgtggtttattttttattatggttctcctataaatacatttgacgagctcactagaagaaaagttttgatgtgtgtggttcttttatgtttttatgagtggttatatctgcttattgttttacatttatttttgtgttgttttagtagttttttattctgattttctaagattggacttgcaaatatagctgctattgcatctggtattgaggctgttaaggacattgttagtttttttaatccttttttcctttcttttttgtttgatttgttttagtgttgttttacaattgttttgccatgattatttatttgtcgtcgattttactattttttctcaatctcaccagaattaatggttatttttcgattgttctggtgttcttttagtggttccatctgcgagtgtggaagacagagacctcattttatttttttggcgtttacaatatcaaagaaaaaaatgggctaagacagtataaaagttagggataagttgaggaatacctcttttttgtattcattaatcaaaaatacccttaaattatatttcattaaaatttacccacttttatgagtgggttgcctaatatacccttgtcctccacttaagtgtattacatgatttacattaacataaaggtataatggggacatcatctataaaagtgagtatattttaaaagaatatggaaatgaaggtaaaaattaaaacaaataaaataaagtgggtatacaatgtaatttcctctaaaatttatttttgctgcgtggtagtatttttataaaaattgggccaaaagtcagtatttttgtaagttttccaagaaaattccctattaattataggaaactaaggcccaattgtttctaagcccaattcgaagtccggcccctttaaacaatggactgtgctccacccccaattccagctatgttatccagaattatctctttcatcgcacaaaagaaaacgaaattcccaaaatgccctcaccggcggccactaccacaacccacccccatcttgggtttcatcgttctctatactcctcagccgcacagaatctttttctctcccttcctttcattcccaatttctccaaatcaaaccctagaaaggtcgtcaccctgtgccagaagaaacccaaccgtgggaaagatggttcaataacagtaaagggcaagaaggaaaatgtgt

SEQ ID NO: 45146 - DNA, 1276 bp, Cannabis sativa
taacatatatattacatcttgcttttcctccctaatttatatatgtatatatttttaaattattctgctggagaactaatcatattttataagacaatattattgtgtacgtatttgtagttattgtaaaagtcgaactaagtcaaacaagtctagctagcattgcatgatctgagctccgatttcaaacgaatcacttttagatagcatttgtaggagtacatattcaaagatatatagtacctcaatttcttcaactatatgtttttgcctaattttagccaagaatttcaaaacaaaatattttttttattttcaaagatagtattcaattttgttacttcctactttaacagtctttgtctaagttataatttggtcataaaaggtatctcttattatgcagaatttattaagtaattttttaatttgcatatatacactcaaccaagtaatcgattcaaatttggcaggttcattttatctaaattgaccaggtagctagctaattagaggttttttcctagagcaaacacattggacttatgctatatataattaatatcttataaaaataaaataataattcgataaaaaattgcaattgatattcctttcctagttcttgttatgatcggaaatgaaaatacatatcttaaagagaaaaagcttaataaaaccaaagttagctaatataattagttttataccttgatgtttcctaacatatttacaaacctttcttgtaaacaccccaattttttcattattggaatctgttttgaaaactttgttaataatttggtgaagtattttggttcgatgagcttgctagtaaggattcatttgtcccaatccctctcaaatttgtgacttttatataatcactacaacaattatgggctttaattagaggcagtagtgtaaaaatactcgcccggtttgaaattgacatttaaaggcggttttttggtaaaaactgtatgtatagaatttaattatatctatgccgtcggttgggggttggggtaaaattaaggattaataattaaccctatggcgtcggcatcggttatttggtattaaccgacgccataggtgcaaccgttattcaacacatggcacctatggcgtcggttaataccaaataaccgacaccataggattatatatcagacctctacagtatcgtcttcctcatttcacaacttgctgaacgtgaagaacagccagccatagcagccccaaacccatgaaaaaactctcgccaaccacc

SEQ ID NO: 45147 - DNA, 2144 bp, Cannabis sativa
gaacttgaaaccatgctagggtacagtctgcaaaaaaagaaaaacattgtagtaggtctatttaggtagaaattgtcgtattgaaaaagtactctaggaaactaaagacaacacagaactgagtagaaaagactgtagagggaatataatgcaaaggaatggctgtagataatattgcattgtgaccccgtcttagctagattgtgagcacaaaagttaaactaggagcataaaatgaaatcgtaacctaggaacctattcaagatgcagagagagactgttagtattgcttggtcagaaataattaacatagagaatgagaacatgaatattaaattgaaaagattttttttttttttttttgaaacaattgaatagattttaatgagttaaagtaacaacaactacaataataataaaattgaaatgaaatggtcgttcttatttttaggagaaataccctctgtcactaatattgataagaaatgcgtgtttcagcgttaaattctaataaagcaaatgtgagaatggaaacacagtttctacattattttccttaaatgtatgaataatacattgatgttagtgttagtgaagttattagttaggtgtgtggtcagtagtatgttagtttcattgtaactgtgttaagttatttataactttagttatttttgttggtagcttttttctttctcttattgtatatatatcgagcttcaactttattaatgaactcttttttcaccatttctttctttctctttctctacctaacatggtatcagagaagtttttttttagctttcgcattcgtttcttcatgacagcatctctttctctgcttcgattttagcttgttagtttgctctctgcatctctgtgattcttgatcatgacgactattccatcttctccgaccacgtccagtgttcaaagaactccgactcctctgtttcaactagtggtgttctcctataaactctccattaaatttgacaataaaaatttcttactctggtgacctcaagtcctctctgcgattcgtggtcattagttgatcaattatatctctgatgatgtcgttcctccatgaaagtttcttgatgagcttgatcagcgtgcgaaaaggatcaattctctgtatctgcaatgggagcagcaagatcagcttctatactcctggctactctcgtcaatgatagaaggaattctgactcttgttgttggaaatgaaacttcagcacaagtctggaaaactcttgaggtatatttctctacacacacctctgctaaaattgattagtaaactaatcaattgtccacgatcaagaaatgatctctctctttttttttttaatgattacttgctcaaaatcaaaactgtcgttgatcgacttgagtttgttggccaccctgtctctgttaaagaacacatttatgcgatctttaaaggtctgcctgttgaatatgatacctttatcatatcttttaattcacgtaaccaaccatacactgtagctgaaattgagtctctcttactctcacaagagcatcaaatggataatcaccacaaagaataaaattgttaatcttgcaactaatcgaccatcttgaggtcgaggatttggttttttcttttctaatgcagatcaaagatccaatcatgtggcttcttctgctcctactggtagaggcgaggatcttggaatccttatgcagttcctcctcgtgcaaataatggttttgctcctaactctatgactaaatgttaaagtggcttaaaaggctactagataattattcaacctatggaaagttctatgcagtttttggcattattccagtcatggattaactactagtgctacttcctgataacataaatatagttgccaaatagtaaagaatctaataccctaagaggattaaacatatagaaaggaatttcacaatatcaaggaatgtgtgactaaggagatgtaatagtagagaaggttgatattgaatatagcttgtcaaatactattacattgaaaatattacatactacacttgatcaggatatgaaggtatttagattgattgacttttaattttatgttagcgtaagtaggagttttttgagattttatgccctaaat

SEQ ID NO: 45148 - DNA, 764 bp, Cannabis sativa
aaaatctttgttgaaattactagtaagaaaatgtctctttagtataatattgttatttattggatcccatataacttaaaataataatttttaagaaatatcactaatcaatcgtaagagtaggacatcacctcttggtggtgctagacaccaatagtgctaacagcaattgctccttatataaatataaaaatgtgtaagacttatttatcagcagcacacaccgtttgaatattcttggaaataaaattacaaaattgtttgcaacaccatacacatattacatgacaaccgaccaacttgtgtgattgagtttaatttaaaatactagacttccatacattgaggtaccaaaatacaaaaaccatgtctccgaagtctaatcttgtcaaatatatccgaaattaatgagaaacaaagaccattataaaaaatatatatattttcatacaatggtttttttcaggctacatgcatcaatcattatgtttgttgaaaaacgaaaactagattttctgtttcaataactttgatatatgctgattccctttaaagactagtaattgcaaattcaaccaataccataatattgtctagtgtattactatgctaccatgttttattattcctttgcttaaattcaaaactctaattttatcactcaggtctagtgatatatataaatagtaattaatctgttttttatttttctaatcttttccaaagtattatattgggtgcctgaaatttctccccagattgat

SEQ ID NO: 45149 - DNA, 1992 bp, Cannabis sativa
atatatatatttagttttgatattatttttaatatgttattctgtgtttataaatttaataaatcaaatgtatataagtgtttaaaaaatgacaatcatgtgataaaaaaaaattttaagtgcaatctttaccgggtaaaatacatatatatattgtaactaaatacatgaaaaaaaaaattatacactgatgttaatatcttctttaaaatatgtagatattgagagaattaagaataataaaaaaaaaaacatcacgttaaagtatttttatttttagacagtctcacccatcgtacttcttatttatatatatatataaatacatatagatatatattatttttatagtattttattatagatgctttgataatagtaaaaacaaatcatatattactcatttatattatgtacacaatattttatagtatcattattctttgcttcaataaatatcttaacataccctacttctccataaaaccagaagaaaactgtgtgctttggtaagaatataaaactcatattcccccatatcatacagactatcagtaaaaattatagtattaacaagtaacaactattcattacaattatttgacttttctcgagactaaaataataaagagaaaataaattaaagtagaaagaattatttttcactttccaaaaagtgaaactttctacattctctgaacataaattagccaatcctcttatgccacatcagcagaaacattaatacatgtcaagaattggaaacagaggatttatactctcgtaactacttacttacctcttctttctctctctctctcttctccataaaggccggcgatagatgcataatactctctgcacgtctccttatctgcctatcattccttcctaaccaagaaaaaaaaaaaaattaaaataactaaaactcttacttcagttattacaaatcttactttccaaacctccccttcatttcttttattgttttttcttgattatctaccactttggccttaatcccattttcttctcaagtcattttttcttggaccacaagcgcacaactttcttcttctatagggttttattcctagtgtttttttatgtattgtcggttggatttgaaccctctttaatgcatgtttctttcggaaagacaagtatcccagatctttttttctctcattaagattggatattttggttatttggtcatctgggtctgagactcttctcttgagtggtgaaatacaaaaacaatggcgattgacctgtgttcggagaagtctcccgctatggtggtgacaagtaatggcagtactcccagaatctcgttttcttatgattttctccaatccgacgttgttcccatcgaacaacgccctctcagatcgaactcttccggtctgaactccagtattgattttgacttctgcgttcgtgagagctttagcgaagaatcttcttccgcggatgagcttttctctggtgggaaaatgattcccagtgaaatcaagaagaagatcgcctctgctccaccgccgaaacaagagatcgtagatcaaatttcccctcctcaagttgatcgaccattagtgcaaacaccttgtgtgcgtgaggagaacagtaaaagctccaagaaagagaccaataatgaaggtgaagagaggcagagttccaagtccttttggggtttcaagaggagtagtagttgtggttctggctatggaaggactctatgtcctttgcctctgttatctcgaagcaactcgactgggtctgctgacgagtccaaacccattaacatcaaacgatccccattgataccaaaagaaagttccaacagctctaaacaaaatacccagaaaagttctaacgcttctaacaaggtgcagtcgactgggtcttgacgcctcgttcttgatcggagatgaggttgacgaagagagatggggttacgagagagagtgggcggcaaatgaaatgggg

SEQ ID NO: 45150 - DNA, 2342 bp, Cannabis sativa
gagcattttttagatctgattttggtttattaatcgatgtttgttcagacggtatctcgatcgaatgtgtgagttttttttttatttttaagtttctattggtacaaaaccgacagacgaaggtataaaaatactattctcgccggttataaaagaacgtgagactttgatatcgactgtccaaaactaacgcagaaaaatatcattttgcgtctcctgtatatatgtcggttatgggaaccgacgataatagtataaatgttagttaaaaaccgaaaaaaaaaattggcctttttgtaatagtgtgtgtacgtccgaattaataacaagcttttcgggagagacattccacacacgatacaagcttatttgaaagtaccttttggattctatatgaccttctgcacaggactttttggatccacacaaagcttccagtgtcttctctttggattcacagcttccaattccgatgacaaaacttgtaaccataaccaaaacatctccaccttggtttcaagttgaagtctcttgataaaccaatgatttaaatgctgtcgtcccctcaaaccctccaagctcaaatgaatccaatcagcttcaggcaatgctcaaacttactgtttggcactaccatggctatcatatcagaaggattgtcttcagttggaactttggaaatcttcacagcttctttctccacaatctctcgtatgaaatgaagcttgatatcaatgtgcttagtacattaatggtgcacacaattctttattgattgaattccactctaattatcacaatgaacagtaataaccttttgattgagcttcagctcctccattaacccaattaaccacagtgctttctcaattgcttctaacaagaccatatatttgtcaatagcgccacaaccttctaaagattcgctttctaactaatagttgttccgaacatagtaaacacatatccagtcaaagacttctaggtatcaatacaccctgcataatcagagtccacatgcccttgataacatccaagtcttcatttcggttattcatgccaaatacaattctctttttagcagttcccttcaaataacatagaattcatttaagggcttcccaatgctcctttccagggtttcccatgaatctactcaccaccctctgtgcatatgctatgtccattctcgtacaaaccatgacatacatcaaggagccaacgacactagcatatggaactcttcacatatccaacttcttagtttcatcttctggcatctaactagcacccagtttaaagtgttgtgcaaggggagtattcactgtcttagagttactcatttaaaaggtgtctagaacctttttgatgtagctcgtgtgattcaagtacagttgtcttttctgcctttttcttcttatatccatgcctaagatcttactagccagaccaaaatctctcatttcaaaatttgtcttaagctggagctttaagtgcttgatctcttgtacacttttgttggcgattagaatatcatctacgtacagtaacagatacaaagaatctccatttgtctctcagaaatatataccaggatcaaacttacttctcttcagacctatcttggtcgcataatcatcgaatctcctgttccactatcttgaagattatttcaaacccatacagagacttccgcaacaaagaacacctagtgttcttttccatcttcttcaaatctttcagagtgtttcattagaattctttcattcagatgtccatacaggaaggcagtcttgacatctaatcgttctagttcgaggtcttgacacgcaacaagtgccaacaaaattctaatcaatttgtgcttaacaaccaaagaaaatacctcattataatcgacacctttagtttgagagaatgtaatgaccgcttaatttttaatccgagaattaccagataattagggtttaatttagaattacacttttaattatgatttgtgaatttatggagatatatttaaattctaggtgtgttatttatgttatatatgaaacttcatgtttttcgtattttatgtctggtaatagtggaacgcgatgtttgatcgatagtcacattttcacacattgtagtatcttagaaatggtggggcaatttagatagacatttgaaatgttaggaatattggtgattttagaattgaccaaaatgcccttaggtggcaaagttgcttcttggtgaagcaagggcaaaatggtcttttaccctgggttagcttttgtctttttgtgagttagtgaattattattaagttttgtaatttgatttttattaggttt

SEQ ID NO: 45151 - DNA, 3638 bp, Cannabis sativa
gggggggggggggggaggtccctttctttctaatggatagattgttgtgttggaatgtccgaggagccaatcatcaatccaaacaacaattaataaagaactttattaattctcaaaaggttgatgttgtgggtctcctcgagactagggtaaaggtcccaaagcttggggtcttgtactctaatgtttttgatggatggtgcttctcttcaaacattgcttggcatccgggaggtaagattacgattgcttggaatccttatagatttaatgttgataccatcaaatgtactagccaactaatgcatttgaggatttcaactattgagggtttcaacagtttactcacggttgtatatgcttccaacaacaagggagagaggaaagtgctttggaaggacttgtgtgagctatattctgatggaaattggtctgtgattggggatttcaatgatcttttagctaaggaagagagggtggggcatagggtgagatcctatcctgattctgatttccttacttgtgtgaattattgcaagctcgaagatgttaaatctagtgggaattttttcacttggactaataaacaaccaggggctgataggatttactccaagatagacaggatcatggccaatcaagcttggattgataaatacgagtttgctgaagctgtatttgttaacgagggactatttgatctttctccagcaattctttccttgcatcctcatgtggtgggggggaaaaagccgttcaaatactttaggatgtggaaatcccatcctaagtatgattctatgttaagagatgcgtggagatggagactctcgggtagccaaatgttccaggacgtttgtaaattaaagctattcaaagagagattaaggttgttaaacaaggaagcctactgtgatttgcagcagcaggttcatgaggccaaggcagctcttgacagacttcaaaaccagctgcaacaacagccccttgaagacagcctacaccagcgtgaaagattagcccgtgagagtttacttcaaaagcagcaggattactctttgtttttgaaacaaaaagctaagatggagtggattcaagatggtgacactaattctgccttatttcatgcttgcataaagcatagagtgaggcaaaaccgaatcctatccattgaaaaccaagagggcagcagagttacagatccagaactcattacaacagctttcctagacttctacaaaagcctccttggaaccaaaagatatcagacgaaggtagtggaaagaagcattctcagcaatggtcctttattaacttcaactcaggcagattggttattgcaggaattcacaaaggatgagataaaaaaggctgttttcagcatacctggaaataaatccccgagttcagatggcttttctagtagcttctatcaggacaattgggatcttattggagaagatatatgtggagttgtgcaatcttttatgaattcaggtaacattttgaaagaaataaactctaccataattactttggtgcgtaaggttaaatgccctaactctgttaaagattttagacctatagcttgttgcaatgtgatttataaaatttaaacaaatcttttgagttctagaatcaataacatccttccttcaataatatcacggtctcaaggtggttttatcaaagggaggttcataggatatcttgatatgtcaagatttggtgaggcattatggtagaaaggaaaataagcctagttccatgattaaactggatctccaaaaggcgtatgacacaattgagtggagttttcttgaagagatgttagctggtttgaattttcctctaaaattcattcagctagtcatgaactgtattacaactcatagattctcattgatgttcaatggagctctccatggtttctttgaagcaaaaagggaaattagataaggtgatccgatttctcccttactttttgtgttgggcatggagtacttatctagattgatgaagaaagtgagggaaaaagaggggttcaaattccatgatagatgtgctagtttgaagctgaagcttttgtttgttgatgatgtactattattttgtcatggggacttcatgagtgtcttatacatgctgcaggctttaaaaacattctcactcacatctggattatatccaaatgccagcaaaactgccgtatactgtagcaacatgcagcctgatgaagtcaaccacattatgcagatatcaggtttcatcagacaggagttgccattcacctactgggtataccaatttgtgggaaaaagatctcagggaaagaatgtgatatattagctgagagaatgactgctagaattagaagttggagttcaaggaatctttcttttgttgggagaatcaccctaattaactcagttctcattgctatacaagcctactggagtcaaataatgattcttccaaagaaggtattgagatccattgaagctatttgtagagcctttctctggaaaggtcaagccatgttccagggtgcagggtctgttgcttggaatagtatttgtcaacccaaggcagttggaggactaggaatcaagaacttgaaagcatggaacaaggctgcaataagtaagtacatatgggctatttcaaataaacaagagagcttatggctcagatgggtccatagtgtatatattaaaaaccagacttggtgggactattctcgttccatacactctagttggtattggaagaagatggttgccctcaaagatcaacttagagatttggtagattttgatgcttttcagagggagaagtatagtgtttcagcaggttgtaaactgttctctcccccattatcacggctgtattggagctaggaaacatggtcaaggcttaacactcctaaacatagtgttatagcttggttggcaattgttaataggctgaagacccaagataggctgctgcggtttggtattcaggtgcaggggacctgtagcttgtgtgaactgcagttggaaacttgtcatcacttattttttgagtgtagtgttgctggaaagtgtctacaggacttgaagtcttggctggactggcatgctcaaaccagcagcctccaacagctcctcaagtggattgggaagtccaaattgtcaaagtttaagaaaggagtcctctcggctgctgttgtaggactgctgtacaacatatggagagcccgaaatgaagctgtgtggcaaaaggctagagtaaacccgagccgtattgttgaagaaacaaagtgaactctcaagattcggattgatagggtaatgcctaaaaagattaagaacaatgatagagattggtttcttgctttgtaaatcataaaatcaatattgattctagattgatatattcgtgtacatagattttggccctttttgggtgcgcatagattgtaaaaagctagtttggtgcaatactattctttgatttatcaaaaaaaaaaaaatacaactaaaataaacaatttgagaaaataagatatttgatggttaggatattatcaattttatttaataattaaataaaataaaatatcctgtttgaaaattttatggttagaaacccta

SEQ ID NO: 45152 - DNA, 1925 bp, Cannabis sativa
tttaacaaacgcaataaaaataaaattaaggacaaacaagaactttctcttttgaagtataactatggtagaatgcaatgctataaagtgttcaaaccgtttctatttatagacttatcactctcatttaattttattcttcaatactttagctgttactaatcatcaattagacattcataaatatagattagcaaaagatttaaaagttaaattagatgtagggttggccctgaactatagtaggtcataaaaaaaaaataatttaggcctttatttaaaaaaatgtagcatttataaaattagtaaaattaaaacatgtatttttaaaagaatttttttttgaatccttaggtaggtgggccttagggacaaacctagcctgtttatgcccgtaattaagcttgatgagatgagacctaagaatcaagcaagaaggtttgcaattttcttttttcaataattttttagctataattaaaaaaaaaaattatattagaacaaaaataaaagtttgtagaatttgtgaaaaaaaaaaggaaaatattattagtttttaatggagaatagaaggtacaagcgtgcgtgtgtttgatatagaaccaataatggaggctcctaagtcccaccacaccaactttttattacttctccattctttctttttttcttttcattttttattcagtaatttgtgactaaatttaatttttagtagtaaataaatatttaaatttaatttttgatgataataatacttaaattatatttttataagtttcgtaagtacttaatcatttagtgttaaatcaataatcacttgttagcctttgtttgttccaagttattaattttattttttatttaaaaattaatttaagtatatcaataagaaaacaatatgtggataatgacttaacacttaggtacttacggaagtttcagaaatataacttgagtattattacggtaaaaaattaaatttaagtatttacaccacaaattactcttttttattctaaacaataaaagtatgcacacaataaggttcttaaactttggttttttttaatacactttgaacaataatgttatattttagagaaaatttatatttattaatttaaatacagaataataattttttcgttggttaatctttgattcttgcataaatgggaacaaattactatttatgctaaaagaataagtttatttataacaacgaatgtcaaaaagtgagatatttaacgtcgattatttggtaatcatcgaagagaaaataaagactttgaaaaggagattgggtaggggcaaaatctttcctcttctattattataaaaagttttttggcggttagaccctcacaattatcgttttacttacacttaattctctaagcaaaggtggcaacttgtctttactagtcgttttcatgtcatgtcgaaatccatgtataatatgtatatgcttgatccgaacacgatccgtttaagaattgtggcagaaaataaaactcaaacacgactagtttataaatggattgacacgagacgacccatgtaacccgtttataagtatattgtatttaaacatgtcaaccaatacatttatgaagtattcaacgcgattataactcattcattaatgatatattaaagtattaaaaaataactttaaataagtcattaaagagtcattttcgtattagttgtgttaacccaaacacaaaccgttaattagatgagttaaccagaacacgacccaaactcatttaaggcaaacccaaactcactaattctcgtgcgagatttgaatcgtgttatcatatctggttcattttatcaaccctactttcaagcagaacgttaaaggagaccgatgtataaaaaaattcaaatttatgtatttatttttactgaac

SEQ ID NO: 45153 - DNA, 1284 bp, Cannabis sativa
gtaacaaaaattttactgacaacctaaaactattggctacaatttctcttgtcgtttttttctgggtagtgcttctgaattaagcattctatagtttttgagtttcatctatttgaactaatcttagtgtctcattttagttgaacattgtataatgtactaaggttatactaagatattatttttgttataattatgattagccttatggttttgactatgcaagcggaaggaagatctttagtgatgtctatcaccaaagtagtatgcatcttcctcatcacttcacatctcaagaaataacacacgctttggaacgcctttgaccaaccgctacgactaccaatatctccatgtttatgaagcaaaatttttaaaaacagggaccaaatctaaaggtatggaataacctttaaaatcaacaatttttagtgctaaatcactagcttttattttcatcttatttagtaaaactagagaatgttagaacctcatcaattttggaaccgaaattatacttaaatcatttatagtagtgttttaaaaaaaaaaaccaagcgcgattcaaaagctgatagagcaaactatataaatattacaaaataaaatattctccaacaatatatgaaagtaaaatcattgtcagatcattttatttgattatggtctcaaattctcttaatgggtttctcagtaaacaatcgaatcaatccaccataatgttagaatgggagaatagtaaggtaagaagcagagtgtggaatcaaacctgagcaaccaaatctctgcctgaggaaaactcgcaccaccaacttcgccagaatcgaaccactagcttcaccagaaaagggaatcgaaccctaacttcgtttgagaagaaaatctcacctgccttagaaggaaatgagtgaagatggagaggtgaagatggaaatggggtttagaagaagcttagcctgagaatgaaaggggtgaagactgaagaagacaaagaggtgaagatggaaaatagttttctatacctagaaaaaaataaaagaaacttatacataataatttaaaataaaaaaataccataacttacttaaaactaaaatttatccatatatatctaaacatttaataaaaatccatagtacaggtaatttccactaacttttataaagaagagaatagttcagcttggacttttcatagtctatttacaaagggaaatttcactatttagccctaataaaataccacatatcaaattttagaccccttactaatttgtaaaaacaa

SEQ ID NO: 45154 - DNA, 1598 bp, Cannabis sativa
ctaatccccaagaagaccaacctcagcatataaatagatttgtgaatcaacaggctgcaaaaagatatgaaaaattaaaaaagaggggtatacttcaggagaggggttttgaatttcaagaacaactttttataagggaccgggggtatgaaaccattagaggagaaattgcgcgagaagacaatggcagaggttatgtgctgcagagcacgtgggagaagctaatcataatattgtgtgtgcattctttgctaactacccatacagaggagacaataatgaagtctatgttagaggagtacatgtgccggtcactatggatgttattaataactcgtttaaccttgtcacactgggagaagagcaagatgaaagacgattagcactgagaagagaaaccctcactgatgaggccattgcaacagtgttgggtaagagggaaccatatttcatgttgagggaaaccagaaccaaaagcttttctaccggtggcagctcaatccggaggctaaagcttggacatattttgtcaactccaaaattatgccaacgttgcatgcttcatcactatactatgagtgttgtgtcatagtttatgctatcatggccagaatgacattcaacactggatgggtaattttgagaaatataaattgtgtctctaaaatgaagaccaccacgggtacagttcatagtgccctgattacagtattgtgctcgaggcagggtgtgcatataatagaaggagacattcttaaaccacccatttaacccatcctaagacgacattgctatgatttccctccagcatcgttgacacccccagaagaagcacggaaacgccaaaagggtgatgatgatgatgatgaggaagaggagcaagcaaaagcaggagctagtgagatagtgccgcctcttctccggattgaaccaccactggagtcccgaacttagggcacctacgatagactgaattaccttatcagacaaaatcaatatcttattcagtccaaccaggcccaagctgcttactataactcttatctgagcagcagcatgaatttgctcaaaggcaagtgcaggagttgaattctgctttctctatgtggagtatggatcctgatactcccgaccacttctcgcagccattgccatggtacccataccagccaccaccaccaccaccaccactgccatactgatgtggcgctcaggtaagttcctttttctctttctttaatgtcaaattggggacaatgtgtcactttagtttggggggtgaacttattttatttttttttgctagttttaacatgtttttttttagtcttttaaattttaatttttagtttttattgttgtgagtcaattttctaatatgagttaatttgaaagtaggtagataacatgatttgaaaagttcatatattttttcaaaatatttgtgtgcttggtgatattacattcttgactaagttcaattttgtattttaaagaacatggaatcataataggtaattttctagcaattgaattggtttatgtatgctaattgtgaaatgtggaaagttgtttgaaaaattctagaacttgcttgc

SEQ ID NO: 45155 - DNA, 2552 bp, Cannabis sativa
atgcattcggaacaaaataagcttttgtattatgtaatgtctaattgcttaacttgaattatctatattttctattatttaaattatttacaaatatataaaatataatatgagataatatattattttagatcctctactttttttaaaaaaataataataaagaaaatgcatatttcatattttttatttattcactaggtcatcaaaatgatcagaaatatgttaattttggaaggaggttgatctttacatagtttattttttaaaatatatatacttaaaaaaaaacaaatttagagaattatatatttttaaccaatttataaataaaaaaaaaggtaaaaaactatttttttaaaaaaaaagtgtaagcatattttcagtggtaaaaattgatcatttaaaatattagtatttttcataaaaacaccatttttaattaataacattgtacatatatagatacaaagaagatgaggtatcaacatcatttacttcctcaccataataaattgtgactgaatttggacattattaatttacaattatttatttgtagttttctttttggtttttccagacattttatacattgatgccaacttattatgggttgggggacatccacacagataggcaacatgatcttcaaaatttaaagtagtgaacaacaatttaatatatatacttatataattaatgagtaatgatatctcaactcaaaatatgtaccaaaatattaaaatccccaattgacactctcctcatgtagggtctcgggagtgtcacccccaagtgttagcttctatatatcccggaaggtgatcaacgaccatgtcacaccctcggaataccctcatcgtcagtgattagttcaaatattaaaatctcacaagaaactcaaagatagttacaaatccacaaaaatagtgggatattatcacaaaaattagacttcaaccacctctaaaaactaaggagacggttgagatagctccgtgttggtcgtgactattgaagcgagaagcaccgacctttttccctaaataaggagtcacccatgacctgaaaaaggaaattcgtaattttgagcacttagagaaaaaaacactcttttattctttgcattcaagagtatgttcttgagttttgcaactttgattaataaaacacaaagggtaaggctattaccgacatttgtggtcgaacttttttaaattccagtatctttttttacatttattgtaaatttcgggatcattatttatatttattattacgattttagtttaaatttcatttattatgattctgctatcggttgcctaaaaaattagtcaataaatatgttgttagaatttttgtcctatttaatgtaaactccttagttaccctatttttgttaagcaatgtcggcgcatgtaattgattatgtccaatttacctattaattgaaatttttaaaaaaaaagattttttttaataaaattaatattaactaaatatatacaaaggtttaatacaatcacaaatataaatttatgaaagcttaacaaaaactgtactaaagttaatttatatattatatttaaaatattttcaaaaaaaatatatattatatttaaaatatttttttattgttatgatgttatataattttagctagagctactttattttaacacgaatcttttatatttttatggagactatattatacgaaagcctttttttttttttttgaaaattgaaagttattgttataattttattatcaaattaagatacaaagaaagaaaataaaaactctcctcattctatcaacttaatggttattgataaaaagttagaaaagtatacttatcaattgtaataatcaatgactaattaggtgagcaaatacatgcatttttttttaaatatatatacatttaatattttttaaatataattataaggagttaaattaactaaaaaaatttaattgtttgatttgtttaggaaaaaaaaaattggaaattgatatatagaatgttatccaaacatacattaattgggattaaaaaatcaataatctttgccatttgaaattcttctactaataatggagtattaccttttcaagataaattagttcaccaaatagaacctaaccaaaattgaatatttatatatatatagcttgaaaagtaaaaaaaaataattaatttttattttcgtaacaaataaaaaaattatttatgtatgaaaacttgctaacttttggaggagcgtgggtatgatttaacacattgaactaaagaaaaagtttgtgaacatattattattggatagtgtaatatatttattgtagtaatgataataaattaaagcagcccaatatctcattctcttctctttttatctcatttccattattaatttatttgaactcctatataaagttctttctatctcatgatttaacactttgaactatgaaaagtactactccacacatatatctatgtgtacatattgctctctcaatttataaaatcatgttacat

SEQ ID NO: 45156 - DNA, 1269 bp, Cannabis sativa
aaattcaagaaagacattgttatcttctgttagtttagaaacactaaccaaattctttttaatagaaggaatttgaataacagaatttaatttcagtgggcaattattaaaggaaggtaaagtagctgagccaatgtgagagatacaaattgtcttaccatctgcaacagcaagagtttctgggccagcataagcagtggctgcatcaagtgtttcaaggttgttggtgatatgagttgttgctcctgtgtcagcaaaccaggagagatcatcaccaaaatcgggaaggacagttggctggtgtggttcagtctcatgttcacattcagtaagataagctcgtggagcatgaaaaccaggtttcggagtagtccaatttttgtcaaacctgtaatggcagactgctgctgagtgacctgatttcatgcatacttgacaaatgattcttgaattggtggtggagccacggccagatcctctagcataagttcttgactggttttcatagggaacaccacgaccttggggcaaagaaggtctggagtaatgatttcttgatgcaccagtagcaagattagcttgcagcttaacatttgtatccagaactgtatgatgatgatccaaacgactttcatgagccatgagtagagcttgaacttcttcaagtgataattcatcacttcttgaggttatgttggaaaccacgggatcatattcgggtcctaatccgtttaacagttgaagaataatatcttgattttcgacatgcgagccagctatggagattgaatcagataacatctgaactttatctatataatccgagatagagaaagaacctttttgaatgtgagaaaattgtcctttgagttgaagaagacgagcacgagattggcttgtgaatttttgctccagggctttccaaacggagtaagaactggtgtagttggctacggaggctaggactccttctgtcattgaggatcggagccatgacagaagaagctggtctcgttttttccacatcaagaattgggtgtttggaacaccagtaacaagaaattcagggggaggaatgccggtgaataagatatcatcaaggtcatgtcctatcacagtaggaaccacctgagatttccacgcaaggaaattcgttcgatcgaggcggacagtcagagaagcagagagagaattggaaaaaggattccaattcatcgtggctggagcttgatgatgagcagcgggagtagattgatcagtgggaatacc

SEQ ID NO: 45157 - DNA, 1349 bp, Cannabis sativa
aaatctgattatatagaaatgagttttatttagggcataaaacccaacacttctaggaatgtactatctcatccttctgatctcacggtacaagatatgcttttgggtaggccttgctaaaggcagaaggctttgcgagtgcagaaccaagatacgttcctagaaggacatatccatgtgggctttgccctttttacccccgctgagagtcccactaatggatctttgatgctgacctagagtccatgtgtccactactggaaacgcgaataacattatttaaaaccaagacaaattttagtaatacaccttcttctttgcaattttgttgtgggtattgcgattttgttgtgggacttgcaattatctcttatttttgtggttgaggtttcatcagaggtcatgggtgtcattggggtggctaggtttcaactaggtttcgtccggttagagtggtggtggatattctcggtgagatttagagagagagagggggagagttagttgagtgagagggaaaatagagtgagagagacttttcaaatggggagggtatttttgagttgaagagtttttggagtattattttcctatgttttctaatgtaaatattggaacaccatacaccaactttaagcatgaattatcaaattttccttgtcaaaaatagcttggtcaagtttcaataattgttcacctcaagaagtgattaaccgatagcagaatcgtatagatctgatgcttgccacatgttacacaaacaaaaataaaaagtaataaatacatagatttgttatagaggttcggtgcccttgtgatagcgagtgatgacgtactccccttttagttgtgttaatactgtgggttaatgctatccagatcactatagatgggatctgctatagcacccttaggaatacaatgtatgaatcaagaatggaagaaatcaagtaatattgcttttatgggcatgtgagagaggaagtgaagaagagagaagttgtcagacttggcttagagcttggaggcaggtttcgtgcttagattttagcttaggttttctaggttagagttaaggccattaaatagaagtcctaaacccaagattacaacttgaaacgctagatatttgtatattttattagttaattacaaaagattaaaatgccattgaatgtagatattatttagctattctgctggccttttagggcccaattcgtagcccaagagttattgtccacgtgtagaagtgcacaagaaaccctgcagaacacctcctgttcggccaagcccctatggagggtatactggccagcaatggtgcaaccctcacaggggctggccgg

SEQ ID NO: 45158 - DNA, 3423 bp, Cannabis sativa
tcgctaatgtggattttctgacggtttataaccgtgccctatactatactatatgcgcgcgcttggagattacttgttgtccaagtatttttcttcttcgacctctctcattaaaatacacataactctcacgtcctaactccatatgagcttattcaagtgtgttgaaaaactgagaaggagatctaaaacttccatatatattttgactttttgcaaatatgatcataacttgatcgattgcaagcgtgaagtttcattttgcattaataatcacaaatagagtgtgttgagcatcccaaaatttgaaatttgcatcccttatgtcttagaactccaaatctcttgataagttcatcatatttatcttatttaacgtgtttcttttcattctaatacctataatatacttcactattaaaatctaaaacaagtaaaaacaaacataattatgcacaaaataaatgtaataaactaaaacactcctctaaaatacttcatgaacacttaaaactagtctatcaattataatggtattataaggtgaaataactctcttggagtaaacatctcaagaaaaaaacgatcttgcaatatctataaaaaaagtctgtaagttaaaaaaaaaaaaaaaaatagttgaataagaatactttttgaatgaaggtaagttcaaattttgagctaaaccattatgattgtattttgagaaatttacacaatatacttaaaaaggatcacattgtttacagattttcacatgtttttttttcagcaaaaaatgttgtttttctatagcatcaacgtcaaaacaacattattctaaaacaacactttgtatagttgtaaaaaaaattgtgttgttttctcatagaaacaacagtcaaaaaacagctttttgttaataataaaaaaacaacactttgtatttttgtaaaaaaacaaaatccgtaaaaatattaaaaaaaaaaaatagtaatttcgtaaaatgtaaaaattttgctatttttgtatatttatgaaataatccctcgtatttttttcgcagttattgacatgtctactatattttattgagtatggtaaattcccccatcaacaattgataaatgtatacccactttcctttatttgttttaatttttaccttcatttttataccctttaagatatatccacttttatagatgatgtccctattagatcccttagataatgtaaattatatgctacacttaagtagagagtgagggtgtattgggcaatccactcaaaaaagtgggtatatattaataaaatataatatgaaggtatttttgattaatagataaaaaagtggtatttttcagcttatcccttttgattttgtataaacttgagaatgaacgatatttgggccctaacttccacccaaaatatattgaggcccaaccaatactaggcaggaagaaaaaacatgggcctagcttattttaagattgatatatatatatatattctaataagtaacactttatatacaaatattgagaaaaataacaacactatgtattaataagcaagtcatttcttctacaattttataagtctctttctttatgcctaggacatgttacttttttggcataacctactaatttagaacttaatttgaaaagataatattttgaagtttgattttttttaaaacaatataaaaaattataaagataaattttaatatagaatcctggatcacaaatcacttttttgctctcatcactttctgtaaattatttgaatatacatattaattgtcattaattttatcacaaagttactactttgttctacattatatataaaaaatatatattatattattaagcaatttaattagtatggttcatcatgaatattaatcaaagacatgttactttgcaaaaccatggtcatgaaattacatgatggggccagtggtattattaattattatatgaaattgctaatctatatcatcaacacctcttttggagatattattattttagtaattttttttcttttatatacaacaaagtcaaataatccatcttgcatatatattttcaaaaatatcataagatgaccgacaatatataaaaatcaaaactatattaaattccaaatcgatcagattttgtttacttagtcacatcatgtactatatataggggcaaccttttccaataatctatttatccacaataaataacatttatgctaaattgtttaaagagtcattatatataatgaaaatgggtttagtaggttaggttaggatggttgaggaatactttgaactatatatttaccgatatatatgagatcggttttaatgattacattaaatatgtaactgtacgtaagtatatttattatagttgttagatcatttttaaatagttgtgattaaatatctaactatggtagttatattaatagtagttgttagatcatggtataaagggttgtgatcaaatatgtaatgatcacggaagttacgtttattatagttcttggatcattgttaaacaagtgatgaaatatgtaaccacggtgattatatttatagtagttgttggatcattattaaatagttatgattaattaataaattacttgatagtaatttgattttatttattttttataaataaaaaatatttatatatcagttgtgaaaaatattttgttaaatattttaattaaacaattaatttattataagtatataattaatttgagtctaaaaataaaatttttgtctatgtcaataatttattataataggtcaaaaaatatatataattatcatagttacatttttaatgaaacaataaaattttaaatttaattaataaatgaaaatatttagaatgatgttggaaattttgcactctagacaaatatttaacagctttttattagtgtaatgtattaaaaagatcaaatcacatgttacatcaaaatatatatatatatatatatatatatataatagaaccctaaataaaaaattgttgaatcttaattaatttgcaacattattgatatcaaaggtggatcgagaaaagatgaacataatatgaacttttttctttgtaaagggaataaatgagcatgttaattagctgtagacaaatgcagttgatttgctgattaaatttaaatgaaggttatccttttccaataaaaataataataaaacaaaatctccctattgtggatatatattacattatgaaaatagtgtaagaagttattagtaatttgtagttaatatcaaagtttatatataaatgtaattgtgtagttttgattagatattgaataagaaaatagaattttaatttaaccaagaaattgacagtatgtctcaaagtatattttgaaaatttatca

SEQ ID NO: 45159 - DNA, 1800 bp, Cannabis sativa
acaatttaagagcacattagataaactttttgtgctcaaggaggataggaacattttttctctatgtctacttaacaagagcaagaataaggccacaaaaactaattccagaactagatgttaattgacaacaaggacttggttttgaaactaatcctaagttcaaagagtggattgtcaatgaccaactattaataggtttgatctatggatcatggattgaaagcattgctatacagatgttttggaatgctcatcttctacagagttatggacattttagaagcagtgtttggttctcatttcgtggctaaaattgatgaatactacacaaaatttaagatagtaaagaaagggtcgacggatatgactaattacatcaggcaaaaaaagcaatgggcagatgttctggccttggcaggtaaaccttgcacttagcctcttcttgtcacaaatgttatatctagttcaaacatggaatacttaatttcctatagtgttgtagactgaagtatgacataaaataacttggcaaatcttacaggacattcttttgagtgttgctagtagggttgatagattggactcactttttggtaacagtaagtgctctaatcacttcatctactgctaatcttgtaaccaaaggtggatttggtggtggcaactacagtctaggaaatagtagtgttgacctcatatttggcaaactgacaacggagtagtatttattactgatgcttttcacatgttacacaagaagaacagaaaagtaaatgagacacaagatttcgtagaggtttggcccccttagttagcgggtaatgacctacttcccttttggtaatatcagagataataccactcagctcacaaatattgtggaatttggcatgcctctcttaagattacaatgtgagaatcaagttggcaaatctcaattgagagcgagagtacgcctatggcgtgtgagagagaagggaagagagagttgcgttttagacttaaagaattagagttttactaatgctatttttatagtagagcttacctatagattaaaacttaaaaataggtaaataaagctatatttaaacaattaaataataaactttaaatgacttaataataatccctgaaaaataggaaagttgctaatattttcccctattttcgtgggttgtgaagttctctacttagcttgttctccacgattgaaggctgcgcaccaaaagcctaccaggtaaaaggctggttggccatgcacttgctaggtgcaggctagccggccaacccccttggggtggctagttcatcatttcttcatccctctcggtagtttgaagtttgtagtaaaggacttggccttcttattgatgagatgtactctcaagtggcattgatcttggccacatagacatgccacattaggtgaaaaaaaatcgggataacattttccccccaagtccctatgcagaagtctatacgaatagggactttctagcttagtttggactgatgtagccttaacatggcagatcttgcagtatatttagcctttcacatattttctcttgtttgtctaatcacatttctcagtagcaaatcaataacattacacttctgcatttttaatgatgcatgttgcatggcaagtgagagagggtcccacagaagctacataagctcatgggagtaactcacttctcatttatcacattttattctctctcttcaaaaagaaagtttcgaaagtgttatacccaaaattcggctagcacattagaagaagacacgtgt

SEQ ID NO: 45160 - DNA, 1842 bp, Cannabis sativa
ctctctctctctagatctctgtgctttcttgttatcagcaatggcagacacaaatgatgattatgaattcatcaaagaagaagagggtttgactttgaccaccttcaagaattcatctactgatataggaggttgtcatgaatatcagaatcttgaagaagagttcaagaaagttgatgatcatgatgatctcgaggattactccgatccattatacattacagatgatgattatgatgagagtagctatggtgcttatgaattttccattccattgagcaggaagcttaaactgataaagcattactaccttcctgatctttctcaagaacatgttcaaagagaggacaagttcaagtggctcaagcaccgaagaggtgaaatattccaaaaggaaagtgacaactttgatttagatttgagagtgaagaacgaggatgaactcaagtacaagattcaagaattgatggaagaaaggctgagagggattgagaaagctcaagcaaatggtaaatcgtcttactttaattggtttttcattgatgattggcaacttcattctaaaatcattcagactgcgtatagtctttgctgccatctatgcgagttcatatttgttgtcttgaaaaattcaagacaccaaagaaagttgaaactctttaaggatatacttgagttactaatggaaaatgataagaatactaagatcatcaagaaagttgtttcttttattgaaaaagctgagactgagcttgtaatgactgtgaagcacaatcatttctatgataaagatggtgatgaagatgacatggaggaatattttgataacaactttgacatattcttggtggaatttatgtgtttggagtcgatgctgagttatccgagcctgactaatgattatgacactgcaagagatgagctcgcaaatgatcagattgttgttacggaatttgataatgaagttgctaatattgaatctgaaatgtgtgctttgaagatacagtttctagatgaaaatccaagggacgaaccgatgatggagcaatttctaataacactaaagctttggattgcgtcactgtggaaaaacttagaaggtgaaatgcactagctacttctgctatgaaagcttttcttctgttttgatgtaaactctcattcttattgctttgatttagaagcagaatttaataaaattcgacctattaatggtttgatcaaattaagcatgttggttgcagctcttaaaaatcttaataataggcttttcaattttctttccaaccatatactcatcttcctatcatcatggatatgaagcttattatcttcttatgtgtacaacagtttcacatcagactcattatttgatcatttgattattctcagaaattaaactcttccagttatttcaatgtcttgtgatctttactttttttgtgctattttattaattaatgagaaacatgtgtagtcgatcaagggtagttttttttttttattcaccattataaaacacataaacataaacaatgatatgatactactatattttcattatcaaggctgctggtgtaaatttgaagctcataaagtttacatcaattgatcttggtaattaaatttataaatgaatcatttaatcttaataattttaaatgaatttgttaagccattagttttcttatcattttgtgatatcatgattaacaatcaagacaaacaaacaagagacaaaataaactttaagcaaggttttcatttttatgttataaaaaaaaattgaaactgtttttgagacttccattttgctatgcttttggtttagctttgaaatta

SEQ ID NO: 45161 - DNA, 1411 bp, Cannabis sativa
cggatgaatgaataatgatgtgatattataggtcgtggagagagaggctgaagctgggggaaagatcggtgatttagactcctatgagattgaaggtggtgagacaaagtcagaagttctccagaatctgaccgagttccagttttcttgtgtatgtctctttttcaacaaaacttttactttaggctggccatgagtacataaattaggagaaactattttaaagtttcgagccatgatatgaagttaaatttaaaggcatatcgcgatgcacttttttcatcacattaaatgacttttggtatacctactttgaattatgttttttttatagcgtaaagcaactataatctgcttaagacattaggcacccatacaattggaacatcttaatttagacattaactgattcctgaagtttctttatgccttctgttaattcgtggagaacagttgttttttttattgtgaaaagtatctttttttaatttattttttctcacgaacaattttctatccaaatgggttgaatatcatgaaatgtgaatctgaatccttaatggaggctattaagctccaatttagctgtgagtttttggcatggttggtgcaaaactagtattagtttttttgttaaaggatatttttctttagtcaaaattttgaactggttatggtctgcatcctgtctttaaaactattcaacatgtctatcaggtcttgttcaacgctgtgatggagaatgcttgtagtgagcaaggggcgaggatgtctgctatggatagttcaagcagaaatgctggagaaatgcttgaccgtctcacacttacttataaccggtatatatggctctttcacacttttgacatacaacttttaaagcttttttgtgtggctgagatgggtgcttttgggaccatagagacacaataactgccaattattgttgatggtagatgaaagtgatgttaagctgagtgaattcgtctagtttgaaaacaaactagatagaatatagtgtggaatgggagtgtcagaagctttaatcagtggcatggccaagtagagatatagcaaaatacttggttctgagaaagaaagcaaagggttgggagttattacttggttccttgagttgattgaaaatttgctcttgcccatccattgtctaactgagtgaagttccagactagatgaagttggggaaaacaatatttggagatcctactgggcaatggtgtttttagtccaagttatttttatctgaatattcatgtatgtgtatatgtgctttctcatgactgatcttgtttttaatattgtttacagaacccgtcaagcatctatcacaacagaattgactgagattatttctggagcatcagcactggagggctaatgtgtttagaag

SEQ ID NO: 45162 - DNA, 1061 bp, Cannabis sativa
acaaatgtcctattctgttggaaaaccctgatcccgactctactctatcccaagaaaccatgaaaaaaattcatttttaggtccaggtcacaatatcccgttctccagacggtctgtttccttagccaaattgttgggtcaaattgtggcacccttctcgaagttcatcaaccctctctacttgatacctggggtttatatctccgaattcgcattatgtttgatgttaccaaacctttaccccgtggtctccctatcatgtttccaggcctaacctgcccaacttggctggaaatgaaatatgaggacattcctgatcactgctattactgcggccgcctaggacactcttatccttcttgtactgagtatatgagagcctcagatgagtcaagccagcccccaccccttccctatgagaatgtcctgcatggtaccactcatcaaaacaatggtccttttgggctccttcccaatccttctcttaactccataccctcagcatctcaccccagtctccctacactgaaccccactacaaacaatctgataccggtacaccaccctcggggacaagtcttgcaacaagatttctctttccacaataaccatggaaaccataatgatactgttggcctatttctctctccccaccaaaacttgggaaactcgctgctcacggatcatgtggtaggatacttgacccctagccaaactcaatctcctgtccccccaggccccaactttgttgcactcctatctgttgctagtggaggcaatttatcttgttctgtttcccccagcagccatcaactccagggtccccaagttcatcttcaccatcatctagtcagctacaagcccccctgatgatttccacttcccaaacccaactggagtccctccctgttgctaacattgctgacatccctactccttggcttttgctatgggcagtaatgatgctccaccttgccgccctccccagaaaaagaaccaaccaacaagtgcgagtggtttcaagagacaattggctacggttggtaatgagcagagagaaa

SEQ ID NO: 45163 - DNA, 2716 bp, Cannabis sativa
aaatattaaacaataacaatcgaccaggttacaaagtgtcaaaacagctgtaagatagatcacaaaagaaatcaaaagtgcaagagaagaaatctgctcctcatctgttccagcatagaatcatcaatctatttataaggggtaacgttagaactgatcccatgacagaaaagatagtaatttttattcaaaaagtttcactcgtgtaatcaaattaaaagcttttctattggaagcaacaaaatagatagaatgaagtaaagggttttctttaatattcctctttcgaagttatctttcgatacattttacacccatggtcaagtccaacatttatgttttcccattgcagtggaaacaactggaccagaaaatacagttctagaattgtacaaaaaatagaaaaaggggaacagtgcactatgctagtgtatcagtttaattggcgcataccagggccagggccatcgcaacaggaagtgtatgccgagctcaatgattgattaacttcgccaaatccaaagtctccttgccattccataagccagagatatgagtatgctttcccccatttcctttctgccaagagtggcaccttcttccatatttaagtaagaaactaaatcaatttgcacaagaaacatttcctaaaaagaatattggggctgtgttatttgcactgtcttggtcgaaatttttcatttgacaacagagagctcgttaagatttcaagtcttttagcaccagggccgggcctgaggactgtggtatcacctatagaagagcacggatcagttccattctccttaactcctatgcaccagccaccaggaacaagcatgcctggacctcgagacaagagctcagaatcaactttgtcaagtaccggatcatcttgacggaatttccttgcaaaaggagcgttactcttaaccatcttttgcatgtcagcaagagtgaggtggtgaggatgttgcttaggagggttgtcccatgctatgtaatgcaggtcagtattgacagttgtgttgcggaactcttgagcattacaaataacagtatggaagtatccttctggtgatgaaataaaatttgcataatacataagaacagttcgagggaggttgtcccatccccatatgcagtaatcaatgaaaggccttgaaagtgccatccaagccgaacctacacgagaaggaatatatatttaataattaattaccaataccataactactgtagcaacaaaatcttccactggtcatatctcttttcaaactgaatcactaaccagttaaaagttatcaccatgtttgaacaaaaccgtgcaacaataagaaaataataattaaaagtaaagaactcaaggtaaagctaaatcttcggaaagcaaaccacctacaaaatgctacatatttcaaagtgtaaagcaagggctaagtataatctaccacaagttcaggtgttttaaagaaggttctatcatactagtaatttgtgtatcaggtaacatatgtaaggtaaaacatgttggtctttgatcatcacgggagcctacctttccaatctcctagaaatcataggtcagcagaggaccagtataaaaataaataattaaaaggtgcatcattttatcgactcccaacccccaaaccaattgttggcattaaatacctctagttcttttgaaatataatcaaacatattacataacctgataaaaaagaataaaaaaaaatagagatgctcagcagtaggttgagagatgtgagtgaatgtttcgaaagccaaactattctagatgattcagaagagcagtttaccaagaaccttgaggaaaatatcagacaacttgaaatcttccactactcgttcgtttagagaaatcatatgtgagactttgtaaagtcttgttattcaagtcatatgaaaattatgttttctatgtcacttttgtgggaacacaacattaaaaaaaaaaaaaaaaaaaagattttcagaagatttccacttctatgacaaaaagctatattcggcctttttcaccttggagaaaaaccaagccatgagaaaatatgtaatctctccatcatttgtttgatagatcagagagaacttctctcattccttcaattatttgttcttttaagagtcctaaacctatattcttcacctaattaacatgtaatacgctagtgaaacccaaatcaacatacagaaaacttgtaaccttaatttttattatcatgtatatatctgattaaataatggagcaaaccaagcattctaatgctcaactgcaacattattttcttctctttataaaaattggcgctattatcaatcagcatctaaattataaatgcagaacaaagcatcattctgctatgatgaaataatagtcaactgcaatcctaaggttttaatcaacagaaaatccaattcaatcagtaagagcaatgataccaaattaacccaacatgctctccccaaaaaaagtttggaaaattgatataaacccttaactggaaggagtaaaatatggacatactgaatacctaaaatagaaatttaacattaaacataaagcaaatacaataagcaacactggctatcatgtaaactgaaacggaaataacagtaagaagccaaaggaaataacaagcatatatatatatatatatataaatatatattaacctgtaaaaagtttgaa

SEQ ID NO: 45164 - DNA, 1499 bp, Cannabis sativa
  modified_base (720)..(720): a, c, t, g, unknown or other
gatattttaattaatttccacattgaaattactccgaaaatgtcatgtaagtcactagtaatttaacttattagctaggttgagatgttggcctagtgtgtacaattacatcgacagcacaccaaaaatttataagcttttttgaatgaaaactaagattacgcaatagtacttttatacaagtttagtcctttccaaacaatttccatatatactaactgccctaggattttatggtgacctttttcttaatttcaatgtatgacctaagattaattaactaattttattgtagtatagagattaatggaaatgagtatactactaattatttgtatcacctaaaaaagtaatgttcagttaataaaaaggtaagtactatttttttttataagaatcatcaatatacgatgcagatatttacaatcggccagtatagaaacctttttaaatcaagataactcatcgtttatgctttgtcgagtcatgaattgctgaaataagcaagctagccacatagaacaaaactacctctcaaaatttaaacaataaaatcataagataatcaaatggtacactgaaaaagttaaaacttgtaaccctaaaatactatttgagacttctcaaaacaaacacgtaaatactaaattctaggggtgttcatcaaaccgctcaaactgcccgcaccgcaaaaaaatacggtttgaaattctttgcggngcggtcgcggtttgaatttttcctaaaccgcgcggtgcggtgcgatttgcggttttgaattattaatatgcagttcaaaccgcaccgcatcgcacattataaaactaccaattttaatgtttatttaggtccaatatgtgaatgtccaatccaaattccactaattattgtattattgaaacttaatttattttcaagttttattttcaagttttatggtatttttgacaagtgttgcttaattttgttgtatttgtgatagttaatttattagtgatagtccaaaccgcataaaccgcaaaaaccgcaccgcaccgcaccattttttgcggtgcggtttttgcggttttttagtttcgtgtgcgggtgcggtttggaaagttagaaacaccacatgtgcaggttggtttgaaaaaatgatcaaaaacctcaccatccacaccgcgaagacccctactaaattctttttcgtgacaggccaattgttatatatattgtttatttctaatttccatttactgtctcgatcttatccatgaactttaattctgcacacagcccatgaaagattgatttttgcatgtgtctcataattaataatctcgttattattatatataatataataatttatttgtatgggtccttcttagaaaatccttttttgcttcaattaattaaaaaatgatttgtatcgatcttaagagttgttaaatgtcatgattaatgctggccggatctcgggtgggccacccatattttaaagggttaatttcaca

SEQ ID NO: 45165 - DNA, 2944 bp, Cannabis sativa
tctcaacacaataggaacttaaggaatccccttcaaattgggtaccattatcagtgatgattgtgtaaggcacccttaaccaacatattaagaacttattaatgaaggatagcacttgcttagcggtgaagctaaccaaggctttcgcttctacccatttagtgtaataatctatttccaccacaacatatttcaccccagccctacttgttggtaaaaccctaattagatcaatcccccacatggcaagcgaccatagactagtcatgcttgtgagctcgaccgggggtgccggttgtagttagcgcgtctttaacatttgtcacattttcttacgaactctgttgcatccttctacaagataggctagtagtatccttatttcaacactttacttgacatcgaataacatcccgcatggttcccgcattccccttcgtttattttcagataaaacttgatgcacttcactttctcttatgcagcacatgagtagagtaaagaaacttttcttgtataggacccatccattaaaacatatctagcaaatttatactagattgtcctagcctccttcttgtccaagggaaaattcccttcttggatgtactcgatgtacgacatcatctagaagggttcttcacttcctacttgtagaactccaccaacacagaatctaaaatgtcaatctcttgggttgatgcaagcttagctaaggcatcggcattgataattctttcccttgggatttgctcaactgtgaaatggtgtagctgctcctggtagcatttaactttggacatgtacgccgccattcttggctccttcgcttggtattctcaccgtacttggaaactactagttgcgagtcactaaaaatccgtagtcgagtaactttcaattccttagggagtctcaacgcaaccaacattctttcgtacccagcttcgctgtttgaagccttgaatctaaaccttatcgtacaatacatttaggttcctccaagagatgtcatcaccaccctagctcatgctccattgtcagttgaggctccgtctacatacagctccaaggtggcctctctctttccactttctaccaactcttcaccgatctcctgctcttgatccttcccatccgaacgataggttaattctgccatgaaatcggacatcacttgaccgttgattgatactctcggggtgtaagtgatgctgaattagcttagctcctatggataattttgttagaaatattttaccaacatgtagatttactaacatgtatgttggattataattgcataatctaacatcctaaatatatgaatttcctaaaaacaataaattaaacatgtaaaagttatagaaaaccttacattgatggcagcaaaataatatgaatccctccgtttagatctctaactcttgatcctttctgttgtagattgtgatcaagattcgaacctggattcttcttcgggtgacaattggacaacatagtcttcctcactattctgagcattgctttgaaatgtgtgggcaagttctcaacactaaggagcatgaattttgatgaagaaatccaagagaaaataacctcaaaatttttgaaaatttaagagaagaagaagtgagctttttaaggttttctagcttagaatgtcatcatcaaacaaagctctcttctctttctatttgtaggcttcacttagggttaggtttagatgagatgggcttaaaataaagacttgagctgaatcaactcttaggactgaattgtatatgggctttagagttagatttatgccgccttattttatttaaatgaaacaatgtgttttttttttatttaaccacgtatctcttctaattatttaaatgttaattttatttattaatcataaatagttatcaaagaaaataaaatttaaatatatttattaattagacccacagagtgtcttaattaataaataaatccatatttctcttttcttctcaaatatgctcttctttagtaaaattcataaataagacatagtaattattattaatcttaattgattacataaatcaattaattgagactacaaaataatatcatcacagttagtgtggggaccatgagtctatttaacaaagctcctaataagtaattctaaaatttaccgagtaaattctctattttatttattcttcctgactccactatagattcagaattgcactcttgactacataaacgctctattcactgagaatagatacgctataaattatccattatttcaatcaaaataataaaagatcctctatagatgatttgcattgagtaaggatgaatttacaattttaccgttcaatgtattttatccttaaaacacttagcttcttataaatggtatttcaacaaactaatataattactgaaataagagctcttccatttatgtctgttactcaagctctaagaaaattatcattttacttctaaataattatagaagctatagattctatatctatgattagcactctcaccaattgcactaccgtgttccccagatgtaagtattgagttgatcctctagtaagcttgcaatgaacaactcaaagaacacacgtagaacagttaagctagaacctaaccatctcaagattaagacctttaatctaagattaactaagtgacattgaattagaaaaaatacaacagtaagtttgtgatatcttttctactattaatataggtctagtccaatgtatagctaatacatctgatactactatactttgctaataccttagaaaggacattccacatatcactatgtaagtacattttatcgttgattatcatgtcagtgtaaatccaatgcattgataaattatgagagtaaatagtttgaagcatataatcacaattactttctactctgatg

SEQ ID NO: 45166 - DNA, 3008 bp, Cannabis sativa
atcaaacttttcatgccccaaattttggatatcaacctctttggtaaatgtattaaatccaatattcggagaggtgccctgatcacttacttcaagttgagataatatctgaagattgggcagttgatgaatgcctcgaggaagactagtcaaattgtagcagccatcaatctcaagatgcctgagattgatcagattctcaaacccttttcttggcaacctcttaagcccataacatgaagagagtttcaaagtttgcaagtttagaagcttggtgattgaatgaggcagttgggttatattctcattttgagaaagatcaaaatacttcaaaagcttcaactctttaatagaagatggtactctgcttatccccaaaccatgcatatctagtgtccgtataaattcaaatctagacactacagcatgaacaagttgattacctcgtgtcatatcatgttcatatggcacaacaatcgatcgcacattacattcacgaaatcctagaaatttgggctcaccccataattggtaagttggaagatccgttgctagagtgatgaagtcattatcaatcgagaaatggtaacatggactccgccttgatacaacccttgcaagattatgcatggagtgatgtatgtgaaatttgatgaccctttctcttattgcgtcgagttgagatgcttggaagaaacctcttgcgagtaattccataacataatcataaccagcatcctctagagattgagattgagattgatcaataaagccttgtgacatccacaactttacaactgtttctacatcatactcgtgataacggaatgggaataaggtacagtaagcgaaacaatgctttaaaggtgaagggagatgcttgtaacacagtttcgaaagttcataatcgaaaaacataaagctgtttatggtctttaactcattttcatagaatgatagccactcttcttctgaactacttgattttgttcttaaaaggcttcctaacatctttataacaacagggtttccttggcacaatttcacaatcttctttcccacttgtatttggtaagagctttcttctttttcttcgtctttaaaagccaatgttctaaataaatcccaagacatcttctccgaaagcatgcctatcatatacggtggcaaggtgcctgcaactctaccaacagtctcaacaaattgggtggttacaattactttgcttccttttgcaccaacttcgaaaatctttcttagcatatcccattcttgagagtctgcaaacccaaggccatccaatacaataaggtacaactttcctttcaaatttgtaataccattatggatgttttcaccataacttaaccaaattcttaagttgaaatgaactctcaccatctcatcatcgaacaactctttcgcaagcttggtgttttcactttctgctttgccaactatgggaagagtttcaacattgatcagctgatgatttcgattcgggttcaacaaaatctctctgagtcttgctttgtcgcctctaaaaaggtcttcttctttgagtagtgcagcatgtttgtctggtttcatggtaccaacttgtgtctcactaagcttctcaagattgaaatctcttccctcaacagcaagtttctctagtctccttctaactctattgatctcctcattaaacatcttgttgggaatatgtgtatgtgatgagatgaaacaattactaataaactgatgattcgaccactcaatcacatctaccaagttctctgcatcacacagtgcatcttcaagctcattcatccaatgacagaatcgaatgtcgtagtccttctgcaaacacttgttctctgcatgaagaagcacaagagcatgctcttcaatgatctcctttagtcccatcaacatttcattctctacaatatgctcttcttcagaacccagcaatttcaggatccgacttgcaataagggtgagattaaattttgctgcagccattgatattagttttggagaaaatagtacttgagttgagattatgtgatcccttggattggatttacttcaaccatattaattagtaaagtaatttgcgcctaaactagctttaatttttatatacttaacttaactctcttgtttttatttttttgtggcaaaactcttttatgttttgtttttttgttttacaaatttgagacgttaattagatataatcgttaaatactaactgaattactactgtattagtttcgagattttactatcacatatacataggtatatacagtagttatttagttgatatttaatgatgaaatttaattagtggctcaaatttgcaaataaaataaaataaaataaattttagaggattttgccactaaaaataaaaataaaagaattaagtgtgtataaaaattaaaacgagatttcgctgtaaattactctaattagtatgaaatcttttattccaaattaaatggcttttaacatttcactttttcttttgaactaataagtcaaaagatgacaaaaggcaagtatgcatgctaagaaacatagaattagattcccatagacaatggcggagccagcctaacattttagtgggggcaaattttttttttttttgaagtattaataaatatagtgagaataaaagtgaaaaatataaattttataaggataaatataaaaatatataaaaacaaagatgaaacaaaattatttttatggggtcaaattataaaatacccaaaaaaatcatatacaaaatttatatgaataaaaaattgaggggggcaaatgactccacatgcccctcttccctccgcctcgatcatagaccatgatttgttaaactataaacagtattatattattttgagttgggtgtttattatatcacatttaatgtttttaaatttatctagattttgtttaattatatattgaatgataaattttatcatccgatctgatccaattaattt

SEQ ID NO: 45167 - DNA, 3155 bp, Cannabis sativa
gatatatagattgtggtgggtctacctttcaaaaatattaggatggtaaaatacaaaacaattcatatttttttatggtatgacacaacatgactcatttgaaaactctacaaaagtatgggctgagcttgcccgacacacatgtgtctctaatgtaaataataataaaattatattatactattttcttttttatatgctcattatttattttgacaaggttaagaccaaagtgaaatttaaaatgttcttttttatttatgactaccaacttggtttggtgacattctttcaaaaaaaaaaaaacttggatttgtgaaacaaaaaatattagtagttaattattatcaaactctattttttttttcttaatttttattatttgaagacttgaaaaattatatcttttcatctcttacataatttattttcacattttccctcatatttttccactattttttcaattaattccttattgtaagtctatataagacaactcataagaataatatccaaaaccataaaaaaaatgttttggtttagttatttatttcattatatgtcttcaaacttaatatatatccaaattcatgtatcatattcatgtcattgtcacatagatcaaactattttaaaattgatttttaaaaaaagtttcaattatgactcccatggaaatttctagatactaatcccatcatggtcttactttttatttatttattttcttacctccaacttgatgatatttatattgatattataaactacctttgataacacatcaagtgcatcttttaaaaaaactacattaacattcttcatttggcataactttgatcatattgtcttatttattgtgcccaaatttagtatacaataaacacaacatatcgcatgctaatttttaacaggcctcaaaaaattcattttatataaaaaagaaaagaaaaaaaaaaaaagatgtatatagttcacaaattatcattattgaaacacaataaattataattaataatacaagggtttatacgattaatccttatttcttgctctattaatatattctctgtttacttttacttttttcaaaattactttttttactctatattttgttgaaaagtgtaaattggaatcctaaacttaattattgatcaaaataatttttaatttaactaaaatacttctcatactattagtcaagaatctttctaccaaacaagatcatgaatcaataccttcatcttgctcgtctcccttcccatacattaattctccattttacttcctttggcaagtgtattacgactattaaagtaagacgacatagagtgcacaaaataaaagccacaaaaaaaagattatttttttagagaaaacaaaaatatctattaataagtaaattggacaaagtctattacacgatgataaaactcatagagcaaatcgataataatagacataccaagtcgttaacaatagtatggaagaaaacgctaacaacaacctcaactaagagtcaaataaaccatcagcagtctacctaccaactatcagccaattgtcttttaataaatattagaaaatatcaaccccattatttaaataataaataaagaaaataacacgaccaatcatgttttgacgctctattactaaggaatagagcacgaaacacatggccaataagtaggtctgagcgacaaagagaaaagttatgatacgacaaaatactgactacagaaaagagaacaaactccttaacggtcttcatcaataacaatctctactaatctagtaaggtcgtgcaagaacaccattattaaaataataaaataaactagaacaatgaaaactattgcaataaaattaaaaatacccaacaaagacagcacgtgataaaattgggtactaaactatgaccagacacccttttttgacaatgactgatccctcttttctgaaacaagacaactcgatcccccaaagcattgccccaaatcgtgtgaaccccaatcaggagataacccctaaacatccattgaaacccagcggagcacaaacctcaccccaacccacatacatcgcaattaagagatcaacgcagatctctcgctgacaagcctttgaagcaccataactgtcccagattctgacagacgatccctaattaaaaagatcccatccaaccaagaagactcaaatgataccgcaaaggcccacaagaaccaccgagtgatgccctgtaagtcttccctaaatcagaaccacaccggaatcacgaagccaccaaaaacataagaaaaaagaatcaagtgtcaaagggaaatcccaagaataataagaactcagccataaaatcctgtcttagatcataaatcactcccgatcaatgccacaaaggagtttaaagaaggctggatagtcctggttggaacaaaaagattattctttatccattctatgtatcacttaatttgactcgttcatttgttactcaaaaaacacgtataataataacttataaaaacgacttaaaatataaaatttttaaacaaatcgtatatatggatattggatagtaggtatgtactcagagcctttaaatttggaacttgttgtagcacctaggtggtggcaaagttcaaacttttattttggaaaaattctcaaaagatgattggagttgtgttaattgtccaattttgaagtgcagatatcatcttcaatgcaataaaacaaaagatacgattatattaaagacataatcaaccaataccatattatactgttacattgaaatttatttatagttgtttgttagcaaggtttttctttatttttatttttaaaaactttgaagaatggctatcaatcacataagttatccaattggtgagaagttatactagtaggttgcattaacatgatccatttattagaaagggataataattggattggatatatacagtggcggatccagaatttaaagtgaggggggcgtaaataaatttaaaaagaaaatatatagtgtagttagtagtgtttgaacctttaccctctaacctattcaccaactaccttaaccattacaccaaggttactattatgtctataaatatcatcttttaatacaaatatatgtt

SEQ ID NO: 45168 - DNA, 1566 bp, Cannabis sativa
  modified_base (1389)..(1402): a, c, t, g, unknown or other
agtaactttgaatacataatatgcatgaaagagtgagtgttcatatatagttaaacaatatatgatgatgccataatgcaatatatgtctttcagtccacatatatacctccaagcctccaacaactctatatccccgcgatcagctgccatactctaaaagtaaaaggtcaataattatttcaaactagcagctaactcatcttttaaaagtataaatatatatattaattaaaaaaaaactataaatattaattttaaaaaattaattaaattattatttttttcccaagaaccaatatagtaaataaaaaattcgaatttatatgattaatgaagttatttagctaaaagaattatcaaacaaaatatattttttacactgtatatcataattatatatgattaatgaagttatttagctaaaagaattatcaaacaaaatatattttttacactgtatatcataattatatttatacaaaaaaataatatacttaaacctcttaacctttattaatctctcatattataatattttatgtggactaataacataattaaatcttactcactaagtactatttgtattagcatataatgataactgtataatcggtaatgtattgtattataatcgaagtggacataacataataacatgctcagggtcaatggacacgctctaaaatatttttggtcagcccattgagtcaagacaattaattctctcacattaaacatttaagctcaattgactcataattccttattataaagatctttgtgctcgtgattggtgattaaggtagaatgagtgtgactatgttgtagaaagaatggaagagtagtattcatcacacccaaactctcttttctccatatgtgtagatatcaaagaagtgtaatccacaaaacgattggagatcaaaattaaaattaaaggcatgtctattattatgttaatgttttaaaattaattgttaatttgatctttgttaataggagcaggatttgttgttgattaggtattattaatagcatgcttaatatgatattaatacaatactttccggtcatatattgtaaaaataataaatttttttatattagatagtaaaatagtatagaaattcaaatatttgataattggataaatggtgtgattatataataaaagaaaacataagaacttaaatttttctaatagtactaatagataatatcaattaataatgcacgcatttatatatatatgtatatactaggagaaagctacgtgcaagacacgtatacttagttttatgataggtgttttatactataaatgacaatgatttaataaataatcatataatttaatttattattatagtcaaattgaattttnnnnnnnnnnnnnnttattcaagaaaaacttattttattattgagtgtagtaatttttatgtatgttcaaataattcaaataatggtgttgcaatctaaaataaatactgatggcaatatgttagttttaatagtctacctatatatctatatctatatactagatgagagttacgtg

SEQ ID NO: 45169 - DNA, 1849 bp, Cannabis sativa
acctttatttttgataaatattagtttcgtataatcacttcttttaagggataatcactttgcttaagtactcttgataatttttttacagaatatctctatttttgttttttaaacatctttgttaaaaatatttgatgtcctacctcaataagactatatttgcaaatctatatataaaataataaaatactatgtatattttaataaaatactatattaaatgatataaaaaaatgatcaattttcaccaattagagcctttcataaattatttgtttgatggattgaggatatctatatcagtaagtacgagatacaatatttgcaataaatcatatttgatcgaccacatatacaccaccctcaaataacctattgcatattaatttcatatatattctttaattcctcggaaagcactttacaatcatgaaatgcacacaataaaatataagcttaattatgaactcataaaataaaaggtgacgtgaaaaatgtgtaaagatagttcccacttcccacacaccaaattgttggttccaagcgaagctgcatacaaaaggaaatggtatggctagctaagcttcattataatccatacaatatcatgatgggcggcgtgagatgtggctcaaatcaaaactatgctgattttgaggacccgcatacatacttgtataaaaactatatctatatatatatttatggagatggagtggacgactctcaataaatgataaagacatttaggtaaaccaggacaagacagttcttgtggatagagagatttggctgtgtttcacgtggaacattaattcatgatgagtatcatttcatattgacaattagtatatatatgtacaaaagtaccatactgcgaatattacattcaaattccaaatagcctactttgattgtaactattctcgaatgagtttatctattatttgactaaagatttttttcattattttttttttctttaaatgagtttttggtggtgaagatcaaatttggtaaatataatcatggtgaagctactaataaaaactgaatcggttaaggtggacgattgaaaatttaaccaaaaaatacttaaaatgtatatataagttatttatttatttatttatttgttgaagaggaatcttttttggaagaaatatacaatatcaattcaacagattctaatattatttttatttttataaaaaatataatgttgtgataaatgttaaggaacattagttagttatggttgttaaaattagttatttctcttagttagtttagtgagctgttataacaaattctttttttgttttgttgctttaattgtgtatatgtacacatctcttgtaatcagatcattttcatggttgaataatagactttctttctctccttctttattattctatcttatcatggtatcagagctttttcgttcatcctcttcgtcttcaacacagctgcaatgactaccttcttcaccgacgacaatggaggttcgtctcaaactagtggtcttactactaatctttctcgatccactcatgttactctttctcactctctttccgttcgacttgccgaacacaactatcttccatgaaaacatcaagtatttgcagcaatcaaaggaagtcgattatagcgatttcttgatccactactcactcctccaaagtttctctctgaagcagatcggcattccgatacagttagccctgagtacgaagactaggagcagcaggatagcatactcgtctcttggctattatcgtccatgtctaagaaaattctcacacgaatggtagggtgtgatactgttgggttttatgcc

SEQ ID NO: 45170 - DNA, 1565 bp, Cannabis sativa
tcttagtgcactcgagttccttaaacataggttcagttgttgaacctgtgagtgttctggtgtgaagaaactcacacctgctggtgtgatcgaaattggtgtttgctcaatttttggactctaatcaggcttcgtctccttcttccatttttggagcgtttgatgtgagttctcttacaccttgtggctcctttgcctttggtgagattattgtgcgtttgtttatgctttttactatcatggctattgccttgctctctattttgagttcttgtgtattttgtctgtatttgggccactgaggcatctttgcttttgttttaaactgagttctatgagctagtttggtagtttctcttctattcttaacttttagttttgttgtgtttcaggtgctcattggtgggtctctgatctggtgttcctcttccctctactcatgaaattcctctcttaaaattgtcgaggcttggggaatgtcaaggcggttaaggccttgaatatcttggttgtcattgaaatttcctgatgtgttattcctaattgagactaaactcattgttattcgtatgggcactatttggaggctgttggggttttttttatgtagttttgtggatgttattggctcagtggggggttgtctgtgttggagagtcgggattgatattgattttgtgaaatctacttctattgtgattgtggctagtaatgtttagaatgctctgccttggttggggtatttcgtttatgctatcccagtgagaagtgcatgagtaccttttgggaagatttggctcttgaattggcatggttgtttgaacattggacccttattatgggccaagctgagaaatatggggggaatatagttgtagatgctgattctagtctactcaatgactagatcttggaagtgtgggaaatttctttacttagtcaaataggataaatttctttgagttgattaaggaaaggttggataaattcatttgcatccctgagtggaaggtttcgtttcagaaagcgggggttaaatatctcactatcgaatcgtctaaccatgcccctatagttttggatcttatctttgacagagaacactttcatacgccttttagatttttggatgaggggactcgagatcccactagtaaggaggttagttaggatgtttggaatattgtggcgagggggttaaaaattttcaactagttactaaattggcctttactcgtaaaatgttaacccaatagaacaaaactcactttggcttttgcaaagtgaagttgtgtctattggataatatcctgctagaggtccaaaaaattttgtcatcccctgaaaatttccaattagaggttgatattttacttgaactcgatgaggtgtcatttaaagaatgtgatatctggtgtcaaaaatttcgagaaacttagtatcgggatggggataaaaattctctcttctttcatgcgtctactattatccgaaaaaagaaaaactatgttagggctatttctgaggatggcgaaaattgtgtcttatattgtttggctattata

SEQ ID NO: 45171 - DNA, 2292 bp, Cannabis sativa
aagtaatgttgaggtgcaaatagctcgtcaaaatgacatgtcacatgaatcaattgctacctttgtaaaatatgataaaggcaaaagaaaagctaaaatactatcaaaacagtccattataaaagagactatagagtattcgttcattgatgaagatgatgtcaaaaaaatattagatgaattattagctgcaaaagctataaatctcacaaagtctaaaaaagcaaaagaaggcaataatactgacaaaactaattattatcggtaccatcgaagtgacactcattcaacaacaaaatattgtgccctcaaaagtatcattaaaaagatggtccaacacgaagagatccaaatagagtctcaatttcaaaaagtaaattgtgatattgtctctttaactaaggacaaatttttcttttgaatgaggagaaaggttgtcactcgttgcaacctaaaaaaaatttgagcataacacagagctaacgctcaagaaaaaataaagcaagaaaaaagtgaatgctaaaaaaaataattaaaaaaaaatagagctaagcaaaaagaaaacgcttagagaaaaaaataaacaaagcaaaaaagctaaggcttagaaataaattgagcaaaaaaaaaacaaaacctaaagctctaggaaattaagcaaagcaaaaagctaacgctcaaggaaaaaaaaaaattaagcaacatgaagttaatgctcaagacttaaagtttaaagaagaaaaagaggtgcaagctcaaagaaaaagaggtgaaagctcaaagaaaaagagagccgcaaagagcttaaagtttaaagtaaaagcgagaactaaaggcaaaaagccaagactcgaagcaagaagctaaaatgcgttaagaaaaatatctcaaagcacaaagcttaagggtagagtaaagaagcacaaacactcaaagtgcttctctaaactacgaaaggcttgatcctgatctgggtatgtaggcaatataaataatagatacaattaccaaatcaaaacttcaaattgctctccctaatctcaaagacaaatatgaaaagtatttatcctttcaaattaagagtggtagaataagaaagctacaaaaagaagtagaaagtttatgtgccaaactctcaaagttactcgagcatcacatgtgtccatataaattaccacgcgcatgctcgagggggcagttgttgaaccgtttttatttatttatttacaaaaaaaaataataacaataaatataaaaagactcgttcagcaacaaaaaaaggaaaaaaaatattattaattaataatatctctaattttctctctactaaccttttaattgcccaccactcacctatccattttttgatcaatatattgtacaaaagagtctataaagagggaataaaaatcaaacaaaaagtagagagggagagaaagaaaagaaaattctgtcaaaatttttagagaaatattacgataaattttagagaattgatattctcatcttcaagagatttctacatagtaagtattaggttatccctatttttttttcatcaatctaaacctctttttttctctaatattttttttttattttgtctttggtccactttgatttaggttctaagccacaatagatcaaaagtgggatatagccaaatgttatataagaaaatttaattttttaatgttgttatgctgctaaatttattgtggatgattttatgtttctatttgattccttaaacttcagaaaataagtcaacatgaggaatgcataatcaaagagaaaaacaaaaatcttaaacaatgagaattattatgatgtcaaatttcttgctgagaatttttatgttttcctttgattccttagattttagaaaataagtcaatatgagtaggggtgttcatccaatccaatccatactattttactcatagtgcatccgatccgcactaagtgaggatttcattttttgaatccaattgaatccacacaatagctcaaatccaaaccgcaaaagtgcagattggatcagttattttggattggttactttttaatatttatgaaaaaaatatttttttttcttcacataactagcaataaaataaaataagtcatagttattttatgtctttaacaataaattaaaataaataaaataacaaataacaaattcaaaagaagaaaaaaagttgtatgtatagaaaaatgtttaattttgttttaaattgtatgtagaaaaaaaaatataagatgagaatatacatttgatctattaag

SEQ ID NO: 45172 - DNA, 1471 bp, Cannabis sativa
atatatatatatatatgattgaaattcaatattagttataagtattaatgttttggatttggatgcactgaatttattttattaatggtgttctcttcaatcctatcaacacttctcaacaattccagataataaataaataaataaactgaataaagctgattaaataaaataaaagaaaaagaaaaatagatggggccagaaatctgaccaattttagaagtgtctagctaaactttccaactgtctaataagaattagtgagtgtttatatacaacaaaatttgctttctaaaacatatctagtatttgaagtaaatgatgcataattacttttatgattttgtattaaatatataaaagtgtttattattatattttatataaatatggtataatattatgttaaagtactcttcacgggtcttcttacaactactacaagcacaaggcacataaatgaagacatatcttaccaagaaaatttttataaaagaaaattctaaaaatatatctcaaaaaggttcttattaccaacaattttatatacaattatatttgaatgcccaggagttgttggcaataagaatttgactacaaataaaggaaaaagaaaaagaacaagtgggaggttaggtgtttacctatggaatacaaacatgtgcataatgatcatgatcttatattgcttaatttttttattttaaaaaaaattctttgttctattatggagtgttcccttgaataaagaagaagaagtttaagaaaaatgacatttttaaaagtcattttggtttaatattgataattattaaaacgattgttaatttaatgaatgtaaagtcaaacaagaagttgctgtggtgtagtggttatcacgttagtcttacacactaaaggtccccagttcgatcctgggcagcaacatttattgttataatttttattgtatcttaataactttttccattttctgttttagagagaaaaattttcttatataatcttgtatatatttgaccatgcataatctatgaatccatgtttcagttttctatcatttgaatatttaaaaataattaaggatttcagccaaaaaaaaaatgattagtttattttaactttcaattttaataattacactctatttgcttataaaattaaaattaagtatctccttccttcaagtcctaaacaaagaaatcactaatgaaagaaaacaattgagatttcatcaatggagaacatttgatgtaagcataaaaaaattatatttttaattatttccttaaattgtaaagtctctaaattctttgtatttctttcatatgaatctatgatatatatatatatatatatatatatgaatgagatttcatttatttactccattatttggttatgcttttcattcatttactccattgtttggtcatactattcaatcctcatctgtttttttttttttttt

SEQ ID NO: 45173 - DNA, 1652 bp, Cannabis sativa
cacaccagatggagggagaggcaggaattcgaacttggagttcttgcaataaggactgaatccacacaacttcagtgacagcactagcaagacttcgaaattctgcctcagtggacgatcgagaaatagtcacctgtttttgagatttccaagcaattaaattgccaccaaagtaaacacaatagcctgtagttgattttcgatcatccaaatctgatgcccaatccgcatcacaaaacacatccaatgcaaaatctggtgctggtttgaggaacaaaccatggtcaagtgtaccagcaatgtatctcaagatacgtttgacagcagtccagtgagattgcaatggagattgcatgtactggcacactttattgacacaatatgagatttcaggtctagttattgttgcatattgaagtgcaccaacaatcgacctgtagagagtagtgtcagaaattggttcactaccatagtttgataactttaggccactgttcataggagtagattgaggattaacattctgcatcccagctttagtaagtagatcttgaaggtacttggtttgagatagatgaatgccagcatcagttcgggtgacctgtatgcctaaaaaataatctaccaaaccaagatctttaagtgcaaatttagtgctaagatcacttacaagagaattgaccaaggagtcatcactccccatgatgagaatatcatccacatacactaaaatataaatgcagctggtagtagtagccttaatgaacagagaaggatctgacttagagaattgaaatccatactcaagtaaaacagtagaaagctttgcaaaccaagctcgaggagcttgtttaaggccatagatagccttgttgagtttgcaaactctgtcaggatactgtggatcttcaaacccaggtggttgaaccatgtaaatctcttcttcaagatcaccattgaggaaagcattgttgatatcaagttgtctaattgcccatcctttagtaacagcaatagttaagacaacccttatggtaatgtgcttcacaacaggactgaaagtttcagaaaaatcaaagcccacctgttgatgaaaacctttggcaactagccttgccttaagtctctcaacactgccatcagcattatacttaattatgtaaacccatttgcacccaatttcagtcctattgggtggtaaaatcacaagtgtccaggtcttgtttctgattaaggccttattttcagttgacattgcattgaaccaatgaggttcttgaagagcttgcttaactgtttttggttcccaaaacactaaaaagaccttgggttttcttatacctgctttagaccgagttgtcataggatgtgtagaggttgtaggagccatatcagcaactgcagaagcaatagtggggtctgttgcagtaacattaccagttatagcagcagtgctattatttagaacaacagtagggtctgtagcaggtaaacatgtaggtgaatcatgtataccagtaggtacctgttcaggagcatggagaggatgtgtaatactggtttgaggtgtggaagatgggttaggagagagattgggtgaaggaacagggaacaaaccagtaggtaaaagaggtggtataccagaactgaaa

SEQ ID NO: 45174 - DNA, 1316 bp, Cannabis sativa
atctcaatacgaacccgtagataaggtccccaggattctttcagggaggctgtatcaacctcaataaaacgtcctaaaacctccccaagcttcttagcaagggctctagacctcttaagaaaggggatgcccgaaacttgtatccagaaaggggtagaagtgagcatatcggcagtggtgaccgagccagcctcaaggggagacatgacaatgagtttgtaatcaaagtgccatggttggccaatgaggactcgcctacgatcaccaaagcacccaaattctacagtgaaaaaattggattctttttccataatattggtggaaaaacgctctggccacatttctcggaggcgttttttgaatgcttcagggttgaaatgccttgttgtcaaaagtttgacagcaaggaaagcagagggttcatctctattttcatcttcaggcaattcagtaggctcagaaaaagagtggatttttgtttcaacatcagtaagatggagattggcagataaagtatttgtaaggtcatccatagttcggtgcaaaagtggtgagacaaaagtacaggttggaaagttttcaggggaataatctaaaaggggtaagaacagttgaagagcgtggggaaggtttggggattgacttcctaatttataggggttaacattatagatcagtatctctagagggggcttcgcagagggaattgaatttcccatgtcaggtttagcgatgataatggctaagacctcattgactcctagtttaaaattaggggttctggcaagattgtaggggttgcctaaaagagaaagggcaatgattgcccaggggggagcagatggatatgaaatgcctaatttggtatctagtaaggtataaattgaatgcaaattgctaagactaagggaaatagataaatccataaaatagacgatgcaggagcagttaatgtcagatgggacgctaatggaagagtaattgctgagttgagggatacctgttttgagtgtgaaatctgcattgaagccttctctgcatgatttgacagtcaccggcttcattaagaactgggaagaaaaacccaccacaccgccactgagattgagggatccaggacggacgattacgctgatgcacagcgacgacgacgacgagatctgacgaaccatggcgaaccttagagcttcgtgtttcagtgggagagagagagaggaactatccagaaaagctttttttatttttttgaaagttacaattaaatgctagatatttattgatttgtttttgatattttgaacaattgctccttgtct

SEQ ID NO: 45175 - DNA, 787 bp, Cannabis sativa
  modified_base (534)..(534): a, c, t, g, unknown or other
atgtatggccccttcaatcacgccaatttggaaaaacaatatatatggtttgtgctatggtgtgtggggtatatatatagtagttatatatggaataataatcaatttgatatatgaaagtgggaaagagaaaatggaccatatatacatcatatgcatgtactatatctatatatcaatatttttcaaatttagataatgaaagttgatcaattcaatgtttggtttaactgatcatattatagtttctactcattatttttattacgactaccaataatatatatgaatcatcaatagtatacatgatttgatttgatatatatgtgtgttaatttggtggccagaattaccaaccaatatatgtaggttcttatttcatttctcttttacatttttttgtggtccacatcttagatatgagttataaattataatcacgatatataatatacgtgtatgtgcatcatgtgaaaaccaaatgttactcaaccaccgcaaatagaagcatttactacatatatatatatatanatatatatatatatatacatacagcagattttgtgcccagaaatacaaaacaccgaatgtattctgttgtacgacaggtcggtcccagggtacgtaataagtcctcagggtatgttatcattttttaaccttaattactcctaaatcaacctcaattttcaaattaaataactaccacatttaacggttgtcgtactaatgggacaaaatcgtgtccctctatatatataaactaattataatgtacttactg

SEQ ID NO: 45176 - DNA, 1870 bp, Cannabis sativa
aaagaattagtatagaaaacagtgttcaaatagtttatttcacacgtgcaacaaactatttgaaacttgttttcagaaggttaaatttttcttaatatctccaaattttgccagataatttaaataactacaacatatacgaccaaaaatattaaactaaaaaaatctctattaaaccttctagctatagctgaacataaagaaaggcaagaacaaaacagagagaaagaaaccagagaaaagagagaactaaaggtagaagaaagagtcactttattgaatgggtaatggaagagtatttatacaatgaacaatcaatagacacgtgactaaagagttataacaactcataacaaccaatcagttagttaagtaactaatatgacagctcacaataacagtaacaaactaactaactgtccaaaccatcagctctaactctcagatatcaaaataaataaggatgtatgggtacaccatttttaggaggttgcatcgtaaaattttccaaaaggttatataggcccattgcttggcccaagacagaccaactagccgacccatcatctaagtagggacaaatccaaacagcatgttcaaatctcatcttatcctccagattcaaatccaaaccacctatcacagaaggatggtcgttttcaaagtgattacttaaaatacaagaatgttggacttgagcgaggatgtcctcaggggtcatccaggaacatgagtcgaaaggctatccaggagagcataccatctcggaaggttatttacgtggcatgcctctgacacaatcatgaggaatagagattatatatgacaagaactgatatttaattaagttatctttatcaaattagttgtttccgacaaaagatctaattcatattacaataatgactaattagtagatcgatttaaattctgagtaattataaacttctgtttatgatattagtttctttaattcactcgttaaagtttctcaaaaaagatgattcttacaactttatttttaggaagttaataatgtggatgactcatgagaatttaatttacaatatgaaatcttgagtatcctaatggattaaatattagtacttttactagtgaaataatggtactagagtataagtaataattaaaagggtaacaaataattgaccaaaactaattatgaaccaatacaaggaggaattatcactaatattaattatatcaatgaacattgtagttaaccttagtcaatatatttctataattaactttaattcatatttatagtagagtaattgtaaaaataataaatatatttatttagttaatgagattcaataaataatctaatttattggagcttgatattataggttcatggtcctcaaatcgccaccagataacactatcaatagtgtggatgacacaaaataaagatgttcaaaaatctgttttgaattgacaaaatagtaactatttattttataataaatagtttatttttaaatgtattatttaaataaattggggagggagattgttaggacatacatttattacaagatggcgctatcattatacagtggtagacgcctgggctctattgggtttatttttgagttaattaattaattcaaataataaatatttatttaaatttaaattaaaaagcggttatagatatttaatatgattgagatccttcctcaagtgtttgaaagatttacatggttgttggagatgttttcaaatagtttagttattcactcaatcattactaaaataagtttttagatataagttgtcactaatttaattttagttacaacaaatttatattgtaactaaaaaattgttactaaaagta

SEQ ID NO: 45177 - DNA, 1791 bp, Cannabis sativa
cacttaattttgtatcacactttataatagcatatacattatacatatgtgcccacttaggatttttaatccaacaaaagatacatagaaaaaactatattttatgtaaataaatctaaaaaattgtaaaaatattaaaatttctatacaaactgtatttttgtaattttttattgttattgtgtttttttttttttttttctaaattaagcctataataaataatataccgaacaatagaaatgataaccatgctttttctccttcccctacttaattataataatagcttaaccatttttcttatagattattacaatgaaatttaatgtagagttgggaggagttaggccacacctaaagttttaagccagctatagcaaggaagataaacaccaaaaatacacctttaaattaatataactattaagaacaaatgacaaagctaagagtaactctaatagggttgtcttgtctaaatattgcttacaccatatgtaaggctgttaatttagattttttattttgagcgtcgttgcttattctattaatcggtttaatttgcagatactctatctaattttttgttaatatatatattgatctttttaaaattaaaaaaatatattcttttatagatatattggtataatctttatgtcctaatcttagtttcgtcaatcacgaattaagaactgatacggtagatgaaatttattatcttttgttttagagtaattaaattatgactaaaatactcaatgtttaaaaaaaatattacactactttatagccttttgttttggcaaaatatagtatactcagtttttctaaaaatattatacttttatactcaatcttctaaaatgatggatgatatgtttcattaatattttcatttataggttactttatggtgatttaaacagattttgtatcacttatgatagtgttagattgatgaaatatacaatctaacaattgtgtttgcttttttttaagagatgttacttttcaatgatcttgaatcattattagttactttataagagcaagtttgttattcatatttctaagagtattcaattattcataattcatgttcggtggataaattatatgattgcacataaattaattaaacatgctctttggatacattaacaatttatttgattaatttttttttcatattatctttgggggatattgtttagttctattaagtcgtgtgacatgagtttattaatttaataatttagtcattgttttcagaaaattaaaatgtaacaagttgaaaatatgtgatatatagttactgaaaaaaaattaatataataatacaaaaggcgacaatttaaaatcattgattatatttaccataaaaaaatgagtgtctaaagaataacattttgaaaattttaattattttagccacaatttattttttattttatttaactaattagagaactccatttttttttaatgtagaagggatttattctaaataaaaataaataaaaaaataattctccaccaaacaaatcatatgttctaataaagtgataaattattgttcactagagggaagggttggagacttgctggctggtcagtggtctcaaacaaaatagtcaaacatagcatatggttggttttcttttcttttcatttttcttaattataatatatttacatcacttaaaaaaatatatacttctattagattactacaacaatgccaaagagaaatggtttgaaaatggcatccattgaaagtaagaaatg

SEQ ID NO: 45178 - DNA, 1081 bp, Cannabis sativa
acttagatatttacaattagaaactaaagtcctttaaaagaataattatttttaaaaaggcagcctaaaacggtatagattagacattaaattggctcacaagatttttgtaatttaattataaataaagtcctaagatgtaaattttcctagtattatctctcggtatccatacaactaaaagggaaagtaggtcattacctgctaactaagggggccaaacctctataaaattatgtctatttactttattattctaatttgtaacacgtggcaagcatcaatattaaattcgactctactattggttggccaaatttgaggtcaatattttggtgctttcgttgagagtgagttgataatttatctgatcaaatgtcatggttaacacgaagagaactccagctacaatatttgcctcatcgtatcttcttcaagaccctacaattgaaatcccctcaaacctaatagatgtagccactcctaccatctcagcaaacacaacgaatctggccaccacatctagcctggtggacacaaccattctggtggatctgaacaaccggcccatgcctcctagggaggaccctccactgacacctcccactgaaggaaggacccacgtggagcagcccctaggcacaacaactgaaactcttccccggtattatgctggagagacagtgctaggaatcggtgagccagctattagcgagtctcatgtagaattgggagaagatcttgagttagccagacttagagaggttgtgtaccaagtcagccaaagtgaagaaccacgcgttgttgattatgatgtattagcacaatagagacgcgaatttttgagatggatggatgaccaagtgtacatcctatgatctcatcaggcagagctggaccaccacggtagagaagctagagacctgataaggcgaatcagtgaaaaaactgttgggagaggccaggacctcatcagagatccactctaagggagactagttgacagatcagggagggtctactggcaaactatccaaccaggttccttaggaacaaggagagaccttcccctaccacgaag

SEQ ID NO: 45179 - DNA, 2706 bp, Cannabis sativa
gcactgatgaatcaagggacattaacttttgaagcatataatcacaattaccttccactgtgttgacatcactataaagaagaagaagaagaagaatcaccatgagcaccttagacctctttgtatagagttaagaattctcatttatcacacatgctcatgtttggtacgagttgtaatagggaaataaatagagtttcaaacgttgactttgacactagaaacgtcccccactaaattcccaatatattctcataaaatggctccatgcgatatgtcgtttggagtgataaccgcaaactatatatcaataaaacatcgaaaatcttccaacacaagtttaggtgacatgttgcctaggacatttttagcacaccatttttgagtttcaattctcctcttcgagccaacgcattcccaaacatctcaatattcatttaaacattataaatgaatattgtaacaaattctaacaactagaaacatcttcattttggtctatactcccacatgtaatttattcactttaaatacataattgtcaaatgtgatataagttagagtaacttgcggcgtaaatatctaattttaactctcagttgtaaataaatatttaagtttaatttttgacgataatcatacctaagttaaatttctagatcttccgtaagaaactaataagtgtaagttattatccactcgtcattttcttattagtatatttaaattaattttgaaataaaaaaaaaattaatgacctcaaccaattagagactgccacatagttattaacttgacacttaatgaccaaatacttacgaaaattctgaaaatataatctaataattattaccgtcaaaacttaaacttaagtatttatgtcacaaattactttataagttacaaattttatattaagatttgtaactcttcatgttacaatatttatttatgtgtttgttacattacgtctcatataatataacctccaaatattataatattttattataataataatatattttattataatatattttttgtggagtggctgctgcctttggccgaggcattatggacactggaggagttggattaatactcctagaacaggtattgacaactgttgttagtaactttcttcttgctgctactgtctacactgtgtggaaaaatcagaacaggtgtattcatgaaggatttactcgaactcctatgtatctagttaaagaaatatcgagtgtgttgagatgtagattgtacaacttagctaaaaagaagctaagtattaaagatcattgtttatagataagaaatgtatagatgatagtttttttatttgaggttgttggctgttgtggctagcaggttgctggtgtgggttgttgtttgtttgggctgttgtaagtgtgttttgatcaataaaattttccttttcatcaaaaaaaaaaaatatatatatatttgtccaaatttaatctttctattatattatcaaataatataacacattcttcacatttctataaaacttagttctaaatgatttatcagcaggtatttcagaaatcattgatggttattatgatctttgggtgatcctttgactgaaggcaggtgctgttgtttccagatataagccattatgtttcttaccacacccaatgctgcaaataaaatctatgtagtcaccactagaagcttcaggcagaagtccaagatatatggcttgtgtagagttgacatgtacagaaccataatcaaattctccattggaattgttaatattttttcatcaacaaagctgctactaaagagagacaatttggtggcacaaatgcacaaaagtaaaagctagacaactttacaaagatttttcttaagtattacctgtagtcagtatttaatggctgaaggagaacacaatttaaaccaggtgcaattatgtttggctgcaacaaatttgtgcataataatccaaggtaaattgaaatgcaatgagatcgaattagaaagttgatgaacgatataaagttaccttttagaatatctggcgtaatcaaattcggcccacgaaaagagaaggaagcaacataaggagctgaagaatctgttatgactttacttcttagaatggttgcttgaggatgtctgcaaagaaaaattgtagcaatacttgatgaggatagcaaacttaatcagcaatttctttttggcttgtgaggaaaagttattagattaaaggatatatacaaccatacatatacatagttcaattaaggtaggacaatattactctatagattgattggcttaatgcaaagaaagggacaacaggagaaatatcttaggttctatcattcattgcaatgcagccaagtgcaccagcttcatagacctcactgattccagaaaatgaatcacaaggcaagcttcatagacctaacatttcccttgactaaatctctgtcaaggcaagctttatcacacctcctacaatgcaccaaatacatatacatatattttctctagtctataaaagcttgcatgtcttacattgtccccagtggctgttgtagctgtatggctgcatgaccttttctatctcttgcaaaatctgtttcatacttttattggatgaatagagccgaactcctatgattttgctgaaacacatgcatgattatatagaatcacaacatg

SEQ ID NO: 45180 - DNA, 2659 bp, Cannabis sativa
acttggggaataaattagaacacaaccatgcccacttccacacagaagtgcgcaaaatagctcctaagcagaagttgtgctcccatctcaatatgggcccagtttcaaacgacaaagttgttcgtacagttgcatggggattcccccaaattagagagtctgttctaaaacaaacctagaatattcatgaggctctggtgatctttgtacacctagagtgctgcgtaattcttgaatttgttcctatagtgatccatctcccaaggagatgaattatacaccactactagagttgtaacttttacttgcttcaaaacttttactttattaatttgaatagcttcagccatggtggaaaatagaaaagagcaaaaagaaaaggccaagtggttagatacccacactaaagaagatagcaagggtatgggagagtcctcccctaacactgcttggagagtcctcccctaacactgcttggagaggtccccattagaccctacatctgaaaattaaattctcgaaaattgttgttccaggaaggtcagattgggaacactaaaatgagagaaaaagctacaagatgtgccatctagaaccataaggattctagacaggagaattaagtttagcaatgcttagtgctaaactttagctatttcagttcactggtaaaggcagaagatagcagaaactaacaatgtctacaagaaataagcacaaaaaatattcgtatttgaacaaaaagttaaaagtctctcatatggcctaaatcctattgatctacctagggtaagcatgcaatcatcaagaaagaaaaataaaactttaatactacccagaattttagaaaatacaaaaattacttacttgatgaagaacttagagaaagataaggatttggagagggaatacaaacatcatgcgatggcctccgaaagatttttgatgaaaaagattcgttaatgcgcacaagcctggtatgaagggagaaagctttgttaatgggtgcttgatctccgcttgaagatcagtggtttcgatggtgtagaagaatcaataattaagactaagggtggtgctcatgggtattctctctcacgaatttgaagaagaagattaaaactctcataaaagtaatggttgatccaccagaagcgatttctgctctttttctctctaaaaattcaaacttaaaataaaatctaggaaaaaatagtaaatgagaaatttttactgtatttgtacaaagaagatggtgatctacgtgaactcggatcaagggccaagataatatctaggaaaacatagaatacatccaacggtccaaaagagatgttagatttgcattaaatgcgttttttggaattgagatattctaatgatgatgttctcctcgggataatcactgatatgatcaaccatcattttgcaaatttgttttgcatgcgctccattaatgaaagtaatccccatgagccaaagaaatagtgccacatgtcgcttcatttcaaaaagcaataagttttcaaccataaacaaatttgtttagaattcaaaaagggtttcacctttttaatgtccacacgtccttagccacctggaaggttgaatgcaaactgttgaaacaccttaagctctgaaggattgggggaaaatgttatccgtgattctggatggaggatacgtgtaattctaagatggttttagctcagctatttttggcctaatcgcttgcccatccaagataatggattggatccatcagcaaagtcaagtattttggatattggacaaatggctcatctagctgagatgaacctccaacacatagtatcttcagatggcatcgaacaaatcttccagatgaatgattaatggatattcgaatatctaactttgtatcacaacaatttatctccaaattccataataccaaggcttttatttccatgatcatgtctaggatttgtatcttttgataaggaaaaaaagtaaatataaataaagcatttgtgtctttattatccacaaaagtaagacatagtttgacgtggcatcctcatcagcagaagatcgatacctcatggatcaagcttaatgagacaagcttgaagttaatgtattatttgtatgtaccctattagtagccaatgtttacatacaagaaccctagcactataaatataaggagaaccattcatgcaaagggttagaatctcattacttgagtgctcacacaattcctagggttcaaacacttgacaaaatcttgtgtaaattcatagaggttttccagctttgtcataataaaattaactcgtggattagaggtcgttaattcttgaaccagataaaaactcttgtctccctcattatctttttatatttatttagcctattatattttattggtttttaaaaatctcggtaaacacttatgatccaagaagaaaccagctatcactggtttcacaatcattatctccactacaaatctcataaaagccttatcgttgcatctggccatttcttgttgagtctgtgtctctgagcacacctactttagcagcaaccaaggagaaattagagtgattaagggaggaagagggaagtgttgggttttatgccctaaataaaacccatttcatataatcagatt

SEQ ID NO: 45181 - DNA, 1451 bp, Cannabis sativa
tcaattcattattataagcagtagtactatgcaaacgccattgatattcttatcagcttcaatccaatcttattacataaatttaaactttagattcaactgaagtccactaacttaaaataaaaataccagctttaaaacaaaaattagttcaagaatagtttttttttttaccattaacagaaaatccttaaatgatgataatgaactttggaaacagagaagagaaacaaaaaaagcaattattaagtataaacagtagtcagaccagacaatgtaaacttcgattaatcataaacaaaggttcttaatctaaaaataccacttttactttttgacttttacacacaaaaataaacgcactttaactttcagggttaagaaaaagccaaaggaaaaaaaaaatataatgtgagtaaagttaagttaacccaataatgctttctttctccacactactttttgactcaaaccccaattcacacacaaaaaaaggaactttctttttctttttctttttctcggcgaccaaacaagctcaaacagtgagaaaatttacctgaggaaggaggaagatgaggaagaagaacaacacagagaagcagaattaaagttcgcatttttctctgacaaaacccaaattgccgcaaaccattgtcaaacagcaccgagctggagatttctaggtttccggtcaagcattggccgacaacaagctcccccagctggtttcacagaaactcactacttcccactactactacaagctcattaaacccaagaagaagaagaagaaaaaccctaggagagagagtatgaagaagaagacagcaatgcgggtaattggggttgcagatccataaaatgcggttgaagatctatcaaagccgagacatactcaaatgctttgtataaagaaaaatgtgaggtgagttctagagagagagagaaagagtgaagtttgaagcagaaaggtgagatcttggagtggtaggagagagaaagtagagagagagagagagagtagtggggtgagagaaagttgaagactttaatgcttgtggtgctaatatgactatgaagctcaaagctttaatattaatatgaatgatgatcttcttcaccatcatcatcatcatcatcatcaaaaaatttcagggctgtttgattcacgcgcctcaacaaacaccaccactacctagtattattgtcgttttttgtctataaacgacaatatttattatgtcgttttttcccactgtcgttttgagtctctaagcgatagtttttgtgttgtcgttttcgtttttgagtcgataaacgacaatatttgttatgtcgtttttttgcattgtcgtttttgtttcgaaacgacggttttttaattgtcgttttgagttaaacgacagcgttttcttaataataatgtttttcagttttattatgccaaa

SEQ ID NO: 45182 - DNA, 1043 bp, Cannabis sativa
aagtgttacaaaccgtaaaatttaggtggtttagccgccaatatccctttatttatttattttgctggaattgtgtgtaccatttcttgcttcgtaattattggtacacttggaaagttggactatgagccattccattattaaatggtaccaattttcatagacaggtggacgtgctttagcctctctaatgggggatactttaaagaatataaattataaagatatatttttgacttttttttaatcgatgtttatcattgttaattagaaaatactaagtaaaatgcttaaaaatggcattcttgctatcttcttttctttttttttcttattattttttttaaaaattaattatttaatatatataattatattaaagtataatataattttatttaataattataagaggtacttattatgagaacattctaaaataaaaagtataaaaaataataatgtaaaataaagataaaattacctattatattttttaggtaatatataaatttttaatacagttaaagagtatatattactattggagatgctcttaaatatgaaatatttttttgaattattatttttaaggattgtgcttacgtaatacgtttttggcttgtttgattgtgcacgtacgtgttgtgtgtgttccgattttgtagctttgaaatttcacgtatctatgaatatagcattaatatccactgagggttcttttgatatattgtgatgtattgtattgtattatattgtgttgaattatattgtattatattagtattatataatacaatactatgcttgatactcacttgtactaatatattgtgtaaaattatagattttttacaataaactcgactccaaccttgaggtctgaattcagggtccagtgaaggtatgggttcgaagttaggctcgggaccggagttgacactagactcttaatttgtaaatattataatacaaattaatacgaataatttattatgtagtattaaataatacaactaacattgtattaaaatttatgatcg

SEQ ID NO: 45183 - DNA, 2226 bp, Cannabis sativa
tgaatctcattaataaagttaccattttccttaaaaaaattacctcaataatgttatatatttgaacgcaataaaatcttttggatgaattatttgagatcaataaattagaaaccacctctcaacgtcaaaatttaggtgtaataatagcaatagggtttggacttttggtctctttcatttttctttcataaatgtgaatccaattttcatcgtttgtattcccttgaattcattaataataataataaaaaatatcaaatagataattgtgcaaaaatattgagtttaaattaataatgaaaagttgtataatgtaacctttaaagcaggtgcattgatgtatttctatttgtttcggtatttgaaagaatttttttaacctaattatattcgtgaaaatttataattatttaagatatcttgtaaaattttgaaaaactttgacacactaaaaataagattcaaacagtttgttcaaataaaatttaatattttatacacgtgtgaaaatagattgtttgaatactactttttatattgtaaattatatcaaatttattaaaattttgtataatatcttaaataactataacgtacacgattatataaaaaattaaaaatacattagtgtcgccactttgttgggtacaccttttattaaattttatatattgaatatcatgtaaaagaaaagtttttaattatatttataagatatatcattgttctgtggatccgaccaatgtttagccattttttctttaatatcttcacatttatttatttttttctatggatatgaccaaatgtttaattatttttactatttttttcatcttcatttaaaattgaaatatttataaaatttatacaattatttaaattcacgatcgtgagttccttatttattatttgaaaagatagaaattcattttttttttcgtaatataatttattatggacaaataaataactcatattttaatattattttgttgttagtgtcttaattaattagttctatttataatattttcaatattagacattacatgtaatattttattaatttttgtatatacaagtacattcctaaaggagagaattgtaattaaatgctacagccaaatggtcccttcattggatgaccaaactctatacatgctcctccatgaaagaacttctcctgttttgatttgaaattaaatgaagttttctttattcatcttttttttaaaaaaaaaaaatattaatatatttattttggaataatatattaaacctagttataataagaccataaaaatggtgggtgggttgttgattttatttattgggtgaaaatggtcatgaaattaatgatcatatatgatggccacttatcatacttaattatctgacaccattagtgtccaatccaattttgtaatcaacacattagtgattttggattgaatagtgaatactcatagtgcttatagtcaacaaaatttaataaataagatttaagcaaccattttttcatcattatatatccatatatttatttatataaacaacctaacaaacagtctaataattaaattaatatggataaatagtaatttgattccatccatccaaaaataaatatattaaatattaatcacaagtttattcccaaacatacaattagatttttagttcccaagagttcgacaaagctctactataatacaaatgagtggtgtacaattatttgttattggaaaatattcatgataaattattgctagtagaaatttattaaaacccagacttttaacaataatgagtgttaactccctcaaaaagggatatgaaagagaaataaccagtaaagttaaagcccctaatccaataaatataatttaacaattaataaagagttccagaaatataatttaagtatattattattgcaaaaaattaaaattatgtatttatttacaaccgaaaattaataaacttaagtatttatactataaattactcctttattcaccctaaattgactaacacacaatagaaacaaaagaaaaaattcaactttttcctcttcaaaaaaaaaaaaaaaagatatcagcattgaaaaaccattcaaccatagaggccattgggatcggagtccgatggggtccgaccaatcggaccccatggtccgaccatcggactctgtggatttttttttttttcgatttcaga

SEQ ID NO: 45184 - DNA, 4164 bp, Cannabis sativa
  modified_base (50)..(59): a, c, t, g, unknown or other
aattgggacttgatttttttataagaaattagaggttattcttgaatagnnnnnnnnnnaatagaggttctactgtatatgttgtatccactactattaacgggacaatatagattactgtaattttttttttttaaaaaaaaattaatattaaaataatatatttataattaaatttatatattataatgtgaggtaatttaacaaatgatataataataaaaatattttaagtgtaaattttaatattacagttaaaattaaaaaaaaaaaaatcaatgctaaaaattatattgtgatttaaaacttaaatttaaattttagtgttagaataaaaggaaacttgagtgtaccacaaaagtttcactttcaacacaagtaaaagaaaaacaagtatatgaatagctaggagtagaattagaataaaatatgaagacttacaaaatagtatttcattttataaattgtttattggaagaatattaattacctcaccaaattttcatagaaagtatgactataaataagattggacatctgatccaattcactatttttctattaatttaatttaattcaattagtaattaaatttaaaaaatcatcatttaattcaatttaattagacctaaacaacactaccaagttataaaattggacaaaatatcatgaaaacaaatagacaaaccacaaaacaattacaaattcaaccaaaaaaaaaaaaaccaatgtaaatataattaaaaaatttatattttattttttattatatataaataaatataaataattttttaatatttattaagtgtgattagattggatagcgttttaattgaattttaaaattgatttccaattaaattagaataaaacttttaatattcaatttaatccaattaaatcagtttgatttaattggattaaataatgtctcctcctaactataatagtgaaaattgtaactccaatatacatagtaaatatttgaataattttttttaaaagaaaaacccaaataatttatagagttaaaaatataattcaaaagtatgattgcaagtgtaattatctattttaaattttttttttaacctcgtcatatatttttttaaaaaaatagattaagcatctaaggtaggtcatatgcatagtgtagtaatttgacacttctcttcacaaaaagaagtcgtaagttcgaatcccctccccaatatcaaaaatatattataattccccactaccataaaataagaaaccctactataaaagcaaaatgacaatatagctaaaaatatattgcaagacttgaactaacttaattatcatttatagttttcaaatcaactaaattctaataaaattattttcaatcaaatagtttgtaaaaataataataataataatatattgaaaacaggacccatagtgaggtgaaacgtgaaattaaaactggattttcttattcttatgtacaaccaaacctgagtgcattttttacttcaataataatttcagtttttttttttttcttctcaatttgtagagaagttgtcttatggatcaaacataaagaaagcaaacaagaaaacccactacaaattaagtcacactgtcacacacatatgatttacaaagcccaaatactaaacaaaattcaaatatacatacatctgaacttcactgtgaacagaacggttaaaatcttttttgccaagaaatttagagaacctgtaactctcatggcttcctaaagcaatcaagccttaacttcccaagaaacttgtttaatgtactccgacgcttctttcgttctttcacccgacttttctcatgattaccctgcatattttacccaaattcattacttacccccataaggatagaaagttatagaccaattgaagaaacatcaatgtgattactgattatgtcaacatttttgtgttcctttaatactgagccaaatgaatcatagatggaaactcattctcaatcttcccatccagtctagatatctacttcacttacattttgttactacattggtgtttgggtaaagacagaaagaccaggcagatgagtatttttaagctagcagtaagaacatcattttacatccttcttttgagtaacattattcaaatgtatttacactatttgaagtttactccaatatgtattgtattggctctgtcttaggagaacattggtgattgagagatttacttaagtgctaagatgattggcgtttagagcagcacacgattacaggcatggccttgactcgactggatcctaggaaggagaatgatgaagatttcaaaaaataataatgacataaaagtgtgtagattcatcaaatgagtttgtaaacactattaggccccctagaaaacaaaactaagaacaggttttggtaacacaaaattagcaattgatgcatttaaagggggtaaacagagatgttatagaaaatggtactcgagacgagacaatatcaagtatcaaaatcagtcttaaatcaaataatcttcagaaagaactaaattttgtaataacattcttaaaccatcatgaactcaaataacataatgcactgcacatgcatcattgaaaagaaagagaaaattacaatacacacattttcattcaccttgaaatttggaacaatggcaacaatttaatgaaataaatgttatagaggcaaaggagttcttaccgatgagaaatcaacatcatcgaaaccccttcctcctttttctgtgaacatacaaaacagaaatattatcaatgatatcacaaacaaccataaaaaagacaagcacaaagaaccactcagctttatccatttagtatcaaccattttcatcctcctcatcaacccacttatcccagtctactctaaggaacacaggaggctttccttcctgtttgagtagtctgtcccaccatttcttttcagctttctttatagcatatacaatgcctcttgcaccaacgttatatttgctctcctgcatgaattccacatcatcctcataaatgcattgatatcaaactctctcacactctcattcttaactcaaggaaaagttatacctcaacattgatcttatcaaagagttcaatatcaacttcatatggtattgagtccttagtagcagaaaagatgaatcttccatcaggttcaagcttgagttttacatcctttgcatcaagtaaatcaactgtgataaagattttgtccgatctttgggcccattttacatatgggtgtcgactgcaacaagcaagagcacagaacaaaagaaaagaaaaaaaaggatttttcaattcaaacctcaggttgtgaaaatgtgttctattaactaccaaagattcttgtgtcatcaaattctattgagaaactaatgtgaattactaatacatatactataaaatacaagcaaaacacaaaaagctggtaaataattccttaaagacctcaacatgttcccttcaataagagaaaaaaagaagatgactagaataaagaatcaagaacctgtaaatccagcttgaactaatttatgattgtaatgtaaggtgggtaattattaaaataaagaaataatttacaacacctgtgatgaatttttatagcatttcttgctgtcatgctttatgtagatatcattcaaactgcccgaataccaaactaaaacatatatgtgtgtgccaataaataaattgatagaaacaaaacttggttttgaaccattatgcatttatgctaacagagcagacagagccttactgtgttaacattaacaaaagttacagaaactaaattaatgtgatgtatgtaaactactgggtgagaatgaccaagaaaaaaaaaagccttgtaaaaaacataaacaaattatatgatcacctgggtttacctcattttgtatgagagtaatatatattccgagctgtaaaaatggaggcaagtagggaggattatgaagtagaaaaaggaagaagcttggcgtagtagtaaggttggattggatgaatcgtcgtagtcgattgatccttatatatgcgctgacatcagtgatcagatgttgaaggagctcgaaagttctagagaggactctctctggtattacaaattgcactcgcatttttcct

SEQ ID NO: 45185 - DNA, 2822 bp, Cannabis sativa
  modified_base (2724)..(2736): a, c, t, g, unknown or other
atataataaaattttacaatataagacaaattgaattcataatcaaaaagtattcaacaaaatattaaaaataacaatgaattaatatacaaaatacatgacatcaagaatagaaatacataatacataaacaaattagaactcaatacacgatataagagtaagcattaatgacactccttgattcagttctaataaacaatataaaaaacctctccgtttggtaaaaaaaaaaaaactccattaatccacgaacattgaactgacccattactggaaaaatagttaaaggaagtaaggaaatgcaccatttttttggatgtctactggtagagtcttgagagacaaaggagagagacggtagaaaagatggtgaatgcatatgcatggttcctctgttttgaaacttcttcggctattcagtgtcatccattgttgcttttctccaagcttggaattgtttcactatattttagtactttgtatttttatttattggtaggtatttaccgaattatataaaacaatcagtcaaaaaaaaaaaattaaagaaaaacttgtgtttaaaggaaagaatgagcttgtttgtaatcattctgaaatattatgaaaatgtttaataagaaacagctggcataatctaacctgaaggccttttttttctttttcttttttttttttgaaatagtatgagttataactttgcttcctatacaaaatttagttatagctgttatataatcattagtaattttttttaaaaaaaacaaattgtttgataaatattcacctaaattttaactaatataattaaggaattattacataaaaaatataattaatggtttaagtaaagtcatttttatcatttttgctctaaatatgttccctactttagttaaaatttgatactatttataatattttataatttaaatttattaaatataaattaatgtgataaaataataaaaaaagtaatattgttttttattagaataatatgaaaaaaaaaattagcaaaaaaaataaaaaaatttatacttcctatctattttctattatatggagctattttttttaataattggagctcatttttttattcactccctattttaattaaagaatgcgtttagaaagtataattagagatactaataattatagtagaatttggcttaaatattaaataaaatacattatttttaaataagagcattagtattaagtactagtgatgttcaatacctcttataaatagcgcttaatggtttgtcaattgtttaaggttcccttagcatttctaatggtataaattataatccgcacaaatgtcaaagttgttcagctacaagtcctaatagataaagttacacgagttccataaatataagtgtcttctttttcttttcatttccttgaaaatatctgggtaaaggttgaatatttaaaccaaaattgtaaggctcaagtaacatttggcatcattgtacctcgacttgtgaaatcattaaattgcatgaaactgtttgcccaaaatctaaacattgtgctccccaccaatgtaagacacacaagcctaattttcagacaatatttgtacagctattatattcaaatagcattcttattagatattaataatgcttattacttaggtagtactttaaaattagttagtaatattttttaaaagttactttaagttatatgtgacttaatattttattatattaataacaatatgacaccgaagaaaagagagtattagatactaatagtaccttttaactattctttcaaaataaaatagttaatttaacattattatcaccctttttttccttttttttttgataaaccaccacctttagcaataacaacaattcaacaaaagaaagaaagaactttaggcactattctcatttgataggattttaaccttataggtcggttgccttcatcaacattctattagaaatgttacacattaataaaagaaaaacaagatacattacaattttacagtaatataaaatacaaggaccaataaaaatgttaaataaatgctacaacaatatatatttatatattttgagcttgtttggtaggctaagggtcgtattgtattaaataataaataacaatatatttgaataaaataatgtattatattaattattacgaccataatttttaatatagggagtcgtattattaaatacataacaaattatccatattagcttgtattataatatttacaaaagatctagggttaaccccggtcccgaccccaaccttggaccttggacccagacctagacctgaacccagaccccggactcaaaccttaacttggactcagagcgaaccccagactcgaattcaaactcgaccccgaacccgaacatgaacccaaaccccggaccgggacccaaacccgaacttgaaccctgggcgcaaactcagactaggacccgaatccggaccttgaccctaaacccgaacccaaaccaagaccctcgacttggacccggacctggacccccggccacgacccaaacttggaccccaaatctaaacaccgtacccaaatccgaaactcagaccctgtccttgaacctagacctcggggcccgggtctgaggtccaagtatgggtccgagtctgggatccaagtacgggtctagggtcctgttggggtttgtgccctaaatnnnnnnnnnnnnnatataatcagatttactaatttatacaagatcagaaatcgcttttattttacatggttcacatgatttatttcatggttatgttta

SEQ ID NO: 45186 - DNA, 3044 bp, Cannabis sativa
taagagagtgtgtgttgaaagttttgtattggaatctgaaattatagattgtataatatataaacacttaaatgaaaaaataaactgaaaatttaaaatttattgggtttcctatagggtaaaagcaacgtcaaaataagtgcaagcgaaccaaataatgacgcgtgtgagtgataatggtggtttaggccccacttatgcagttcgcacgtgagtgagaatgcatgtcacatgattaacggacagggtaaggtcgatgacgtgggcccaaccaactcaaaggggccacgtgtagagagttgctagatctgatcacgtgctcattagccatctctctcttctattctatcccacgttgtggcttgtgcctttgccccttccttttctataaacgaggttttcttctttcttttatccaaaacttataacctcatatgcatgcatgttatggtttttgtttttctttgtttttaatcgaaacaatcacgatatcattctcacttattaatatggtagtggaaaaccaaaaatacatgcactggcaatttttttaataatagtttttatttaattagagggtacgtacgtgttatattaaatatatatatactacggtcttgattatgttatttacttcttttaaagaaggttaagggttcaaataatatatccctccctccacacctaggtaaataaataacattgaaaaaaattgataattaataacataagttaattagaaatatggaataattaattaaaatattgaaaaaaaattgttcaaaaaaaaaatattgaaaaaaagttagaaagttatttatggtaattacttcccactcttgggctcaaaaactttggcacataaagaagtactgtacataacaaaatgatattaagattagattggttgtggtcgtaattagacttgtaatgcatgtagatcaagattgaaaatttgtagaaaaattaatccacaattaatttgggggtttgagtttgagtttattaggctgactttgtatagtcttgggcaggggttattatattgttgacttttatcttgtggtttgttttgtattggtaaaacaaaaaaaaaaaaaaacaactctttctagctaactcgtcattgataaaactacgttgtagaattatgcttttttgaagtgtaataattttgcctaactatctatacattatttactcaacttgataaaaatgaatcggtttttatgtaaatgtaacaacaaaatgtgttaagttttcatcatatctgatgtatttataatcatggtgtgtggccaaattttttatttttatttattttttatttttttggggccatatatatagttgatctatatatacgtttattattttctgactgcgggaacatgggtaagcatgcataccacgtgactgggtttatgagaaggacaaagcaagtactatagggttttgtatagatatagttacagaagtttgtacatataatattaataactaacattttgaagttaaaaggaaaatgctaaaactagcattttgaatttttcaagcactaaatttggacggtgtcacgctgtactactactactgccagtgttgttgacattcccatttttttacacttgtttatatcataaatatgaaaaaggaatcttggtagtacaatttaaccttaatttaaaattattttaattgttttgttcctaaataaataaagcttattataaagttttttatcttttgcttaattaattattataaagtatttgtaatgggaaatagttaatttctgtttcatatgacatttcatagaaaaaaaaactatgtatatcctataaaatattactattttaaaaattatgttgtgggaaattttaactattgtacaaaattaaattaatttaaaatgaatcaacaaataattagtaatgataaaatcagccaaacacaatttaaaaattggaagaataataacagagtagaacagagacgataaaactaaaaaaataaacaatgcaagaaaaccataaaatcaacactaagaattatactggttcatcaagttcgatagattgatatgatctgtggctctacttcagttctggaacatcaccaaaacttcctttattgattgagcaagaacacaagtacaatacagttgagagcgattctctgtttggattctctcaaggtattttctctctaacactcttccctgagaagcttcttcatcacagaagcttcctctttacaaaactcaaaacccagctctcttttctctgtacctctccctctctctgtacctctcaatcaaaaactctctctcaaagaacttatgtactccactactggtattttgtgtcatgttctttttcaaatgaagaggatggttctatttatagacagagaatatgaatatcccaaaggcggtggcttcaaataactaagtagttaattcggttaagacttaaccgacttaattgactccttataatgagacctccaagtcaactcttggcatcgagctctttctggacatgtatcacgcttcctggataaacatcctaaactgatgaagcacaatctggagggatatcccggataggcccaaagcctactggaacagactatctggaaccacatcttggagggacaactagtttcctaaaacccctttccagagggacaactagtttcatgggtcttctttctagatggacaagatagccttccggaattccttttcggacggcgactagctttccacaagaattcttccagatggacatgctagtcttcctaaacttcttttcggatgaagactacctttcctgaagactcgacgagacattttcgtttggaggaattataccacaaattccacctagttcctttaaattaaaagtcatggtgatgaagaaagtatatatccatcatggttggtgttccagatatctcagtgtgctaatttgagattgatcaagtttaggctgtgctaaaacttgttaatgttggaaatattttatcaggatcttaga

SEQ ID NO: 45187 - DNA, 3725 bp, Cannabis sativa
ggggctccccgaggtaaaacttcttacttttattgatggtctcctaccgtccttaggacagagccaatgagtttagtaaagtttagggataatcaatataacttttatatttggaactgcattgacttaatagccaataggtttgatagttagtaacttggtaccctgagttccatgtctaaaccttgtgtaatagtttattttatgggattgcttatcaatacgggtcaaatgaatagcgagctaatgagtgggagttatctcccttatatatttttaacctttatgatatcactaagtctatggaacctagtgaccctcctattatcaagtctcctcgcactaacttttctctactttgatcaacttctactatttatgactatagtttaagttgaatttcactctcataaataaagaatgtttatgtattctttccctatttttaaccaacaccttcttttattccacagacatagacttcgacttggagaatctccttagcaaccctgatattcctgttaaacgaggtaaaaaacaaatttcttctcaagttgagaccaccgagaagcagctgtaggccgagaaagaaaaaagaaactacttagaaaaataatcctcctgtctcaagcattgttttggagaaaaataatagttcggcccctaaagtttccctctcggcccccgaggttgcaaacaaagaaaatcaaaccttggggtcagttcatctggtcattttctctgcggcaaaccttatagtggttttgatagacccaatgtgcccctagcctgtgaaagctagtatcgaaggatcctaatcctgttctcggcacatagcccaggcgtgtcgccactttttagagttttagccagtcgactgcaacttaattaaggctggcacaccttctgaccttctggcaagaagtgcagaacttttgcactcggttagtattcgaacctcttattttcattccatctctctatcttatattttttttttttttaaaaaaaaaaagaaactttggtattctttttaggcctctcttttggcgagcttgggctttcaagcccatcaacaaaagtcaactcaccttatcttagagttaggtaaagcaaatgagcatcgggagctactagccgctcaaaggagtgatactgacaaagaggtttctcgtcttaagaaggaggttaaggcactagagaagtccgagaagggtttggaggttgatgttgaaatcttaaagaaaaacctgctaggcaactcaaagaaagccaaaaggaactagatgaggtgaaggaagctcttgaaattgacgctcacgagagggtcaacaaaatggctacacattcactctatagaacttgggttgtcaataggagcatggacctcagtttcttaggtgaaaatgccaagaagatgctcgcttatttcaaacaaattgaacagtttgtgtgagtagggtctgaggaggaggaggaggaggaggagggagttgaagcaaccgagggagaagaagatgaagtcccctctaggtctcccaccatgtagatttagtttaattattttaatttttgaacaatggccttttggctgagataatatcttatcttttgtggcattcttatttatgtaattaagtttatcttgctttgttggacgaccaacttgacttttaatcacatttataatttatgttactttattacatatatttccttcactttttgtgagaaaatttatccaagtttgaattatcacaaattaattaagaaccattgtttataggtatacttaatttaataattacataacattttgtttaaattctatctcgagattcattactcgttaatccatcaagtaaagagtaaacttaaatattttaaacaaacaatttctcgattattttttaatattttttatcaattacgtgggagtatttagtcgtctattcgtacttttagcttatatattatttattaaaactttattgtggagttttgtttataataactactaggtatgcaagtcgttattcactcaggtcgcattagcttgatgttgtttgcaagattttaagtaatctagttttttcaacataggttattttcattcttgcttacaataagacttcaatgttcgattttcgttgttccgaaccaactttaatcgaatatgttgtcttttgcaaacattttatttttttagtatttccaactcttattttcctagacacctatattactatagttatcaaaacatctaattattatataattatatagccctaagaatttttttttaaaaaattatgattacttgagacaaataaaaataaaattccattaatatataaatttaagatttacatactctgaataaatcgacagttataaacatacaatcattggtaacatggtctcaaatatttgttgttccaagtattttttaccagtaactcattcagccatgctagtttataaacccttgatgctataacaacttcaattacgtatggaccttccctattcgggttaattaatctcactgtaggatctcttgtatttgctaatactcatcttaataccaaatctccaacgttgaagagccttgacgttactcttttattgaactgtcttgtgatcctttgttgatatgcaacatttctcacttgagatccatctctcatttcatctagcaagtctgaagattcttcgagtaaatgtttgttcttatcttgatataaaactctcgcctatgtgatgagatgttaacttcgactagaagcattgcttctgagccaaaagctagtaagaaaggagtatgaccagttgctatttttttaatggttcgatgagcccaaagtacctatggtaatttatctacccataatccttttagtgtgtcgagtttcttctttatagtatccttaagggtcttgttgcctgctttgacttgtctattagcttaaggctacgagactgatgaggaactcttaatgattttgttccacttgcagaactcagtgaataagtcactcccaacctgcgtggtccatacaaaagccttcatggatttcctttatgatactctcagcttctgctggtaatgcacattgaagtaatggcataagtatcctctatgatacaactttccctcgacaattgtgtatctaagtatcttgtacatgagtttccttgtctcatttttgtttgatggaagttcgtcgttcaatagataattcatgatttgtgtcatccaatttgaattcgcattaaacatttctatgtgtgcttcttctatctcacaaatacttggttcctgtaaattttcaatgggaactgagttgaggtcattgaatttgaactgtgacgtcagtttggccaatgaatcagcgttggaatttgttcaattttgaagtaatcaaatctttccaaggttttttgaactttttccaaatatttggccatcctaatccccttttcttggtcttccccaagtaattgatttacaatcaattggccactaatttgcctaacatatatttattggtacctcggtgcaactctatatgcacctcactgataccaagatatgttattctgacggtaactaacatgcacattaaacatgtatacatatatgcaaatcattctactaatcttaccttaattttgaatgcaagtgtgtcggtaactcaagtgaaaactgctgctctatgatt

SEQ ID NO: 45188 - DNA, 2684 bp, Cannabis sativa
tcacagacatgcacgtgtattatgcattaacatgattttttttttttatttttgtcaatggtattctaagaagagatactagagacactttttttttttcttaacacaatttgcaaacatacgtggtcttttaaccgcacttattatgagtagttaatagtattgtatttattgcaactcaattatattttattttaagcagtaaatatgttaaaagattgatttgttagttgagagagagaagaagagaggaaaatatgattctcattcgaataaatttgagttccaatcttgtctttaacagctttaaactagtttagaaacaaagcctttagaatgtcagctaattgatcttttgaagaaacatgagttgttttgataacactttgttgcacattttcacgaatcaagcgacaaccaatctcaatgtgtttagttatttcatagaacactggaatgattgctatgtgttgtgctgacttattgtcacaatacattattacagaccctttgtgttcaatttttaattctttgaacaaagaaagcaaccaaactaactcacatgtagtgttagccattgctcggtactcagcctcagctgaagaccttgacactgtatgttgctttttgctcttccaagagatcaaggaatggcttaagaaaatgcagtttctggttattgatcttatggtttcattccagtctccctaatctaaatcagtataggtgttcaaaaataaaaatatcccctatcttggacaagactttttgtattgcaaaactctctatgctgcatgaagatgcttggtctgtggagaggctaaaaattgactcagtttgttcactgattatgaaatatcaagtcttgttagtaaagtattgcagcttacccacaatctttctatacaccattgaatctgtaggtttatctttttcatcttgacaaagttttatattagcatcaatgggatactaactgatttgcttccaaaataaccaaaatcttcaagtgattgaagggcatagggtctttgagacatgaaaataccttatcaagatctggatatttcaagaccaaggaaatacttcaattatcccatattcttgagcttgaatcttgtgtttagtttaactataagagcttccaactctattaaatttttgctaaccggaatgacacatcaatatagattagtaagatgaggaaacatgttttgaaatgcttcatgaagagggaatggtcagtagttgagtgcttgaagccttcatcaactagggcagtagagaatttttcaatccactgtctggaagcttgtttcagtccatataggaacatgttgagcttacatgctgcatttggtggcatagtctccctcttaagactataccctagatgtatagttgtatatacatcctcatggaggtctccatgtaagaaagcattgttaacttctaactggtgcaaatactaaccatgaattgcagctaaagcaatcactagctaaattgtgactagtttggtaactggagcaactgtatctgactaatccaaaccttcctcttgattgtaccccttagctccaagcttggctttgtacctctctatcaaaccatcaacattgtattttattttatagactcatctgcaactaataacatgttgatggtatagtgaagttaccacagtccaagtctggttctgttctagttaagtgatctctatatccattgcattatctcattcagggattccatgagcttgctaaagagaggcatgctcattttgactagaaacaaataaaaccatagttttgaaacaggcttagtttcaatttagggggagtgaaactggtcacaaaagcttgatctactaccaaggtatccccattcttattattcatcacttctgagatgttagcagttgatggttttccatgagtatcagggttgtaggaatagcctatgatctcacacaacaagggatctccaaagaacacactaaagaatatcccacataaccaaatgcacaaccacacacatacaagctctgaattttctctcttttattgagttaagtaataccctacagactgagtattatacttacttaaaagtacaaatgaattagagtctagtgtatataaatatagctaactaaacatataagagtactaactgtcataactgccctacaattatgacaattgtgcttacaactctatcacaaaacagttacacttaataaacaggttttacatttcaggtcatatattctaacaaggttgatttccattattctgtccagaagaattatgatagttgttcctagatgaagaagcacctctattgggaaattttccatacaagatgcactttacagcatttagacattgtgcgacttgtcatgccgcagtgggtgtataccattttaaaattattaagttgaacacttctagtaaattgactagaatctgaagtagacttgtcaactttagtgggagaaattgtcaaacacctctgtctctcttcttgaataagtgaagcatatactttgttgatgttgggagagaatcttgcatcaaaatctgagatctaacaccattgtaagactcattcagccataccaagaactcaagaacacgatcttcatcttggtattcttggattatcttcatggctccaca

SEQ ID NO: 45189 - DNA, 2501 bp, Cannabis sativa
gttagttgaagtgctaagtagatgggttggctttcttgttggagagttgtactctcacgaggtattgatattggccacgtggacatgccacatctggtgagaaaaaatcaggataatatttaccccccaagtccttgtgtagacgtctgtgcggatagggactttctagcttagtggggattgatgtagccttaaccgggcagatcttgcagtatatttagcctttgaaatatttgatcttgattgtctgatcacattccttagcagtaagttaaaaacattaatcttctgcatgtttcttgttacatgttgcatggcaagtgagaaggggtcccacagtagctatataagctcatgggggaactcacttctcatttctcatatttcaatctctctctacaaaaaagcaactttagaaggctcctccttctatctagaggccgacgccccatagtgctccatctcttgagattttcgtgtcattctgacaattcaagcttcccatcttattcatcaacgatttttagtagtgggtaagctttcaaatctcgttcttcacttgtttatttaattttgccatggttgtttcaaaggttttctttgttttgaacattttctaattcccacattagattttaatctttttggtattttgatctgcatgatagttttaggatgtataatgtgtgatgtccagacaaaaaaagatttgattttgacatttgttgtgatttttgactctttgagtcacaaagaacacaaagaacatgtttgagttcttaaaaaacacacactttgatttgtaacacaccctggtcgaccataggggtcttgctcaaaacctggccagccatagggtcttctcatgggagttggtcggcgatagaggtttacactctggggattcatctcgtaagacgatagagtcgtctctcgagtgtttgctttgtgacatgtgtggagggagttggacagatttctcaagtttaacacgtctccatgcacctgtgggaagtattcgtactgttggtcattaggacctcgggcgaagtacctacaccaaccaccttgttcatcacataagtatttttgagtgtggagtagtttattcatcttcaccctctgaatctcatatactcttcactttcatggtagagcttatcggttcttcccctatgcctgaatgcaagtccctttccctttctagggtcatggggtgatctagagtcattggacttatgaagagaaccccacatatgagattggtttctcgcattatttgaattactttgagtagaattgtagttggtcctattagctgcgtgtggtggacatgtaggtctgcgatctcgagtctaagtctttttagacgctcacttgtagctcatttccctaatagacgaccgctccatatcaggcagagatcccataaatccacgttcttgagtttgaatcctttcgaacgcttgctcatagtacacttccttatggggaatcttaatccttgtcgcttgttgagtagtggtagtgtggctttgcatgttcatggatgattatttctttgaacttatgaattcctttcaagataaagttcctagcagagaattcaaattgtcgttggggaactcgaattgtggctctcaatgaaactaccaaaatattgacgctgaaaagtagccaatactagctcgctagattggcgagataaataatgagtttaagtaaaaaaaattagatacacacacaatttatagtagttcactccccatgccgcgatggtaatggagatacgtctacttcgactttttatttctcacaagatggtaattacagaaagaggctaagtgtttaagctctggtttctaaagagagaaactagagagagatgctttgaccttgtaggtagttttctgaatatgaaaaatgagctagatgagctctctttttataggtgaaggagatcctaaaaaataggaaaaaaaataattcaaaatatggaaaaaaaaatctaaattggctaactttgaccgtagatgatgatgtaacagtcaaaattaactttcgaggttgatagtaaattttttgagcctgggtcacgatggcgggctccgctccgggtaagtcgaagcttatttttgtaaatcccttgggggtaaaatttgaagtcgataacttcagaattgcaattcaagtgtgagacattagttgatagacaattgaaatagcttcaaaaatcaagtagaatcgtgtcaatcagatcaataatgagtgagctatggttgctttactgaaggtagttcataaccctgcgcccaagttgacatcccaaagcccaggttgactatggggtcaacctggacgctgtgtaagtgagaatacgttctagggatgtactttgtgatgtctaagtgatattttgacatcacttagtctgtttctgtgttctggcgaagttggtcactaaatcgaagatgtttttgttctgcggaaatgagagactc

SEQ ID NO: 45190 - DNA, 2299 bp, Cannabis sativa
gttagtgcaggattagctaatggtgatgactggagtgaatttttccagtatttcagggaaagcagatttgtaagtgcttcaacacttcaaaccaatataaatgcaattcatgtttcggtagtttctcatatgaattagacctcggcttagatcttttactttaattccttaaaaatcattatgctcgtcaattttgatcatagtttttaataaggttcaattgacacatacccacttttattgcagatccatgttacttgcattgatttcaccctactatcaacttttgctccattttgggtctacaatgatatgactgctcggaaatggtgaggattctggtgtccagagtttatgccttttaattatggcttaacattttgatttcccttctagtagactaaaatgtcccttatttttattttcaggtttgacaaagggtcttggcttttgtttttgtcgctggttccattcgtcggtcctgctttatacaacgtcctacgaccaccactatcagctttgccagcaacggttagcagtacaacttccaagtcagaggagacttgaaattatttcctacttggttcttcagaaaatacactccattaactgttggtggaggaaagagattaacactacaatatagggagagttctaaatgttcagtcagtaatacacattatatgatgaagtcttaaaactagttttggatactgctgaatgtacttatagaagaacaacaaacaagtatataacattgtaagatgaagtagttttcaatgtagttacacccagtattctttttccattttattttttttgtgacattccatttagagcagtgtagttgttgttgcgaagttctggacatttcttgactgattttactagaaatctccactcttttcctaaaaatacttaagacattttctaaaataaaatttgtgtaatttaaggacttcaacctctcagggttgtgtttcctgggcgattgaatttaaagtttccctgtgctcgttatatcttagaagcattctaaatatataagactgaattgcatacaaagagatagtaaaaacgagtatcatcaaatagcttgatagctaaggctccttgggaatagtctactagtaaaactataaggttgattttgaaataaaggtagttggcaataggcaatagcctatatcaagtgtgttcattcaattcaatccgcatcattttactcatagtgcatctgatccgcactagataaagattttatattttgaattcaattcaatctggataataatatagatccaatctaatataatccgcaataatacgaattggaataattattatttaatatttatttaaaaattatatatttattttacataactaacaatgaaataaactaaattattgttggtttatatttccaaaaataaataaaaagatataaaacaaaaaataataaattctaacaaagaaaaagaatgtttgtaaaaaaaatgtttaactttattttaaattgtattattttgttatatgtatgggatatgcatttagtaaaatcacggtaaatataatatttttctaaaacactcccacaatgtgggacaagcacacacaaaaaaaaacacttcgggttttttttttttatttttaataaaattacaccaaacataacatttattcaattaccaaaaatactatgtatcatgggactaaaacttagcagcattacagagaccattggtattcctttaaaaatttgaaaatttagccatatagatcatcagaaccaaggacttttattaaaagtacaaacaagaaaatagatgatcatcagaccaataatttaacatgagctcataaaaaataagcagacaaaaataaagctcaattctattgcaacaaatttgtttgaaaatatccagttgcatgttgtcagaaattgagcgattagaacttgtatgtcattaataatacaaagaaaatataccacaaaatccatccaatttaacattggaggaacagatccactggtttatgcatataaattctttagctcatctttgaacttggctttcagctgttccctctttatctttagagcagcagtaaccaatccagactccggtgtccatggatctggcaacaatttaatctttgcaggaagttcaaacttgtctagttttgcagcttttgcaacctgcatgtaagaaacaacttaaaaagacactacaatagaaaaaaatattctcaataaaactaaaattatggttagctccactttgtttaaagatag

SEQ ID NO: 45191 - DNA, 2366 bp, Cannabis sativa
gacgggttgattgagttttgagtttatgggttttgaactaaaataaaaagcatttactcgcctataaaatgaccgggttggccagattcacaagtgcacaagttggtaaaagttgttttttttttttgtttcaaataatttgtaaatgatattataaataaaattaaatttgaaacataataaaaaaacaacatgatgttattcttattgttgttgcgaaagaaggaggagggggtagtggcgactgggagtagtggcaaggctagtttgggtacaagggtgaaaatcgatggtctagtccaagtgaatcacaaggggaagatagagaaggagaggggggtaagtctccagcaacctgagagtaggggggtttggcttgaatcaaagtggaagagagggagagggggtgggggtggggcaatctggtcaaaattaaagtggtagagaaaaggagaggttatgggcgtgtttgagtctaacttggacctggtcacatgtgaaaactctacccgaactcgcccgttcattgttcattgtgaccaggttaagcctgacacatccattttttatcgatttttttttccaagaattggattgtacgagtcaggcccaagcaggttggtcgggtttgtacccaacccagcccaaatgttcaaccacatgacattaagagaattgtggaaaaattacaactaatgtgcaaaatcaaatcaataaacaattagcattgacaagattaacaattcacaaacgataattgaagataaaatagggatgaactgagtattgatatgatcaatgtgatctacagctctactctaattctgaaataccactaaaatcttctttattgactgagcaagaacaatgtacaatacaatagagatcgactctctgttagattctctcaaagtgtttatctctcacactcttactcaacaatcttctttatctacaaaaaattcttcatacaaaaccttcgtaaatgatgagtatgatggtatttatagatctaggatatagatcctaaagtgatcgatagttgcaagtacaaagttgttaaattagttacgacttaaccaacctaacaaactccaagaaacaatatctccacgtcaacacaagcaacgtgattccagatgagacgtacacttcttggaaaaaagaccaaagcgtatgttgaagggatttctaggatagaaaaggcaacaactagagttaattattcggaactcccttccaaaagtgaacaactagctagccattcagaactccattccagaggaagactaacttcgtaaagactccttccgattggacacgatagacttctaggattaatgcccttctggacgatatctatcttattatgagatttttctttttttggatggacaaatttcgaaaatgcctttctgaatgacatttaactttacataactaaaataatttttgaagatctcttcatttagataaattataccacaagaattattcttcatatacataattttgtgtttaattaataacattatttctattatattcttgacattaattatgaaaaacacaaatctaatgaaatctactcatattttatggctagaggtgtatatatacacataaatatttgtcactttcatgcacctaaaccaatactgaaaattattattatatacacaaatggattattttgtggtaaaataataatgttgaacacatgatatgttgtgcagacttagcttcaagacaattccatctaatatatactaaattatcagtatataattatttaagttcccgatatattatcaaaaataatctataagatacagttctgaagtgaagtgaattattcttaggtctcgatatgaacatcaatagtggaatacaactcatacacacctctgttatttatcacgtgctaattaatatatttatctatatataatatatattgtatataatggaaaccctagcaaaatctactactgtaactgctttgagaacagtgtgttatatattttctttgtaaaatggtacaatttttttactatttgggaggactgaattccttggttataccatttaccaattataataaaatgcatgttgttctcaataaataataaataaatttctcatttttttttaattaataaactctttttacaatttcgagttctgatttcatataattaagtatatattgtagattaaggcacactgtaaagtgtgttcaatttatatttatatgtatattattatgaacataatatataatgtagggatattggcggttaaaccacctgaactttacggtttataacacttaaccacaaaaactaaaattttggcggctaaac

SEQ ID NO: 45192 - DNA, 1043 bp, Cannabis sativa
taaaagaggaaaaaaaaaaatttggcccctggactaggtgggccctaggcacaggcctagcccgcctatgccagggccgggcctggtaaagaggttaccattggatttgttttatcaagtaaccaaggctcacaaattttaaggggtgtaatacgagaattttttaagagatcactcatcttagtattactttcgctcaagcacgcttaattacagagttatgatgaaatctggtacattaatgatagtatgatttttcaataaattgataactctttgatgattttaattttttttttaacgtaaggtgatttcaaattaaacacaagcaacacagggtgaaattaatattttcgttattaataacgcgttcgtcaatgaaatattcttaattaaaacatatatattatatactatcttaaatcatttttctaggtagaatagaaagtactataaccaattttgtttctttataacagtagtatatatgcaaatataaaatgtgaaattattacgtatatgtgaaagcaaaggtagcattgcaattatagattgacatcttattaaagctcagtaaataatttacgtgcaattaatggctttataatatgtccttgttaacgcactaactacctatataactaagaaatgtagtcattaatcatgatatgtttttgttaaaataatatcccaccgaactccacttaaaattaccttttatattattatataaatataaatttaattagaatgaagggtctcgtatcctttttaattaattcgtagtgccgtcgtgttgacttaattgaataattccaaatacttactgtcaaaaggattaagaaaaattaatgtagtcaaaatccaccgtcacatacatatcaatatccaactatataaatatatagatcccttctccaaacattaatttaatcatatttgcattatcttaaatatttcttaatttgcatacatcaaaagtttatagtgaaagtccaacatttaagcaaatggtatataattataaccaaaaaaaaaaaaaa

SEQ ID NO: 45193 - DNA, 1366 bp, Cannabis sativa
ttttctgtactacaaaatatattcaactaaggtttcttgaataaattaacatccaatatagttgaatttcaatctactttgttttttttttttttttttctttttttcgtcatttatgtagtaatgatggtagatattagagaactttctcttttattttcatttttgttaaagtgacatttttgggaggttatacaattagggggacatggggtcaacatcttattgtataaaaaagcgctgtggaatggtgtatggcataaatgatcacattggatgccagacagacacattaatctgtatgagagaaagaaaactatggttcttgtttcttttgccttacccttttttcttttgagagctttgatttttccacatgcaccatatattgcctggaaagctagcaatgattaggtgaaatcatgtgaagcagataagcaaaaaataaaataaataccttacaagaaaaaaaaaatgtcccatccaacttggttggttggttggttcagttttgattaataagtagccatattgcccattttcatacttagtccctgattttgagtccaaatttccaccataattttcgctctacaaaacttattcatccactaaaagtcaagattacaaagaagaggaaatatagattgcgctttgtataggtactagtactataaattatccataacttgtgcttcttaattgaatgctttccaggcaataatactatacatgtacatatatatagatatattagctggactttcaaatagatttgcgttgattataaagataaaagctttgtagagctggttgaacatattcaaaaaaaaacaaaactaaaaagggaagagaactcatctcttgatttatcattatgaagacaacatcacatctacactttccctatgtagtgggtaaaagcacctcatgttcttgctcttttcttatcaacaaactacattgacattccctccaaaaataaaaaactacattgacattacaacgatatatttttatgttcatgatcataatatatattgtggtgaattaacatgtaatcaaacaaaacaaaaattgaagtactaaaatggttgaatcaacaatgaatataaaccataaaaaaatgtggaataaaactaaatgaaatgtgacaagatataaccaggtttatcaccccttttagtggtaattaattccctgaaagaaccactactacaaaatgggtttctagtttccttttttttaatccattttataaaaaggaaagctaaaaggtgtaaaaattcccgattattgaaaattgacctttagagtttttttttttttataaaaattatatgtatagaattgcattataccattt

SEQ ID NO: 45194 - DNA, 1566 bp, Cannabis sativa
  modified_base (56)..(72): a, c, t, g, unknown or other
gtttatttcattattttaaaattcatattaggatgttaatgaaacatacatggtannnnnnnnnnnnnnnnntaaaataatttccaacatttccatctcagcatcataactaggcactgaatattctgcagggttataattttgttcaagtaatctcgagtaaggagttgcgagttagcaatctgccagtacaaaacacgttgcttaggcacaattaaattgtcccaaacagctcatgcatactcgactttagtctcctccactagcaggttatagtacttatttgctcggaattttacacctgtcacagcaaggctcaacttggtctcatccatactatctcaaagactcaacaatttcttgaaataccagctaacatccagttttttaggatagctccggatttcatggtctttcaaatagatagagttgatccatttaacccacaagcaatcttgtttattagctagagcccacaaaaatttcgccataagagccttgttccactttttatcttctcggaaaccaactccaccaagactttttgggaggcaaatcttttctcaggaggctcggtgaagcttacttctattccctttagtaccccataagaagtcacgacaactcttgtctatggcagtcgttatttatttatttgattgcattaaacttgaattttttcataatgtttttaggggttttgaaacttctgaatttagtttaaatttctaatttactcctttcttggaaacatgtcttgggctaaaagctacgagcattacaacttcatattttatgtatttattttgttttaaaaaaataaattatataaaaattcttatgcccctataatgacttacaaattttctaagaaaattgaaaataattcttacacccaattatcaccatataattaacaatcaatcatgaaactatacattcacaataatcataatcatccattcacatactatcatatatatataatgcaagaaaactcaaacaacactaacatatttatatatggtataagctatgatactatttgttggttatatggttcgtgtatcgaaaatattttaataaagattatctttctaccacactctatgtatatatactaaatcgaaaacgaaaaagatgaatatgaaagttatctcttgatgatctatcaagtattcttcccatattttagtaaattgtatcaaagaacggtaatgaactcacaccaaatcttccaaatcaaccactacacataaggatcagcttggactgataagatacacaaaataatgtttttggaatttcaaactcatgagcaagaattattttattggagagaaaaagtatatgtatattcaattaatttaacttttttgggttttttaaatgtatcatatatagatttagaattatactggtatatatattaattataactaataaaataatagtaaaaatttaattaaataagatatttatttattttaaaaaataaataattatattataatatctaaataaatatatgtaactaattattttatagatattatttttaaattt

SEQ ID NO: 45195 - DNA, 1255 bp, Cannabis sativa
atatatatcatatccttataggattaggtattctgtttttatataaataatacattagttcttttaatcaatacacgcaaaacctaagagtacttccaagatagcaaataggttctcttcttccaaaatttagtgacttaattattaaacttacaacaccatgaacacccctaccatttacaacatgactgtagatctagatttagattcaccaaatgattttttactatcaaactctttggcccaactaaacaataacttcttagtttttacactaaatttttgtcatcaattgttaccttttggagacattactcaaagagtacgtaaaagaatatcaacttctcgtacttcatatttttatgatcctttcaacttcattagacgtattctacttgaacttggcgtgacagattcaacaattttattttcttttaccaacgaaatagaaactagtctcatcaatattctcaacgatcctccatttgcagcttctaaaatcgtttttattaatatttttattattgccacaagtattccagaacaagaagaagaatcgaatatcattgatattacttttagggaagcacttaatgctattccaaatgttcctgcaacacatgaatccattaaaaaactcaaagaattgaatgaggacgatgatgatttattagtctctttgagtaacgacaataattgtaccatttgccaagaaaatttattgtttgaagattggaaaatcgtagagatgccatgttctcatctttttcacaagaattgtattgtttcttggctaaaaattaatcatttgtgccctttatgtcgctactcgatgcctacttccaacaacgttgctgccgctgaaaattaatattgttgtcaacacaccaacaggaccactaccttgtcttgattttatgaacactcatatcctatctatatatatatatataaaggagagatatgaggtagtgacatgtcactctaagatctcttcaattagcattatttgttctctctttaatttttagtttttaaattttttattagttttgtaactccaaaatttatatttaaaaatgagtatttgattcgtattattgagtatttatttttttattttaattttttattagtattatttaaagttacgttttttgcttttgtttttttttcttagaattaagattaaaatgatatttgcttttttttttttagaattaatatatttaaaaataatattcttttaaaaaaa

SEQ ID NO: 45196 - DNA, 2332 bp, Cannabis sativa
ctgcaatttgtttgctagtttcaacatattctaagacaagaattttatttagctctgtaataaagagatctcatttgtcaatatgctaagtgcaagaatatggaacatgattttttgaaatattataggacaagtattatcatagaaaatagttaaagctttcaaattaaacccataatcttccatcatttgattctaacataacagttgggtacaacaactacctattgcaatgtactcagcctctatagtagatagagagattgagttttgcttcttactatgacatgaaacaagattgtttcgaagatagaaacaaccgcaactagttcttttcctatcatcagcattacctgcccaataagcatcacttaaacaaactagattagaattagggtccttagaaaactaaatcccaaaatcaacaatactatttacatagcgaatgattattttcacagcataaatatgacattctatgggattttcctaataacatgcacaaacaccaacactatagaaaatatcaagacgactagtagtaagataaagcaaactaccaacaatacttcgatgcaaagtggggtcaacctttactccttgttcatctttggataatttcaaagttgtgctcatatgagtattggtatgtttggcattttcaagcccaaaccttttcaccaagttctttgcatatttactttgagagacaaaggtacccttatggattgtttcacttggagacccaaaaaataggtgagttcacctaccatgctcatctcaaattcttgttgcatttaagaaacaaaaacctacactttagagttagaagtagaaccaaacacaatatcatcaacatatatttgagcaacaataacatcagtattaatgttttgatgaaaagtgttttatcaacatttcctctatagtcatgagaagcgaaaattcagttagatgctcatactaagcacgaggtgcttgttcatatccatacaaagtcttgtctaacctataaacatgattaggaaaatgaggatcctcaaaccctttgagttgttaaacatacacttcttctttcaaaaaatcattcaagaaggtaaagttaacatcattttgatgtaatttaaagcaaagaatacaatctatggaaagaagtaacttgatggattctagtcttgctaccagataaaaaatttcatcaaaatcaataccctcaacttgagtgtatcattgggcaaccaatcttgccttatttcgaatgatagtgccaaactcatcacttttatttttaaatttcactttgttccaatgatattcacaaatggcggtcttggaatcattgtccacaccttgttccaaatgaagtgatgtagtttatcttgcattgctatgagtaaatcttcatccattaaggcttctttcaaaggttttagctctaaagaagaaacaaagcaaaagaattgaattgtattagcaatttttcttcttgttaccatgctttcgtccaagtttccaaggatgagatcaaacagatggttccctctggattggatcagtgatcacatttgaaggatgctctaattattttattgatgaagattctagtagaacaacatctatagctacagagtcccgcaatgtagtctcagctacagcttctgtggctctatcgatttcattttcctcagcagaaagctattctagcaactcttcaatttgttctccggtttaaaactcggaaaaatctttttagatcatcaacaacgacattagcagattccattattgtttgggttctcatattatacatatgataagccctaccatcaaaggaataccttaaaaaacatcttcatcactttttgaatcaaattttgcagtgtaatcatgatctctcaagatataacaaacaaaaccaaatacataaaaatgacttacatttggtttcttacctatccagatttcatatggtgtcttgtgagtacttggacgtaagaacaccctattggtaatatagcaagaagtgttgattgcttcagcccaaagatgccttgtaagcttcttacaattcaacatcactcgagctgtaaagactacttaactataatttggaaattagtgaataaatatggtttaattatgaaacttgcatattagttatgaattatcattttatggagatttattttgaattcagaatgcattatatatgtcagatatgaaattttatatttttgcatactttgtgttcggcaacatcagaacgcggcgtttggctattcgaatgacattttagtatttttgttatagcgggacaatatagttagacatt

SEQ ID NO: 45197 - DNA, 1477 bp, Cannabis sativa
catatgttgaactatataataatataattcctcaattaactcataattatctagttagggttttggtaatccttttcttaatcccgggtattacaaaggatatggacctttcctacgtttccaagctaccattgatgtttctaaacctctgcttagaggaaagatggctaagatttgtgattttagggaggaattctgggtggaattttgttatgagcggctccctgaatttggttttaaatgtggtatcataggccaccttttgaaaattgccttgttttccttaattaactttacaatgggatagaaccatctctttcttatggaccttaaatgataggctccccctaccatcttcaggttatgatcgttacagaattgactttgggaagggtaatgtttggcctcttatgacctgattggcaaaaaaatctttcactgctgctgtcccacaccttgctgataggtcgtctcctcatccttttcctttaactgcatttgaatcttcctcttctccgaacaacaacttgcttggccatcattccatcaacaataggtcctatccacaatcacatgcttcatttgatgacactaatcaagaagttttttgaaatgccttttccttcctacttacctttatctattcctactgtaacctcaaggatatcatctatttccatttctacttatcctccatcaaccaatacaggcagcactagttcacatttatataatgctttcaattctctgccccagccaactgttactgaggctacaactgtcttaactttttctcttcatatggccaatcaaatcaattttcaaagaagtaacttggacgtccatgaccctactgctatgaataatctcaaagagaatatgtatcctaataaagttcgtaagaggcatgttaaaattgaatcctttcgaagtgctcttaaccaatgtcgtttcaacaactctggtcatttaaatccctcaatatcaactaactcttcgaatgaatgcaagtttttggttttccatcagattcggcacagcagtagtttgaaaattctacagtgattgttgaagatcattgcggttcgccatgaatatccttagttagaatgttaggggtttggggaacccgtttgcattctgacatttacgattgcttgttggttggagtcttaaatctctacttcatctgcatggtcacataattgaaactgactctcttctggcagttcaaggattgaagaattcgactaattacctttcagcgtttcaagccattctcaatgatatttaccttcttgtttccaatttctcacgagcacaaatgttttatgtttatagatttgctaataataaaacctacttattggctaagtcagaaggtatttagttggaaaaaattccatctctatttatgacacttatgtaatttattttaaaattaatataattatcttctctcaaaaaaaaaaaaaaa

SEQ ID NO: 45198 - DNA, 1869 bp, Cannabis sativa
atagaatattggaatgctatttttatttagtgaggaaaacaggattatatgctgtttctttttttagtgcttatttttgggcatctttatgatctttatatgtatttgaaactaggattcccaatattttagacacgggtcttttcctttttcttcccccaccgatttttgtttctctttaacgaacatcattgaaaacaaaaaaaatttggttgattactattttcaacttaacacaaataaaatattattgatttgctaaaagacattataaagagtgttgggtactgagtgagatcattgagttctcgaagtattgatatggaatttgaagaaactttaaagttttaatttacatttgctagataagttcacaatgggactgtgataagtggttttcttgcacaaacacacgcacacctacttatttatcttattgcttgagattgtcaagtaatctgcctgatctaatatctttttgcaattccttccaacagcactgaagataatttccgggaggatgtttctcacaatgaagagatgtttcattcagaacagggcgaacagggccaaaactctgatgacaaccaaccaacttacagggctcagccaagctccacctacgttaattatcattcatttatggacagaacacccagtacaaggtggtcaaaaaacgacacagaacttttctatgaggtaaattcattaggcattgttgatttctattggaaggtcacgatgttgtacaagctatgtgattgcttgaaatgatgtattgaagttatagtttgtctgccataagtaatatgaatttgctcagaactttagcatgtttgttgcatttagtcatttgctgactttgattgttcacatttaggtagatcttaatacttttaactaatatatgcttaacatgtggttcaggctgttcgacaaattgggacagattttaccattatacaacaactttttccaaatcgaacacgggaacaagtgaagttgaaatttaagaaggaagagcgtcaacatcccttgcggctatctgatgccctgactaatcgcacaaaaggtgaggagatccttatttattgtgcttctctctactttaagtgatgcttgtttcattcattggttggatgaattgacacacttatttgagatatgtgaaattgattctttccgtcctccacaatttgcttagattaatgacatttcatattagaagaattagcaggggcacttataaatgcagtatcatgaaatgcagaccaaagtctttctatttgatgagatgagatgcaaaacctgattctagaaaccagggcctgataaacagggaaatctttctctgccagtatgaagttcatcgatttgcttcattaaaatgtcttatagagttgtaaattaagtaaatttcaatgtctgttttgttgatgcagttatattgcttataggttcgtgcattgggaaaaagataccagtttcttgcttctcatatgatttttatgtgagtttgcacatgcaaggctattttatttttcccttaattattataatttatgcacgcagatcattcccatttcgagtctgtgatcaagcaactacaagaactcactgctcaagcaaagcaagacgccaacgctaatgagtccaattggtacccaggggatgaagaagtggaggagcctacccataatgctaatgtatgtatttgtcccacgaactaccataatattatggagaattgtatttcattagtctctaattataatatacccttagcagcagtacaaaatacactattaagtccagaagcacattaccaagatagggtaaaacacttggtgtacacaactgatcaaaaca

SEQ ID NO: 45199 - DNA, 2653 bp, Cannabis sativa
gtgagcgtaacacgcgggtctgtgtcatacagacaaatgtgaaatggcattgatgtttatgtgatgtgataattatgattattgatattttatatgtcttgccgggttgggcttggctcggacccaaacacgaacttgtactctgtgacccgaaattggaagcggaatcggaagcgaattgggacccgggaacaagaccagaggactaagacctgatgtcggtcatggaacttgaaactgactaggaaccagagccaaacctggaccgggatgcggacccgaattaaaattgggatcaggattcgggacacgaacccaaacccagacacggccttggacccaaatgcaaacgcaggacccggaccgagattggagactcagacatagacctaggtccctaacataaattggggacccaaacccgaaattagaaccagaatcaagacccaagactaggactgggacccaagacccaacctcggtcttggtccaggacccgaacccagacacggacacggagcgggacccaggatgcaaatcagacctgaaccaaacacggacctagacctagactactcggacccagacccacacccaagccttaaatcgtaccctgtgacccaaaattggaaccgcaactggaagcggacccttacaccctaaaccctaaagcttaaactctaaatccaaaactctttacagttacccttaaaccctaagccctaaaccctaagcccgaagccctaaaccctaaaccctaaatctataaacaaaaaactctaaaccctaaaccctaaccttaacacggcccagacccataccaataccgagatctaaacccaagacccagacctagacccggatccagacctaaacctagaccctaactcaggacatgaacctggacccaaacctagagcagaacctcgtcccggacctagaccttgactgggacccagatcgtgaccccgagcaaaactcgaacagggacctagactcagatagggagccggacccagactcaaaactcgggatccaaactctaacatgaacttggacctagacgggtacctaggatctggacctagatggcggacctgggccccaaacctgacctagacctggaccaaggatgcagaccttgatgggggacttggacccgaaactaggtccctaaaccagggtcgagacccaaaactcgactccagactcgagacacgggacccaaccctggacctagaacttagtacctaactatcaggacaaaaccccaaacccgaacccaaacccaaactttggaaccagcccaagacacgagacacgaactggaacaagacagggatccgaatctagacctgaggcttagacctgacgcgcagtcagtgtttgaatctaggtaccgcacccggaatcaaaatcggacaaggtctaggactagaccctagaccttggacagtaatatgacgcaaactcagaccaaaacccatatcgggacttggacccagatcgagcctttgacttgggacctaaacccagacacggacctggacccagaccgagacccagacccagacccataaactagtgccggacacatgacctaagaactagactcggacgtgaacccaaaccaggacttggactcagaacgggactcgagacccgaacccgaacttgaacacgaacttggacccataccgggacctaggacctgaacatagatgggggacccagacctgggaattgtgcccccaaacatggacaagaacatgggccttagaacttcaatcgagatccaggacctgaccctagacccaaacatggacttaggacccaccacgggacttgggatctgggaatccatgcttggactcgacccgtagttagtgtttggatctgggacttagactagaacccaaacccaaactcgaactcaaaccaggacccagacacatacccagaccagaacccacacctggacctggacttgaacccagaaccgaacccaaccttggaccctaactgagatcgaaacccaaaactaaacctggccccgaacccagatcaagagccgaacccagactcggacccaagctcaacccgaacccgtaccccgtgacttgaaattggaaccgaaacaagaagcggatcgggacctaagaccaggacctcgacccagacccaaaactataatccgaccaggacttggactcgtacacaaacccaccctgagattgggtcccaaactttaatccaaacccgaatcgggacttgggacccgaacccacaccagaactcagacccgaacatggaataggaccttggaccttgaatagggatcaagacccaaaactgcaccctagtctcggtcttggacctagttcgagacctagaccgagacctggaacatgaactgaaacaaaactaggacccgtgattgggatccagatcttgtctcgagatctgggaactagggcttggaaaagacccgtagtctgtgtcttgatctgggactcggacaaggacccgaagctggacaaagaccaagacccagtcctagacatgggacccgaaacaaaaacttgaaccagaactagacaaggacactggaacaagaccgagactgtgaccagtgtaaagaccgcttagttta

SEQ ID NO: 45200 - DNA, 1985 bp, Cannabis sativa
gcataatgtaagcttcttgagataagccaataacttttcaattcttaccatgataaatctcaatccctaaaatgaaagatgcctctccaatatacttcatatcaaaaatggtaaacaaaaatttttttgtctcatttagtaatgaccaattgctacttgcaagtaaaatgacgtcaacataaaaggcaagaaaaatataacgacttccactgatcttcatataaatacacttgtcaaacttgttcttggtgaaaccaaatgatttcacaatcttgtcaaacttcaagtaccactgacgagatgcatttttaagaccatagatggatcgtttcaatttgcaaagcaaattgtcattcccattttcttttaagtcttcacgttctgagatatagacttgctttctcaattctatattcagaaaagtagttttcacatccattttatgcagatataaaacaaaatgtgcaattaaaaccataataattcgaaataaatctttagttgaaataagcaagaaactcatggtataatgaataccttctttttgggtaaagccttttgccactaaacgtgctttatacctttcaatttgtcccattttatccctttttagttcttaaaatctacttataacctattggtttaaaatcatcaggtaatagaactaactcccatacatctttcaccatgggctcaatctcaccatccatagcttctatccattttgaagaatgtggattattaagtgctttactataagtgagacgatccacaaaatgaccaatatcatattctccttctccaagataaataaaattatcatcacacactgttaatttcttttgtccttgagatcttcttagagtaggtgctagtagaatatcttctatttgttgatcattactttcaatgacatcttccacaactggaatttctccgataataggaccctaatcagcaatagaacattcttcaataataggccccttgtcaataataggtccttcaacaataataggaccatcatcatcttccatatcaggagtattatattcatcaataatgggagcattatcaacatgagcaggaataagatttttattattatcaactcttgaaaaagacataggaatgaaaatttcctttagatgactcccaattttgaagagatgtcggaatatttttagcaacatcaaatttcaaaaatttagcagtctgagattcaacaatttgcgtaccacgagtaagaaggtaaaagtgatagccctttgattgcattggataacaaatgaaaaaaccatcgaattattctcagatttaacttttttcaaattaggatcataaatccttacttcaactagagaccccatacacgaagataattcaaacaaagctttctcttattttacaactcaaaagaagttttgagaacagatttacttggaatatgattcaaaatataagtagcattcatgagtgattttccccataagagctctaacatatttgatctgcttatcatgctgctaatcatgtccattagagtgatatttctcctttcagcaaagccttttcgcttaggtgaactaagtatagtgtatcgagcaactatattattttcttataaatatttagcaaaaggccatgtgtgttgtccaaaatctatataacgaccataatattctcctccacgatttgaatgaacaattttgatgactattgctaatttttccttaaactcattcatttaaagattttgagttcatcaagagtgtcagacttttctttaatcaagtaggtgaagccatatcgagaaaaatcatctatgaagttgatataatacttatttctgcacaatgtagtggaataagatccaatgatattaatgtggataatttccaataaatattgactactgttgaccgaggttttcggcaaccaataaaatagtaataatttagagagctgtaagaaattaagaagga

SEQ ID NO: 45201 - DNA, 1514 bp, Cannabis sativa
  modified_base (1319)..(1330): a, c, t, g, unknown or other
  modified_base (1381)..(1382): a, c, t, g, unknown or other
  modified_base (1466)..(1483): a, c, t, g, unknown or other
aaataaaatcatgtaattttttgtttcttattactagaaacattgggctgagattaatgggctaataaatgggcagcagtgagtgggctttctgtagatccatacttatcagccacgtaatggtaacagactagcgtatgactagtactaataacataacatggacttaatcaacccaaacaaacaaacactataaatcaactcacttctaattactatacaaaacaaaatactaccaaacttaaataataataataataataataataacaaaaaaagaaaaatgagtgatcatggaacaattccatctcattcctccaaccctcttctctctaggttggatcgtttagatttcattgtgagtataattaattaacatatctttctttaaatattatttgtaatggaattaatttgatgatttatttttctttttatgtattatagatgaaatatttggaaaggaagacaaagtttattgaaggatccaataatattattataaaaaataataatgttaaaagtggttataataattataattgtggaagagtattaatggaggagatggcattaaagaaaaatgatcatcatcatcatgatcattatgatgagcttaagaagggctctaataataatttgtgtttgattgatcgtgttgcatcacttgagaccaggcttattcaggttcatctatatatcttttctcttcatcacttattattatcatatgtatacaattcttttctatatatatacacaaatatataatattggaattaaaagaagttgaaaaatgttaattaaagtttcattattttctctcttaattaattttgtcaaactagttgtttcataaaaaaaaattactagactagttatgttatatatctatatgtacgtgtcacctgtttgtattatctttcatgaattttgttgtaataatatgcaatgtataatatttatttattacgttattacatacatatatattattcttgtatatatatattattgaagaattaatttaaattttactattaatatttttattttcattcaacaataatttatttttattttgtatttatatctatattttgtattcaaaagctcaatatatataacaatacatatatatataaataaatatgagcattcttataatattactaatgatataacttaggaaaaataaggaagagatcatgtccctaagaggggattgtacttatcttttaggaaactaaccttacactggcgataccattgctaccattgctaatgatatataaaaggggaattactttatatattannnnnnnnnnnnttttttaaaaaaaatttacggtttgtgtttctaaagtggttgtagcgctanntgcaataggagtttctatacgatttttttttacaatttagttgtagcgctagttgggtttagaatttcataaaaatacaaaaannnnnnnnnnnnnnnnnnaaaaaaaaaaaaaattttaaaataaaaaaaa

SEQ ID NO: 45202 - DNA, 2114 bp, Cannabis sativa
cagatgtaaatgcttcctttgtttgtagacattcccttctcatcatataaacctagaggaacctattacatacatacatatgtaacataatatatatcaatcaaatatgattctcataataatgataagaaagtgtcagatctaacccaagacatcttgagtaatgtgacaatatatttattaaaaaataatctaaaaaaatgaaatataaattaataaaataaaaaaattatagtgaaaaataggaattttgtaaaatttggtaaaataagcttaataatactcactcaacacacaatattttgggatttttataaaaatactggattttgaacaaaaatttacaattttactgtcacacaaatttttttacaaaaatattattttttataaaacaaccctaaaacaacaaaacagaataattaaaaacaacagtaaaacaacttaaaaacaacaacaacagtaaaaatttaacacagtatacagtataaaatttacacagtatttttgaaaaaaattccaccctacagtaaaaaaaagaaaaaaagttgaaaattacagtatgtagtgtaaaaattcccaatatttttggcccaattgggccggttctgtctggacatgttagtatgtaacatatacaagaagtgtaatgtttggtatttttaaaaagacaaaaaaagtgtataaattcaaaaatattaaatatttatacagcaaatattttcatactatatttatattaccttagagagccagtgcaaactgtaggaagaatatacaaaatgaaggcagttattggggaagagtcttccatagaaggagccaggataagcccctatgaagatagaaggagtactattattattattattattatgctgtgttaattcttttgagaaatctggtaatgatttaaagatggaattgaagtcgtttgttggaaggtcatttaggtaaatatgaaaatctggtggtgaaaccatattgatgatacgacttgtcgtttggacagttttgactatgtctttgataatagataaggtgtttggcccagaagaacagcccagatcagctattcccaatacttttggagttgttgtaagataaacttctttcactacttcaagggttatatgtttcaccatatctgagcccttcttctataaaatttaataataataattaaaaaaaaaatttaattaaggtaaataaatgaaattaaaagagattagaggtataattaataagagtacctgtagagaagaattatttgtgtagctagtttggccatttcctccagtcatatggaaaacattggttacatccatgatgatttgttttgggttttttcttctcttcttctttatctttttaaaggtgagattaggctcaataataatatgctaattagtatattatataatgacttttattattaattatatatatatacacaaaaaactactactactaccaagaattatatataatattttggacatatatgccttcttgattctctatttttttatgaaaggatgctttcttgatttattcatctttttctctcaatttttttaatgtaactaattagttaatttgtattattttattattagtctttaatgatgagactattttattacagcaaatgtcagcatactatttaagtttgttattattttatggttaatattattgtgttattcctttatgagatatattactactcatatttatgcaactataatatatatattacttacaataaaacatgaattgagctttgaaatatatgcagactccctatgccattatattccttgttttttattattatctttgttagctgtgtgcatcttaactatatgtgactttttatatgtcaaaacaataaatattaaattaatcagattagtacatacctgcaatattaccaaaaaaaaggttaagatatttcatgtagtgtttcattgttggatactgttacattgataatgtataaacatacaatttaaacttaaataagcctaaatatttaaatttgatccctttttcttattttgtgcgtataggatggaaccctaaaatcctcacattatttatatatatat

SEQ ID NO: 45203 - DNA, 1159 bp, Cannabis sativa
cgacgtgaatagtacccaaattataggacgcgtctgtttaaaaacgacactaataatatttaattagcgtcatttggtaaaatgacggtaaaagtaaaaccgacgcaataaagcaaaatttttaaaaaacttgcttttatctagcgtctgttagtaaatgtctattattgttttttcaagggtttaaaagagacgcaaaatgaatttgtgagaaatataaactgaggctaatttaataaataccctataacacaacaaacacatcaccactactgttcatacacatccaaaacctaaactcttcgaatgctctggcgaaaccaccctcgtcccttccgatcgtccccttcgaatccgaccaatgctttctgaaaaccagccttgatcctgtcggtcgtcctctcgaaagtcagcctctcgtcctttaatttcgatcgtccccttcgaaacttgccacttgaaccccttcaaatccagcccaaaattttgagtgaaacattgcttgtttgcgcattttaattttgtatttggctaacaagagaaggttttgaatccactatttgagaagcgtcccaagcagttcggtattggagaagctttgccaccaaagagggatttaaacagatttgtcaaatggccaacgactgttcagctccagaggaagaagagaatccttaagtagaggttgaaggtttcaccacagttgaatcagttcaccaagactttggaaaaaaaaccttggtatgatccgtaacaaccatttttgttgattttcttagttatgaattggataagttcttttagactggaaatgagtagaatgatatataggctctggaaatgggttatttgatttgtttagattggagctggaaatgagatagtgatagtatatgtggataaaattagtttcggttccctcatttgattattaatgattaataattggactgctcatcactcaaaaaacaattagtagattttgattgttgcctttgtgggataatgtatttcttttatcctatattctagtgcacttttaagttttctatattatttacttgtagtggtcttcatattttatcccaaaatttgtgggactgatcctagggcttctgcaccagaggcaaacgttgaggtggaggaggcagcgccatta

SEQ ID NO: 45204 - DNA, 5625 bp, Cannabis sativa
tgttagttagggtgttacattgcctttctttccaaagtgcctgatgcctttcattggtgatacacgtaagaaaacatgatctcctagttgaaatgtaatatcccgaagcttcaaatctgcataacttttctatctgctgtatgaagcaagcatccaagctttaatcttatctattgcctcatttgttttctggaccaactcagggcctaaatatttccattcttcggtttcgtcccaatgaattggggagcgacatttcttgccatagagtagctcaaagggagccattcctatggtactttgataggtattgttataggagaattcaatcagaggcaaatatttactccatgatccaccaaaatccatgagacaagctcgtaacaggtcttcaagtatctgaatagttcattcggatcgcccgtctgtttgaggattaaaggccgtgctgaacttcagactagttcccatggccttctacaaactcacccaaaacttcgatgtaaatttagggtctctatccgagacaatagaatttggtaccccatgaaggcaaacaatctctttcacatacaagtcagcatactgatctactgtatatgttatctttacaggcaaaaaaatgtgctgactttgtaaagttgtccactacgacccaaacagagtcgtacaatcctgtggtcctgcgttaaccaaccacaaaatccatcgcaatgtcttctcacttccattcttgaagtgattatggctgaaataatcctgctaggcattgatgttctgctttaatttgttgtcaggttaagcatttagtgacatagtctaccacatctcttttcatcccataccaccaaaaatatggtttcagatcttgatacatcttgatggttcctgaatgcaatgagtagggggtagtgtgagcttcatccagaatttctttcttaagttcaatgtttctcggaacacacactcgagctttaaacaacatcatcccactgctaaagatcgaaaagtccttagcttttcctactaagacatcttctcaagttttaagcagttcagggtcttctagtttctccattctaatcctttccaataagtctgattgaagtgtcaaattatataatttcccgatcacaaactcaatattttccctagacatatctgaggctagctgaggggaaatcattaccatattgaaagtctgatcaggccctttctgactcaaggcatctgccacaacatttgccttcccatgatgatataggatctcacaatcataatctttcactaactctaaccaccgcctttgtcgcatgttcagatctttctgagtgaaaaagtacttgagacttttgtggtcagtatagatctcacaacgttcaccgtataagtagtgtcgccaaatcttcaaggcaaacacctttgctgcaaattctaggtcatgtgttggatagcgctactcataatctttcaattgtcatgaagcataagctatgactttatccgcttgcattagcacacaacccaaaccctatttggatgcatcacagtacactacaatcttctcttgatcagacaacatggctaagactggagctgtaatcaaccgttgtttcaaatcttggaaacttttctcacatttatctgaccatacaaaccgctgattcttgctagttaactcagataatggcattgcaatcttggaaaatccttctagaaaacgctgatagtagcctgctaaaccgagaaaacttcgaacttcagtaactgtttgcggtctaggccagttctttactgccttaatcttctctgggtctaccataatcccgttttttcaacaatgtgtcccgaaaaagatacttgtgacagccaaaactcacactttttgaactttgcatagagtttatgatctctgagtcgttacaaaaccatacgaagatgttgctcatgttctgcttccgactgagagtacacaagaatattgtcgataaatacaactacaaagttatcgaggaaatccttaaataccctattcaggagatccataaaggctgctggagcatttgttaacccaaatgacataactaagaactcataatggccatactggtccggaaagctgtcttcggaatatcgtcctcccggattctcaattgatgataaccagatctcaaatcaatcttagaaaatactatcttgcattgaagttgattgaacagatcgtcaattctaggcaaagggtattttttttaatagttattttattcagctcccaatagtcaatacacatccgaagagtcccatccttcttctttacaaatagaactagtgctccccaaggtgacacactataggtcaagtgaaccctagatccagcatcccctggagttgtatctttagttctttcaattctacaggtgccatgcggtaaggtgcttttgaaacaggttctgccctgggtatcagatcaataatgaaatctatctcctgctgaggtggcaaccctggtaattcctcaggaaacacgtccaggaattccttaaccactttgacctccgcaggtctaagcaacacagatttaccaaaatcaattacaaccgttagaaatcctacacatccactgcgtagtaaatccctagcctttagtgctgttattctagggatatgagaaccttgaactgaacaaaaaaaaaacatattgttcctcattctccaattggaggattaccattttacatttgcaatcaatattggcagagtatttagataaaaagtccattccgagtataatatcgaactcggccaatggtaactccaagagatcaacactcagttctctgccttcaattctgattaacacagatctaacccactttcttgaaataattaattccccattaggaaatagggttccaaatcccatctcaaatacatcactaggcctaccaagctgactaagaactcttgttgcaacatatgagcttgagctctaaattcaaataatacagtataagtgaacctttaataaagagcttacctgtaaccactgaagggctggcgacagcgtctgcctaagtgatgggaaatacacgtgttggtgcaggtttaggttctggcttgggttcctctttcttcaactgagggcaatccttcttgagattcccaattgatccacactaaaaacaagccctccagttacaagtcccagggtgatgttttttacagtgcgggcattcaggatatgagtaggtctgacgtccccctttactttggtttccacaaacctcttgttttgccatgaactccctgtaggtgggaaagttctcttcttctgctcaatagtggaatcaccactctccgttccaggaccagaaatagggagggtggtggttccaccagcaccaggagcctcacatgtttcttgtagaaattttactgctccttcagctcgaagggccttgttaaccatttcagcataggttgttgtgtcattagtggtgataactggatcatgcttaatcttggcattcaatcctgtcaagtacttttcctttttactaaagtgtgttggtataatccctaaggctagtttgaccaagcgatcaaacttggtcgtatactcagtcactaacatattctcgccctataccaacttaacaaaatttttctgctttgcactgcggaccgcctcattatattatttagcattaaacaagtcccagaattcttcccaagtcattctggtaacatcctttgaaagggacaccatttcccaccacaccagagcatcttcctagaattgaaacgtggcacattcctcccagtcatttccgataactcccatgaaattcaatattctttcaatcacagttaaccattgctctgcctttaaaacatcaggccctcccaaaaatattggaggtgcttgcttcctgaacctctcatataagggctccatatggtttccaccaacaggttgttccactggcactgcaggaaccacagcagcaggtggttgcaagggaggctcagcaggggcatcttgttgtctgagccttcaaatctcttcttcttactgagtaattctggcttatatctcaacaaacctttgctcccaaacaaatggagcctgaggtggattctcttggccacctctaggagcacgaccgtggcctctacgacgtccatgggggttttaggggtttctaccaccccaaccacttccggtctcaaccatttcgccctgtcctctgacgtttcaccgggcgtccattatttaggacttagcctatgatcccacaaggcatgtaggttagatagtggtcaaaatatttttaagaccgcatttagggttttagcaacaatttatatatggaatacatcttaaacagtttgcaaaaagtaaagcttacggaaccgtgagttgagctcgacattagcgttgattgtacatatcttgacggcattcaatgaacaacctggtggctctaataccaaactgtaacgcccgtatttgaaaactttctaaacaaaaattaatcttattataaaataattatataaccttataggtcgagatcctcagtttttttaaaacacagttgaaaattacatttactattacaatgtacactttaagggatcctcaaaccctttgggttgttcaacataaacttcttctttcaaaaaaccattcaagaatacaaatttaacatcaatttgatacaatttaaatccaagaatgcatgctatagaaagaattaacctgatggattctagtcttgctattggagctcatcaaagtcaataccctcaaccttagtgtatccttaggtaaccaaccttgcgttgtttcgaatgattgtgccaaagtcatcactcttgtttttgaaaattcattttgttccaatgatattcataaatggcggtcttggaatcattgtccataccttgttttgaatgaattgatttagctcatcttgcattgctaggaaccaatcttcaattgaattatattagcaaattttcttcttgttaccatgttttcatccaagttttcaaggatgagatcagaatgatgattctttttaacccttgaggatgtttccctctgaattggattagtgattgtatttgaaggatgctcaatttcttttgttgttgaagaatcaggaaaatttgcatctgtagcaacagagtcctacaatgtagtcttaggaacagcttttgtggctctgtcaaattctttttctacggcagaaggcttttctaataattcttcaatctgttcttctgttgaaaaccaaacaaatccattaaatcatcaataataatattagcagattccataacagtttgggttctcatattatacacacaataagccctactattagcgaaatatcttataaaaacaccttcatcactttttgcatcaaatttccagtgtaatcacgatccctcaaaatataacaaatgcaaacaaacacatggaaatgacttacacttggttacttacctttccagatcatatggtgttttgtgagtacatgtatgtaagaacactctgttgatagtatagcaagcagtgttgattgcttcgacccaaagacgccttgtaagctt

SEQ ID NO: 45205 - DNA, 1474 bp, Cannabis sativa
aattttttttaattctttttaattatatataaaaattacgattaacaaaaataatttataataataaaaaaaatacatctttcattaagttatacataataattaaataaacctttattttttcttgttttacacttgaaaaatatattacaaatatgatttttgtaataagctaaatattaataataacttacttttaaataattaaaaatgtcattttataattattaaaagttatattttaccttacaaaattattacattaacaattttattaatcattttacaaattcaatattttttttatataaattaataagataaataatggtatgaaactaattatcagcaaccaagtgaaccattttttgtcaacttttcaaactaaatcaaaagtttatattttgataatgacataattttctctgaatattaaaaataatataattttatgatcatttaaatttatatattttgccttaaaaatattatacattttaaattttaaacataacctaacatatttattatttattttttaaaaataaatatataaataattaataaaaacaaacgtttatatttgaccctagagtggaggcaaaatatagtcttccacatgatattattagatatatcaattataaataattattatattatttgctttaatttttgttacttttttttaaatgctcaatttcatgaattaatgttaaaatagaaagattaaatatttcatgaaaagaaaataaataattaaataacatttcataaaatgaaaagacaccaccactcatagtttaattacaatgtatatgatgcaatttaatttaattttataaatttactattcctataattaatgatcttttattattaaacaatataatatacaataaaattaaaatattaataataatataaaagcctcttattattctatattaattaaatgagttaatttatttttatctttaattaagaacttctatgacaactttctattgtgcataagacctttcatattccttttcctaatagcattaattaaagaaataaaatgaaaagttgctatgtatacaaaagagacacttcatggtaaactatattctttataataacttttgaaattccataacatatctaaataaatttaaatacttaatccataatattcaaataaattaagagacataattgtattgtacacactaaataacaacatgtcttttaaattttctatgagaactaaaaatattggttcaattaattgtgatgataaaaataacaaaaatattaaataaataacagaacggagagaaaataaaaaaaaagaataataattcataatcttattattaaatgaaaaaattttactattaatattaacaaaaaaaatgtaggcataaatgtcaacaaaatgaattagaaacatgtaccacaaataataatagaataagttaaaaaaata

SEQ ID NO: 45206 - DNA, 2144 bp, Cannabis sativa
ttactttttggtttgaagggaatggaagttgatcctttattaatctcagctagtagaaaagaattatgagcatgttaggaaacctaaatccattgctaattaataatacctcgtgagtaaaggtcctgactggaataccaaatgctctggctagtccaaaatctgcaagctttagtgcattggtacggcgatctatcaataaattttgtggctttagatctcgatgaagaactctatgggaatgacaataagcaatgccacggagaatttgataaagaaacatctgcagaaatacaaaataaatatatgaagttcctattccatatagcaccaatcaacaagaaaacactttcattcaaattaatgttatctacaacctacaaagtacaaacaatatacaactatgacataaggaaacataaccaacaataatcaaaagcctatacctacaactttgagtaaagtactaaatttcaagttcaaacaataaaccatcacacatagtacatatggtgttaacaagaaaagaaaactcacttttatctggtgtaggtcctttgcgaagtctggagaagaatccatgtgcttcttcaaatccaagtccaggtattcgaaaaccaaatacaaacgtttctcactgtgtactacatcctgtaacctgccaagtgtcaaccaaacacccataacccatcaacaacattccattgctcctctctttagatgaagtgaaattgcttaaaaagtgctggaacaaaatggttctataagaaacaaaatctattaaaaagaaaactttagaagtacaagtacagttaaattgaaaaagtttccttgcttataggccacagctatatagttttacataatagttgaattattccaaaaatattgtgaaacatctcttccaattgctcacaagttttaggatctgaaacacaaacatttactgaattaactaggacacactaaaaaccaactagctaaaataattagaacctaaaagatgttttggatcagagaactgtttgtccaaaccatgtatgtcatcatttcagtggtaatcataattatatttatcaactttaaaataatggattcattggtgtccaaacattaagtaggaatgcaaattggtatctaaaagaacaaagaagcagaagaaaggaaacaaaaagtgcactatactcggcacttgcacacgtcttaattaaaactagccaaaacaataatgtatttcagtttaaatacctgacaatgttcccatgctgcatttctttcaagagagaaatctctcgtatagctgtgcttggcactccctcgtcttcttgctccagacgaatcttcttcaaagctatagtttcattagtaacacgatcacgggccttgtaaaccacaccataggttccttcaccaatcttctcaactttttcgtactacacataaacaaacattaccaattacagcaaaattaagaaaaaagactaatttaaaataaaaactacagaagatgagagatagagaatcaaccactaacctggtccatagtcaagatcaggttgcgactatgcttattttgtaagtagtgaatcctaaaagatagaaaacaatcagaatgttgattttaaacacaagtgtcttccctttcaaacagtttatatatgccatatagcagatatatgtgagttcattatctgtatacaaaacataagtataacatggaaactgatccaaattcatatataaatgtaatgaaacatatcataatatgcagtccaacaaaattcttcaaaaatgtaaatatcaaatactaaccttcataaaaagcctatggagtcattcaatacagagcatggagatgttgaaaccatggtgaaatcctttttgctagtagcaacctgatttatccctgtaacaaaaaaaaaaatcagaatcaacataattcacattcaagacattccaaaattaaaaatcaatagattttagttgacttttgtcactttactgattatttttccccaatattagttcacacactattccagcccgcactctttctaattaatgcaaatttacaagagataatggccgtggctccttgttacacctcttagcagtcaaactatcattcttaaatgtggaatcca

SEQ ID NO: 45207 - DNA, 2159 bp, Cannabis sativa
ttctgggttttattccctcttgcatactctgcttctctctctgttttcctttctcttgtatactctgaagatttcacaaattataactactcccaaataatagtatcacaatcccaattaattaactaattaagtgaaaaatgaaccaaaaaacttaaaaatcaaatcaaacaaacaataagaaagaaaacccaatttctcaactaaaattcttcattattagattcaaatgttgactaatgcattcaattccttcattgttatacatacgaaaagcatacccacaaactctgaatctactgcatgaaattgtaattgaactctaccgaacccaattatagggtgcatttgtttggtatgatcaagttaactcaacatatgaaaatgaatatgcattttagtatttcatcatgagcaacaaacccaattccattttcactataacaatttgaccatagtcaatcaattttcgaaccattgactgaaactctttatttccgaattgaaaatgtcaacactgcaaaacgtcccaatattatacatgctggattttgtctgaattgtttcataatacgtaaacacaattagagcaaaaataacaaactttttcaaaattattgataaacaaacaaaactctaataagtaataacaataattctcagaacaacagtagagaaaaaaaagtagaaataataacatacaaacgtaggtggttccatgagcttggtctgcctatgtgagttgcgctgtgagccccgcctttgttcgaggctacgctctgttatagccacgcgagccttcgtgaaccccacacctttccgttcttccacccgtgtgagcgctacaacagccatggtcttccaagaatgtgtgggaggcgagaaacgagagggtttatttcatttttacaattaaggaaggactatcaaagtgactttttaaatttttttaaagacaattaatataagttgttaaaaaaatgttctaaaaagggtattttgttgcagctacatgcatggtaatgtgcttttccattccatttctaggcacattgcagaaaatataatgtttttggacaaagttgttgacatgtggaatcacttgtgtgaatgttaatttaaccaaattgaaatctctttgggaagaagtctaaagaattttgtccatgagccatctgtacttgcattgctatgaataattctttgactactataatcaaaatcaactccatttcttaaccattttgaattaatctaatcatcatcaagccgatgctcaaattcttcttatgagcctttctcatccattcattaaacaatttttcttcgatggctataaaagaagagagacaaaggactctcggttcagccattgtgcccaacattgctgttattgtccatgctttcaacctaagaaacaataaagcttcctcccttcttgctctaattgcaaactcagtcatcttgtggatacttgttatttctttttgaaaatttccacttggttatagtgataagaagagggcaactgaaaacacagtctaccccattaactagacttcttttactcaagagccacactcaatggtgttaaatccacaccaagcttaaatcacttaagatttttttttttcaattttaaacaaaaaaaataaataaataataatattataaaatatttttagctggcctaataaataaatatacagtccaaataaaaaaaattacacaaatacatcttacacacacctttaactcacaattcatgtttcctgagattgaaatcttcgtttgatgcaacctttggacaaccagccagcaactcaacacaaccaaaacgaaatccaaccagaaagagaaccatcattaattttggcgacttcaccagagaagacgaccaaaatcaatcaaaacatgagtgtttcgaattcatgaaaaaaatgtacagaaaaactactacgaaactaaactttaaccagaaattcaatttaattcgcataaaactaatgtctcgacttcagtttttagatccataaaatgcaaatttcaaaaagttaaactagagttctcaaacaatccaactcaagtataatccaaaaaaatcaaatcaatactatagtaaaatatttatcctagtatatttttgttgttttccaaat

SEQ ID NO: 45208 - DNA, 2348 bp, Cannabis sativa
ataaagttattatagtttttatttttatttttgggtttaacctttttctttcgtatttggcgatgaaattttctaaactgctattctgtttctgttttagtttttacagttgtatgggttttggtgcagtcatttgagatcatactggcaattgtgtcacttcatcagttttctcggcattgggtttactttctctatttgtagccgagggccgaggcaatggctattaatttggtggatctccaattgtgttctcaacttggctatgtgaatgttgaagtcgaaacggattttcgagttgtttctaagtttttgaacagaaaagaattgtgtttggcggtttatgatttaattttgcaagatatttatttagtttgtaataattttaatctttctaagtttttattttgtaatcgttcgacaaatttcatcgttcataattttgttaaactagttctcttttttgatgacagcattgaagtttatgtaaatcttcaaacttattttgactttagggcctaattaatgaaaaatttcattaattcaaaaataaatatataaataaatagttgtattcattaatatttctcattacttttacttttagcctaaaaatcttttaacaataacataattttttttacttctaatcaaagtttgtcacaagattttgtcaacttttttttggctgaatataatttttttttttgtattaaaaactatttttattgtttattttttgtgaaaaatattttttttttatgttttatttataattttacgatttaaaattttaatttacaaaaatatatttataaaatttttaaattataaaaatactttttttcactaaaaagtaaaaatataacaaaaaattaattttacgaaaactaaaaataaattataaaataactaaaaaaaacaactctacgataaatataattcaattataatataattgaaaaacagtttattatttttattgaaaatatatttttatatttttataatttttttttaattttagcatgaaagagagtgggaacatagtgatgagtcatgacttagtcagataataaataataataaaattataatttatttatgagataaatatagttgtgtatatccatgtcatgtgatcatttgtcatatatatgtgtatgtatagtattgtatagtataggatgatttagctgacttggtaaaatatatatatctatatatataaatggccacgtgtatgtatatacatatcacttaataataataataataataataataataatataattactattaaaatttcttattattctcaatccatgcatcgtagcatcatcactcttcttcactcttccacaaattaaataaataaataaataaataataataatatatattatgtatatttatatattgtcactgtcaccggcctatatatacaataaattatattgtttggaaaattgacatattatatggttaattctagaagttttatcactttgggagttggtatatttttattttatttatcaaaaactgtccaatcaaaaaaataacaaaaacccaaaaaaaaaaaaattaaattaataaaagtcactgtctctgtaaatattttattttttgtggtgataaatatgtcttatactcttggtaagatatatattattgatgaatttttgttatagattttttttaactttggaactcactaaccccactcaaatattatatataaatatatatatttctataaattttaatatctttatttaactagtgtattaggtttttctcttgtgaattttgatgataatatatatctttaattataaatggagctaaaaagaaataaagaaacaaattagaaggggccaacttataaattatgaaaaaaattaagaaaaattaatatataaataaaaaataatattctaataatttagcagattaacttagctaataaaaaatcgatattactttcttcgattgaatatcgaaacaaaatcaattatgcaagacatgaagtatacgtgttgataagcaatgctcgatcaatttggggatgaaattagtaaaatattagggttttgacctagtatgttatgcattataattgtaattcatcttattgtaacatgtaatgttttcaaaataattggattttcaattaattaagaagaatttcagagactgcaatcgaagtaaaagataataacaattaattaagtaaggtgtctcatagcattatttttatgattaagtgctaaatatgttattgttgaccgagtttttcgacaactaataaaatattataaagttatagagctgtaagaaaa

SEQ ID NO: 45209 - DNA, 1288 bp, Cannabis sativa
gctagcttattagcacattcattatagttcctattaacaaaaatgatatttgaatctttatgatccttcaaccaagcttcaatctgtagcagcagtgtgcccgcatcactccatttggtcttctggttttttaaagcttccaccacagctttgcagtccgattgaatctccacaggtctggtttctgatctcggatgcttctttaacgcttcaagaattgcccaagtttcagctacattaattgagcagctgctgtggatataaatcatcccagcattgagcacattcccattccaatctctccaaataaaaccaattcccactccaatttggttaggaatcatggcagcatcacaatttacacaaattttccccacatgaggggcctgccagtgtatcgagttaaagggggacgccattttctttttttcctcctccatttggttactgctagcaggtgggtaggccgtaaagaccaaatccagcagctgaattccgttcataacatggagtttattccatttctggtttcgattctcccaaatggcccacattattttcagagcgtcttcgaactcagtccttgaaagcttcgcccttaatgctgtcaaaatatcgaacatggatcctgcacccagctttccacattgtttgtaccaaggagtgagtttccacacctgttttactttgtcacagctccataaagcatgaggaagagtttctgcatagtaaccacaaagatcacaaataggatttatattcataccccgatgacatagattggttttagccggaagccaattattacacacccgccacccaaacattttcattctcggagggagctgcatcttccaaaacattttccaccaattattaatttctcccatattagagcatctagtaggatgtaggttcatttcccttccaactctatacccactcttcaccatgtagttcccattagaagtataaggccaaatcaataaatcctcggtatataagtcagttggaataccttggatccaagggatatcagccctatggaaatattttccaacttcctccatgtcccaattgccttctgtggtaatgaatttttgaagcttagtattcggctgaatgctaggcctttgagtgagtattgcgcccgacggtctaggcagccatttgtcttcccaaacactgattgtttgtccatttcccactcgccatcttgccccttctttcaggatctgtcgtccccaaataattcctttccaaacccaagaagcccacggggggcatt

SEQ ID NO: 45210 - DNA, 1233 bp, Cannabis sativa
gaggcatgtgtagcaacctatcatgacaataaatcataagatgagtaaatttatatgtcacaagttatatccataatcattaccaaaataaaataaatggagagataacataataacaatattttgctaattacaattagattgatcctcaaaacaatcataaaagccagttgtccattgcccaggagcaggaagctgctctgtactctttggatccatttttttttcttgacttctattgtattgtatatggtttaagctgatctagaaatgtcatttttatataagcattaaaaagtcaaaattcctttaggaaatggtatgattcaacagaggtgaggtagtacttaaaaattatatatatttttttattgttttaaatataataacaatgaaagaaatacctagcaatgtatcagaaaatccgatgaaagttcggaatatatattatatcaaattatgacttgaacatgatcaaaggttcagtgatatacgtaatttgggaaattagttaattaatgcaacaccctaacactcacgaacaccacatatgtagttttacaattaagggtaaataaaccgtgattaaattcaaacaaattaaaccatacatctttacattaaaactttaattacataacttaatattaggatgtacacatcattttgttaatattctgttaatgttagttaggattactgttatagttagttctagttagttagaactaactaattatctgcttgtatcagtcctctataaatactttgttcccattattattcaacataataaagatttgattacactaatacggtatcagatgaattcaacactctgatcctctctatgtaatttcttctttcaccatcttcaatggcgagaactcgagttactggttcacgaagctccggccaaactccattgccgaacaactcttccaacattccagatgctccacccaatcctccgatcattcctctggtttcaaatgttactggagacaataccacacgacaactcgttgcacaacctcgacctgtacacgaagacagttcaagcccttaatttttcggggatcctctttaaaattctagacatcttagttacaaaagtagggtttaatacaaaaattgttttgatgattttcaaaagtagggtttagttacataacttgattttctgtcacttggaaatggtttattatggtgattataggtgttctagagctt

SEQ ID NO: 45211 - DNA, 912 bp, Cannabis sativa
tagataaaagaggctgatcatcatcaggctgattattattaatctgattaacttcttcttcattattcaccataatattttcttcatccataagtacttcttcaacactaattaatttcaccaatgtttttaacttcttccttagtgaaactgttagttgagctggatcaaccccagatccaatcactactaatttattttcttcttcaatcgtcaccgagttcaaatctaaaataaaattattaacgaattattacactaataacaatatgacacaaataaatatgtgtagtatatattaataatttattatacctgcttcatcagttactattttcttcgctttttctttacacttttgacaaagagacatctggtccacctcgataacgatcttagttctctgtcgacagacataacaaaaattaaatacatagataaaacaaaataaaaaatattttaaatattaataaaaaaatttaaatgaaaaactaaaattaaatataattagaataaaaaaaaatatacgttatttaaaaaaacaaaattacaataattattgaaattaataaaaagtaatgtccttcaaaaaaaaaaaatgtgatgttaaaaagatttttatttttttgtaaagagaaaattttaaaatttattcttaagtttttctttttattagatagagaattaatttatttatttggttgtttgtttgatggatgaattggtttagtggagttttacaaattttattaaaaatcaaaaaatgatattatattagggttgataagtgagaaataataaacaagagaagagtttaattgctaatgtaacatattatttggttaatttataatatatatatgtacgtaccttcattttgatgatacatataaaacaatattattctttgag

SEQ ID NO: 45212 - DNA, 1750 bp, Cannabis sativa
  modified_base (1690)..(1696): a, c, t, g, unknown or other
ttactatatatcaatatacatatatttgatgtttttataaattaagcactccattaaaaatatgtattgattcactttttatctgtttcggcatttaaattaatagtttagtctaatttattttatattcgtatacgttataattatttaagaaattcctcaagatttttaaaaattgagaataatttacaatataaaaaagtaatgtttaaacagtttatttcacacacgtataacagaaatagttataaactgtttgaattatatttttagagtgataaattttttcaaatttctcaacagactataacttatatttataaaaaatatatattaaaaaattctttcaaataccgaaacacatgttattgtattcgtacactcattttttttttctatatatacttatatataattaattaaaactagtaaataggaaaaaaaaagttaatggtagtgatgagagaataacggatcttagaccttaattatagaacatcttccatgtgatttggtataatatgaagttagaagattcttcattgtcaccaaagatagtgctttacttaatttgttttatttatttatttttatagtaattatattctttcatttagcaccaaacaattaatcaaagttaatataaaattttgtttcattcaaaagcaagaattcacctaggttagacctaccctacatgatccatatattccataaatttattgttaattttatgattttttttgtagctatatattatatatataatatattcttcttgattccctatttttttcccataaaaatcattataacgtgtactcttaaattaaagaaaaggagttcaaaatatactaataacttacaaaaaacgttccttgtagacatctattttaattaatatgcactcaaatatatgtaggcatttttttgttaaagaaaaataataatatgtaagcattttatttatatatataattcaattcaaatattttattattttttatttgtatttacatacaatttttgtatttttgttttattttttttcaaaaaaacggcttcaataaaatctcaagagaaaacccactaaaaaaacttggaattattttattttaggtcaatatatattttgtagtaaaaataataaaaatatatttatatacataataagttatctttaccatggtggagactttgtattgtgttgtagataaaagattcaaacccatttctatacaattttagtgcattatatctttcttttcttgttttttttttgttaatttttttttatctttttttactctatttttttagtctttgtgtattttttttacttatattttttcacctttattttagttttctttcttatttacttcttaataattaacaatacagacaattagacaatcgcacatataatattaatctcttttgtgttgttattcttcttcttttattgatttttattggttattgtttttttttttaactttgtttattaagtaataaataatggcgagaaaattacatgaatttaacttcaagaaacgaacctatatcacaccatatttttgtttaaacataattgatgaaaataaaatataattaacctacagattttgacgggagttacgtgccaaagatccatcctcatacaactaatatatatatttatatatannnnnnnatatatatatatataaaagtttgctgcataaaacaatttaaaagtttggtagct

SEQ ID NO: 45213 - DNA, 1184 bp, Cannabis sativa
tcagcatccattggtgagttatgagaattattacttctaaattatttctacaattcattaattattatatatttcgaaacatgatgatgaatttaatgatctcttatatttatatggaatttaaattgaataaaaaataggcatggcattagacaaattaggacagggtgggctgatggacctgcatacattacacaatgtccaattcagccaggacaacaatacatatacaactatacgctcacaggccaaagaggcactctatggtggcatgcacacattctatggcttagagccactgtccatggagccatagtcatcttacccaaacgtggtgtcccatatccatttcccgcaccacataaggaaaaagttattatgttaggtacattaattaattataatattagcaattcatgattaatgctatacatacacatatgcttcattatcaccaattttgttgttttaggtgagtggtggaaatcagatgtggaagctgtgattaacgaggctttgaaatctggtttggctccaaatgtttctgatgcccacacaattaatggccaaaccggccctatctcaggttgcacctcacaaggagggtttaacttacctgtagaaaataataagaggtatttgctcagaattatcaatgctgcgctcaatgaggagctctttttcaagatagccggccaccaagtcacagtggtcgaagttgatgctgtctacaccaaacccttcaaaactgacaccattgtcatagcccctggtcaaacaaccaacgtcattctccacgccgaccgaaatgctggcaagtatctagtcgctgcatctccattcatggatgctcctgcgatcgtcgtcgataacaagaccgccaccgccactttgcattactcgggaaccctttctagctctcgcaccatcctcacctccacacctccaagaaacgccacatcagttgctaataatttcaccaaatccttaaggagtcttaactctaagaaatacccagctagagttccactcaacattgaccattctttgttattcactgttggactcggaatcaacccttgttccacatgcatcaatggtagtcgagtggtagcagatatcaacaatgttacctttgttatgccccaaattgctctccttcaagctcatgtattcaatattag

SEQ ID NO: 45214 - DNA, 6296 bp, Cannabis sativa
atcattattttctcaaatgtcttgtcaataaacactcatgtcaaaactttgagagcctactttgacatcaattttgtaaatactagaaattttagcatccgattggttgaatgtgagagtgtaatacttttcttaagtttgataaacaactttcaaaaatccacacttcctaaattgtgtattggtcggtaatttaatgagtgtacgtacatatatattaatatatatccaccaatcatcttctataactaattaaattataatcaattaattaattaattaatctcaatgcacggttgccattaatggtgaaaacgaccattactcgtctagtaatctctagctaacaagaatattattagctatctttggtaatttacttaagtgtgtcaaatttctaaattcccagagctttgggtaaccatgcagtatgcatatactatatataaatattacgttctatatatttgatggttggatcatactgatcatatcaatatgatgtagtccatgaattttcttaggtttagttgaccatattaattgaaatggataatatgaaagattacagggaccaacaaaatcttgaaagcagactcaggaaaaggtcaaaaattgagtgtgaacacattagaagtagagattgaaaataaataaataataataaaaatgttattataagctacttgatcatgatgtatatatagtagtaaacatcaattgtcatatcttatttcatcaaagtagaaagcaaagctaaaaaaaaaagaagagtagaaagcaaagcagtttttggttttgagcataaagaccttcaaaataatttgccgacatgataaaaatattaacaaattgacctgcgttaaaatcaacgacaaaatagttttttttttttttttcttttttctttcacaaactccaaaacgacaataatgtagcaccactattcatagcatattcggaaaattaattgacgaaaatttaacttgtactattttagaaagtagtagagggccctatttgtcatgtagtaaaataaaaattcaattaataattttttataaaatatagaatttaaaatatagtatttttttacattttatatgagtatttataatttaattatttaagatatcttacaaaatattttcaacaacttgtaacaaaaaattattgtctcaaccaaggttacaaagcactatgtgaggattgtaaggtgacatgaagccgagagatatgtagcagatacaacacgccaaagcatagttttatttcatggttggctgtgcaagatagactacaaacgagaagcaacttagtcacattcggcatttgcacagttattcatgcctcttctatggtgttgaaccagaaataatagaacatatatattagctaaatcgaaaggtagaaagtaaatctttgtacaagttgttgagatggatatctagtgctaaattgaccaggtttcgaaattaagtgttttcgacaataatggtgggttttatttatcaaatttgggtcaataaaaataattgatattgaaatcaaaatatacaaactatagatgtttgtgtatagaaagtatcaaaataagaatagatgagttagttaggatcatgtgctatgttagttagttagttaaatgtgtctgtttgtacagtttgttgtaactaatttctgttacttcatcatatcagcccagttgatataaatagttgtaatccctacattttcaaactaatgagaaaaacactcttcctctccaattctttttctctctatttttctattcattttgtaatatggtatcagagaaaccatatttgtgtgatgctcttcttctttgattgtttgtgttcatggcgaggaaattaaggagctagtactcgtagtcaagcaactcgagacagctctactgataatgcaaatcctttctctatgctcgatacagatcttgcacctcgacatttcgatcagagtagaaatccatactacattgcaaatggagatcatccaacagcaagtctggttcctaagattttgactggcaacgacaactacaatgcgtggagaagatcgatggttgttgttcggtcagctcaaaacaagatacaatttgttaatggaaagctgcaacaaccagatgaagatcatgatatttggaatcgatgcgatgatctggtaatttcttggctcttacactctatttctggtgatgttgctgatagttttatgtacaaagaaaatgtaatagaaatttgggaaaatctgtaagaaagatatgctccaagaatttttgaagccaaaaggtcgatacagatgcttaaccaatgatctcttgatgttactgcttattttactcgaagaaaggctttatgggatccgatacaacaatatcgtccactagctgtttgtaattgtggagctatgaaaattatccaagagtatcaagaggaggacaaagttatggagtttctaatttgattgaatgaatcctgtggacatgtacgatctcagatcttatgcaagatccattaccacctgttaacaaatcttatgcatcgattattcaagaggagagacagagaaccattactgtgattccaaatactaccgcagaaactggtaaaactacacatgatcctactagatctactgcagattagtttgctgggaatgctagcttcaatcgacctagagttacttgtcatcattgtggtatgcctggacacattatggctaagtgctataagctccatggatatccaactaggtcacaaattctatggaaaaattccaaataagagcagcaataattagcctggaaaaccttctgctaattttttttttttttttgaataattctgctaatttttctagtttacaagaaggacggccttcaagacaagctggtcaaagtggacaatgtaatgtgccagatcaacatcttattcaaagcatcacaaatcagtatcaacaattgatgaatcttttgtctcaaaagagtcaagaacccccaaaactccttctaatcatgttcagcccatggtatctcagttttctaataagaactttcctattttgcataacagatggataattaatacaagtgctacacatcatgtgtgccctgacctatctttgttcacaaatattcaaaaaagtacatcttattccactataaatttgcctaatgatgctcatgtcactgttacttgtgttggaacaattcaactttcttttgatattgttcttaaaaatgttcttcatgctcttgaatttaagtacattttattatctgtttttgcactaataaaatctattggttgccatttcaatttttctcttaagcattgtacaatgcaggacaatatgagaactcgaacgattaggatgggtgatcgaaatggagatttgtactatctgaatttatctcataattccattcctcctgatatgttttttgttattagtgattctaaaattattgataatactgtatggcattattgtttaggccatccttcatgtattaaacaacatcctcttaataaaagcttacaattttgacactatcctactcctaatttttattgttatgtgtgtcactatgctaaacaaagaaaattatcttttatatccaaccacaatgttgttgtcaattgctttgatttattgcatattgacatatgggggccatacattaccatgaccactgaaggctacaaatacttcatcaccattgtggatgattgctcaaggtttacttgggtcgaattcattaaacaaaaatctgatacacagcctgttatacctcattttttacaaatgattaaacctcagtttaacatgactgttaaaggaattcgatccgacaatgcaaaagagcttcagtttcccatttttttcaaagaacttggtattatgcattactactcttgtgttcaaagaccacaataaaatattatgttgctgaaagaaaataccaacacttacttaatgtggctagggctttactttttcagtcttatattcctttgtgtaattggaatgactgtgtggccgctgccacttatctcataaataggactccctcacccattcttcaacacaaaaccccttatgagatattacatggtaagccccccaactatgaacacttgaaagcttttggttgtttagcatttgtttctacacttagctcatcaagaacaaaattttctccaagggctgcacctttctttttcttggttatcccactggtatgaaagcatataaatttatggatctcaatactaatcgtgttttctacagcagggatgcaatttttcatgaatatcttattcctttctgcaatttgctaccttccctgattttcatcaccatttttttgagtttatacctactgttgtatctcttgatgttgaatctaccagtacttctaatcctatttctaaacattcaactctagaccatactgtttctaattcttcttcaaggactaaacctactagaactcatcataagccttcttattttactgattatcactattttttaactaaattcacttctggtgtttttcctcaggatcataattttgtcacagagcatccactatcagctgtcattgactactccaagttatctctaaagtttcatgctcttatactggtcatttctactttgcaagaaccaaaaaaaaaatttctaggctcatggcattcctgtgtgggattattccatggacaatgaaattgaagctctagaagccaacaatacttggaccattatgagccttgctttgcataatcatgtgaatggatgcaaataggtttacaagataaaatttaatgttgatgggtcagttgagaggtttaaagcaaggctagttgcaaagggtacaatcaataagaggggtggattactctgaaacttttgccccagtcaccaagttggttactttgaaactagttcatgctcttgctgctgtaaaagggtggattctacaccaacttgatgttaataatgcatttttgcatggtgatttacatgaggatgtgtatatgactatacctcaagggtatagtcctaaaagggagttaccacccaatgcaatatgcaaattaaacaagtcattatatgatttgaaacaagcttctcgacaatagtttgagaagttttctacaatcttagagcatgaaggatttcaccattctgccactgatcattctttattaatcaagcattttggtgagggtttcattctacttcgtgtgtatgttgatgatgtcattttggtaagcaatcatacacaagaactagaagccttgaagagtagactaaacaacaagttcaagctaaaagatcttggtgaactaaagtatttccttggattggaaatagcaagatctaaacaaggtatttttgtatcacaaaaagggtatgctcttcaactctttgaggatcttggctacctagggagtaaaccagtaagtacttccatggaagctaacctcaaattatcccaagacagcaaagaagaacttgcttaccctacactatacaggaaaatggttggtaagcttcaatacctaaccataactagacctattatatctttttctattaacaagcttagtcaatttctagttgttcccaaagttattcatatgacagcagatcaaaggttattgcagtatgtgaaagctactcttatacagggtattatgttaaacttgaaccttatgcagattctgattggcagcatgccccgatactagaaggtctgatactggtttcttacattttccttgggacttctatagtgtcttagaaaagcaagaaacaacataccatatcaaggtaatctgctgaagtagagtaccgtgctagggctattgctacctgtgaaatagtgtggcttttttctatactaaaagagctacaggttgatcataaagggccaacaactctacattgtgacaataaagatgtacaacatattgcagcaaaccttgtgtagcatgagagggaaaaatacatcgaaatagattgtcacattgtgcgtgagaagatacaagaaggaatcatcagaactttacatgtttctagcaaagatcagattgcagacatactcacaaagcctttatttcctgcacagttcaaactacttaaagataagatgggactcctagacattcatgttccattttgaggggaagtatcaaaataaaaagagatgagttagttaagatcctgtgctatgttagttagttagttagttaaatgtg

SEQ ID NO: 45215 - DNA, 5929 bp, Cannabis sativa
tttgtaacacttgtgggattttctggatctaaaataacttcctccaattccaggattggttttaacagtttcttctcaacttgaattctaagatctagatcctcatcctgtttctcgcctttcctcgttatgactaccattaattgatgaccaacccttctattctgtaattctatgcggtagcattaacgagccagtaactgatcagctcgcacgacacctacaccttctggcatctgaaattttaaagacagatgtttagtgaaactaactacccctagtccgattagtactcggcgacccaacaatatgttgtaggctgatggtaggtcaacaactaggaaatcttgcatcacagttgtggataatggtggctcgcctacggttaatgggagttgaataatgccctgactggtgacattatctccgataaatccacacaaattcaccatgcaaggtttcaaactcgcattttgcaatcccattttcttcagtgtatccttgtatagaatattcactgaacttcctttatccaccaacaccctttttatcctcttgttggtaagctgaattgtaacaacaagagggtcaatgtgtgggtacctcacgtgctttgtgtcttcctctgaaaatacaatcggaggttctttagtcttggatttctgggatgactctggagcaaagactggttgctcgttttttatctccttgccatatctcttttggccattactaccagcaagatgcggccctcctgagataaccaaaatttcctctccttctacaggaggaggttgtagtctttggtgacctgggttattgggcggatttggctggttttgtccattaccctatcgcccacatactattgaaaatacccacacgagataaggctttccatctcgtctctgacgacactctttcgttgtatgtcctatgtccttgtgaaatctgcaaaattttgtcgtgtccctcttgtgtcttgcatgcctcattggctcaggcttgcaaaatgcaaccctatgctcatttgtgagaaaaatactttcttgagtttcattaagctcgatataaatagtgtaaattggcacgtacttgtcgtcctttttctatttcttcttatttttggctgaatccttaaagtcatcttttcttttggtgttggaaccactcgaattgtcagcctttatcgagacaggatttgctataacattgttgggtttactttctgagccagtttttagcgatttcatctcgttccttgcttcctctttccttacgaatacttgggccctttcattaaaatcattaatgttcatcactgggtgaccctgtaggtcatcccacagctcgcccctagttgctgagaggtcagtagtgatccctcttgaagagcagtaagttgtatattgtcattcaagttttttaactttagcagcagcagtgctgaagcaacttaggtaggccttaagtgactcgcatggttgctgctttatgttagtaagagaagatgcctcaggttgcatatctctcgttgcctagaactatttcttgaaatccttaaacaattgttcccaagaaccgattgatgatgggtaaatttgttgaaccaattactcgctgccccagtcagtgaggtagggaataaaatacattgtaaattattcaagacgttgttggcctgcattacgttattgaaattgttaagatgagcgaccggatctgaagtcccatcgtccaatgagacgtgaggatttttaaacccttgggggaattcagagttcatgatgtttggatggaaaggctcgagttcctcatccgagtcataaccctgcagtttaccgtattccccatcctagtgtttttggaacttgtcttccaactcattcattcgcaattggattggatcctcttgcttttgattagagttgagttattggcatagattaggtgccttctgatttaagtgctcgcgcaaatctggttgtctctgattcaatcgctcacaaagatctggatgtctttgattatagtttcttatggaccttgtcccagtgtaacactcggattgatgactactagttgtgcccatactttctcgatcattactacggtgagatctataacctcttcgtgtgtttctttctgatcgactgcattcttgagatctggaatgtcctgaactagagcttgcctcatcacgtacatgccttctcctttgggaaaggttagatacacgcccctcgctggggtgtgtgtacgcctcctccccattagtgcgagaaggacattgacggtgtctcggcggtaacccacagtcctaggttgagtcctaggatttctctcgttaccacgagggatttccaattacgtaatcctgggtttccttctgttctcatttctatgagaaggctctggtaaatcattattttcattcccttgattcgtagatccttggggtctctgaggcatttctcgacggggggcctgattgttctgttgttcttcttcaggaacatctttagtttccccaagttgttcctcttgggcgttcttgggattttcctgatttgtctcatgtctcctggttctcaagccttgaggtctacctcgcagccttcttactcgaggtttaggttggttttgtgtgttgttttcttgtgcttccctgatggtggccgcctctctttccaactcatcatttcgttggttagacttagccagacgttgtcagagttggaaatttttcaacttaactaattggcacgtacctagtggaaacccaaagcatcctcacttctaggcacataaccagtatcaggattggcttcttcattccaagtttttgggttttgatcatgaacacattggcttctccttgaacgtgttgatcatgtggaatgagttgttcctcaggtgggtggccacataatcctcactctcctcgtcagttggaaccgaaaccttctcccacgacgtatacttgggatacttgtagccacaagtatattcttttgcagcgagaagaccaacggaccttaaattggcctcatttagaagaaacttggctgatcgcagtccttatggaagacctaacaaaagttttcatctcttggccatttcaggagttggagttggtctttttgaaatcgctgtcaatagaacaaataaaataagtcagtaaggataatgttatgaacatgtaataactcaaaaccaagtttgggacagtttacttacgtattatgcgaaatgcagttgtgttgatgggagaaaggccacttatccaaaagaaatcttccttaaaagcagtcttgtttggtaatcctacaataatcatgcgatcatttgtatgagtcccgagatagtagaaatcccctgcacaatgcttcctcgtaggaactgccttgacaaaatagagataaacaatttcctcgagagtggggcactcccatcctaaaatcttatacagaacctttagacttgcaaggattctgtaggaaattagaaccaattggaatggagctattccaatatggttcatgaaatctttaaataatctctcagggggagaattgctccaaccctgatatgctcgaggctccaagcgcctatcccagatgagccactagtagtatcttcaccactggcttcattaatggtctctctacgtacgttcttcacaagtaagtcgctctggtggataacagctgaattcaccaattgcagcagatctaacacatcacccttgcttttgatcgatgtcataggtccttaaaacaccacaaacataatctcctatggcccttatccttgaatcaatgagctcagcctcaaaggtgacattggggtcctagggaatctttgatttatgagtcttggaagtcatgatctcaaaatctaagtcacctggtgaaaaagcaattgtgactctaggtaaaaataagggcttagccaaaggaatagaagataaatacgggggttcaggctaggctgtatatcgcaagaaacagtgtttttccttaactatttcttgtaaaaaatgcctacagcgactggcaacttcgtcctggtgggttcttattaaatggttcctaactttgcatcatttacttcaagtaacgatcgaggttcttaggttttaggtttaaatggaagggcgaatttcttgggacactctgtttctaagaattttggagaataaatttcataaccaaactgggacatttctataaaaagagcaatcccaattcctggaagaaatttattaaaaccagaaacttataaatatgataaacctaagtttttacttcatctaaatcttaaaagttacccagaaaaaataataaaaaatttctaccaaatctaagcaaagacaagcgatgatgtaattagtgatgactaaaaaatatgccaagaagaataagaatgaacacttactggttcaagaagtacgcctgtgcagggagaaattctgtatctgtgtttgagatgaacgacgggatgaaatctggggacgtctgagattaaagattgaatctgaggaaattcgcagtaaatatgtcaacaacaatgagggcatgcaaagcttcagaaagttgggatgggaatttcgcagaaaagcttgaaattttttgaaaaggtaaaaatggaggaaaggtggtacctttcttcggttttataccttgggtttgatctcctttagattagaggaaaaaagatccaacagataggaatggcggagaagtagaaaagatggctccttaatgcaaatgatgtgcctcaaaaccataaactgccaacttcgaaagcatgcattttttttaaattggattgtgacaaatatacccacagttttcatttaaaaagttttttattaaaaaaaaaaaagaattttaaggggtaattcttatactcaaaatttggcagtaattcaagaagtgacacgtgtcaatctcgttgaatatgaatcagtagatataattataattatatcattaaatgcaaaatggaataactcattagatatagaattaatagagtatattcataactcgttgactgcatagtcataagcgagaccaggatacataaactatcaattcttgtattgacgagaaacattcttgtcacagaaggcataatcccgaggaggatacggacaatgcatagtgaggcatccacctcgcaacacgaaggggagtattaacgaggcaaattggctgttaaaatacttagcgtataattcacattataaaaactaagtgtaataacttgggaacatgtagggcatgattgtccagtatgcaaggtcttatgatcaaagagcagttcttaagtttgtctagtacactggtgctcatgccattactgtaaggtatatgaataaactaagtcactcatctatgtacaaggtgagatgctccagcgagttacctttggtagggtgttcctatccatgtcagtgctgactgccttaaagatagtttagataacagctgtgtgattttctaatgttatctagacgtatttaaatggaacgtaattaaaccccacaatttcaggaaaagttgttatgtaattcgaatttaaatataattaattgccaatctatattactataaatagggccagaatatacagaaaaaaaaaagaacaaaaagtcttggagagaaaaggatcactgattaaaaaaccatacttctgtatccagaaatatctgaataagatagactcgtagactatgcagagttaactgcaaaaccacgtagaaatttggtgtcaccattattatttttcctattaatttctttgtatctatgtataatttattacaaaacaggctcataaattgttaacgaaaatctacattaacaatttctattaaccaaacggagtctacatatcaaaagagaaatttacaactctt

SEQ ID NO: 45216 - DNA, 1557 bp, Cannabis sativa
aaaaaaaaacaatgaagagatgaggttaggaaaaaaaaaattcgccaatgtatagtgcgggaatattacaatgaatgttcagaaccaaatcaactataaactttgatcaacaaacaatttaacaataattcacaaataatatttttattatatacaaaaaccaaaatcctaaactctaacaaggactactacaatctacaattgttaaatccaatatttttattttattttatttatttttgtccttgatatagatggacagtatggtctttaccatgaaggttctctaacacattagtctacctgtcagcacatgtagaaaaagagaagttttttcttttgatcaactagaaaagataatattagttaagaaagcaaataatattagttctcgcacgtatataataataatattctagctatgctttgtaggatttgaatagttttaaatttggtccccaccataagagccattttttttccaaacaaaatattgctttcataattattatttatttggaaaaataaattggttgagatcttcaaaagttggctagaactattcaaagatggcactacaccacattaatgtctcagtgttgtggggaaccttcgtctgattttttatgtgtcaattttggattttccttcttttgagttttgatcacaccacatatttatatatttaagacttttctcaatctatatggactttttttttgtattgttgctttacataaggttgatgtggttgtttttcttttctcttttttatctgtcaaatgtatgtatttcagtactgataaccatataacatgcacattttagaagaaagggtaaatggtatcatacgcatgatattgtgtaatatacgatacaccttaaccaactaaagtatgaatatttgtactttgcaatacacttaattctacttaaataaaaacttaataattttttttttattttttatattgggccctgaaaagtgtgagcactaagtacgggcttaactcgcggcctatgtctatattttgaatattattaaaaacataagtcacatatattcaatattataatatcctcccatataaggaaaaatcatataaaattaagctgttttttttttttttttttttgtctttctttttcaacaatcaaagaaagaaagaaagaatttctcttcttgcattgtatataatcattagaaaaactataaaatgaaaaaaaaaaaaaaaatttgcaagttgagaaacttaaattggatctcttaattcttaaagtaaaaatatttccattattatgttttccgtagtttcattggttggtatgatttttactttcgtagtttagaccttactcaaaatattagggtattgtacttttgtaagaaaaggaagaagtggtagtaaggattgatctaaatgcttctgctacaaattgattgtccctgcacaaatgtggtccaagaaagcaatgtttccatgtttttttctttcctcttatcttctcttatgtttttccaataaagatatcataataatgtgatcaaatgaaaaa

SEQ ID NO: 45217 - DNA, 2171 bp, Cannabis sativa
aatttaacctacaaaatggacacagcataatcttaaaatggaaacaactagcattatgtgtgtgtgaaatggaaacaaatagcattatgtgtgtgagagtgtttaatggaagcaataaaatagaaaaaatttaaccttgaaatatggaaaccatttaacctcaaaattatttaacattgaaatgaaaactatagtttgtgaaatggaaacattttaaactgaaaaaatagaaacaattaaacatcaaaatggaaacaattcaatatcaaaatgaaaattatatgaaatggaaaacaatgtcattgaaataaaaccatttaatcatgaaatggaaacaactaaccaaccaaatagaaacaactttcattaatggaaactattaaccaaccaaatgaaaaccaattcttaattctgttaagtcgcatttgattggaaggaatgaaatggaatgaaaagtaaacaagttttattctattcctttatttgattttattttaaagtattgaaatgtcgtttttattctagttatatttttacttcttgcaaccaaacatcaccaaatgagtatttgttataagaatttaacttagagagagtaaagttaaaataaagacttggaagaaatatgaaactcatacgtttgagagaattaacattactaccttattaatttaaaaagtgaaacttaattgaaaacacaaattcatcaattccaagtatcataccaaacgccccattagtctattcttatgtatttaatttccttaacttgttagctagtcttacgtgcaagagttttactctccaaaatctgttgcaaagattcttatattgcctatataaagactgtacataatcaatgaaaaaatcgaatcacttttccaaatcttatatattacgttaaactttttaggatttagggaaaatccagagcactgcctgcactagaccttgtcacttgtttacaaataacaaatgctaattagtgatttcgttcattttaattagcgaaacataataataatccatacgtattgggaaagaaaaacaatcaagaatgtaagttttacacatcatgtatgatggaattttgggtctttctacaagcaacaggtttcttttcaaaatatggttgtaacttgtactgtgaataactaaattagctgatatacatagtacataaactggaaacgatcattcagttgataatcaatttgttgttctggaaccacacatgacagacaaactgtgtcatttatacaaatgatcttctatactgcaaaaacaataaccataggcacctggctttcctatttattttgaaggaccacataatattaatatgaacaaatgtcaaatatttaagaccatcattgccccacccacttatgcatatataccattctgctcatcaaagtcttaagcatccaccttgtttctagtccttctataatgcatgtaaacatattttaactagatggatcatgttcctcctcactagttagcacttccacaaatctattacagactaacctgaacaaataatagattaaatccagaagctcatattgtcaaaaagccttcttttcatggttcaatatttcatctttcatcaaatgaatatttcagaatcctgcagttgaggaaaagaagggatcagggaacattatatggatgctaaaaactaataaagcagagtcacttctacaattatatatatagctaaaaatgtttaaaccaatgatataagaaaataggcaacttactagggattggtcactggagttaataacggttcattgaagaagaaagcctccaggttggcaatcataactgaagcagccttctcaaaagactctggagtaagtacagcagcgtgtggagaaagaacacaacattatccaattggaacagctcttcaggaacatttgaggcattatcattttcaaacacatccaaaccagctcctttgatatattctcctaccaaacacctcaccaattccttctcattaataagagcaccacgcccaacgttaacaatcactccctcctttcccaaagtagaaagaacttccttgttaaccatatggtatgtttcatctgtcaaactacagcacaagatgataataacgttattttcagcaagttctttaacattagaataaaaag

SEQ ID NO: 45218 - DNA, 1207 bp, Cannabis sativa
aggtcattacctactaactaagggagccgaacctctataaaatccttgtgttcattaacttttgagttctaattatgtaacacgtggcaagcatcagtttaatacgatcccgctgttagttggtcaatttctgaggtcaaccacactattcaacatatggtttgtattcaataaaaatggccattttgtcgcatcccaaatggattcagaaggtccctctccctccaaatggttttatggtggaagaagttttggaagatccacttacccaaaaaagtattgagttttatttggcgcggatatcatgaaattccctcaacttcagttgggttacataaaagacgtgtacttgctcactcctcttgcccaatttgtgatttcagtttggactccaatagccatgctattttctggtgttatggattcaacaaggtgtggaagatgttaaatatcaatatattatctaatctttcaaaggacattccgttccagttaattgttctaaaggccactgagattttgtcacaaactgaatttgagttgttttgtgttgcttcttgatttatttggggagaacgatgtgagatagtctttgaaataaatctcgttctcttaacagcttggtattgagaatacattctctatttggggagtttacaaaatgtcaatctctaagggatagagttgttgatgccccttgtacttccacttcaaggtggataactccattaataggtcatctcaagatgaatattgatgaaatactagatgatcataataattctattgtcattggggctattgtacgaaactcctttggcagtgttatggcttgtttgtctaaacctctaataagtgtgtatcttatcctatttattaagtatatttaggctatatatagattattatttttctgccaaatccattattgttggtaatatttagctctctaagggttcgtttggaatgttgtattaagtcgtattgtattgtcttatattgaattgtattttatataatacttttatgtaaaactagatgttattaaaattgctttgtctttattctggcccattaccggcccaatgggcttccttattaatgtgtatgtatagagaaatgtaagtaaatgatcctatttttaactttatagatagttaatgtccattttttaaaataataaagcaaatgtccttttttacttttt

SEQ ID NO: 45219 - DNA, 1032 bp, Cannabis sativa
aaaaatgaagaaatgtccaaacctatgttcacatatttgtatccaagtgctgccaagccagttgtaataagagcatttgctgttatataatattcaaccaaaattaataatattagaatttcactatataaaaaaaatcttaaaaattatacataattttctacataaaatagaaagttttaataatatgagtagtaacaaaaacataatgaggtcaagcacttgatctctaatcataaagttggtctagttggactcctagaaacgagagtaaagctcagaatggaagccttgtatgttcatgtttttcgagttagcatttttcgtccaacattgcttgacacaaaagaggaaagatcgtcattgattggaatctttttatgttcacaatctctattatcaaatgtactaccaattgataaaagaacgagattttatgccatttttgtgtatggtatgaatgatgaagggaagaactattttatggagagacttgattgatcttaaaactaagattccttgattggtgttaggggactttaatgacattcttaataaagaagagaggattgactcgagggatcgacgtggtacttcaatggcatttcagaaatgtgtagaggtgtgctcctttgaagatgttaagtacaatggtaatttttttacttgaaacaataagcaccatgaagaggatgaaatatactcaaatattaatcgggtcatggcaaatcaacaatgattggatttgttttcaattgcgaaggtaacccttatgaatgaagatttattttatcattgtctgaccttactaacggtgtatccagccttgagtctgggaaaaagccttttaagtactttaagatgcggagcacaacactctgttttttttagctcgatgtactattttgtgactaaacttaaaagtttaaaactagcacttaaagacttgaataaaaaaaaatgttttcgaatcttcattcacctgatattcaagtgttgaaccgattgcaagagtgtcaagatagcctttga

SEQ ID NO: 45220 - DNA, 2070 bp, Cannabis sativa
  modified_base (2025)..(2037): a, c, t, g, unknown or other
tttaaacagcaaaactcttcaagaattaaagtttaggaaaaaaaatattatttatttttttagtatcaaattttaaaataatataagatattattattatttttgcatatataaaaagtcattaaattctcccaatagaatttttaataagctaattttaaaattaaaataatttatctactttgatatatccaaacactttgaggagaattttttgattaaaaagatctttatacaataattattcaaataaaaaaataagtgaaattttttagttacttatactttttgttatagtaagtaaaattagaagatgttaaaagaatattttgacctagctattttaaattagaatgtatagatttgtgcatcattgtcaaattaagtagtgtcatatatatatatatatatatatattagataaacatatttttaatatttctaattattgacacgtaaaaaaaatattaagatgtaccttaaagtattaagcaccacaagatgccatatagtattttaaaatatattttaatttaataaattataaaaactactaattaattataaaatgtgacattacctgctaaataataatactcatataatgtataaatattatacatcatatagttatgaatcttatgatatatccttttacgtagcaatattatgtactattaagttttacgatattatgtactattaagttttacgtattatgtatacaaatggtacgaacctacttataatatattatatgtgtttagtgtataggatatggtactataggtgttctccctcactaaatattaatatatgtatgaatgatataattgacatacaaaggctatagagtatagaatatatatataattatgagaaatgccaattataatttcctatacaacctcttagttaacctctacgtctgaaatcatatgccgaaatatttttttttatagcagtattcgttatagttgtagtatcattcctgtaaatttttgaaaaattctgaatatatagtttgtacagtaccaaaaatagagttcctaatattctaatttaccactcgtgttcaaaaaacttcaaacgtattttcagcactgtaaactattcaaaaaatttcaaaaatttacagagataatattgtaagtataacaaacatcctgtgaaaaaaaattaaaaaaaatattccgacatgtgttttcgagcgtagaaattgactaaaaggttgtaacaggaaattgatggtactcctcatataactataatttgtattatatttttattttattattaaaatgcatataattttgtcaatatatatataataactatataactataattatattgaaaacccaaaagaagaaattataagaaataaataaaatcaagtagtggtccatcactcactactggattattaattatttttgaaattgtatataaaaaactttaactttaattaattgcaattaagtccataatcaatttaagccattctctgacctttttttttttgttttgaaattaattatagcgcttctttgacttgagtagctagtaactagtatcgatatgaatatcatttctatattaaaacatgtaattaataattagtccatattctaatgaaatatatataacatgaatttcaacaatgttaattaatatattgattctataaggtgggacagtactaacgtaatggaaaatttatatatatatatataataaataaactcatattgcatgaaatatagggttgaattagtaatatgtaggatttgaaatttgaatttttaaaatgctaggtagataaccaaccacatgtgatgtaaccaaacaaatctcttgtcttttatttttactagcttgtggttatatctagggtttatatactgtttttttttttatataaatttttcttttaaatttacggttttgatttctaaagtggtttctatgtaggttaccactataaaaaaatttacttttaatcacaacaaaatttgtgactannnnnnnnnnnnnttgtgactaattataaattataattcctatgtt

SEQ ID NO: 45221 - DNA, 1879 bp, Cannabis sativa
gtagcaatgggtgtttgacgatggcagaagcaacagctgagactggtggtaacggcagagaacagtgaagagaagtcacgagttgggattaatatcttctaatttttttttttaacttttccttaatttaatttggacccttagatagctttatgtagaatagattacatcaatcattcaattgtaactgacttcttggtagtgttacctcaaaagtgatccaattcaactatatgtcaaaaccctctaattataattagatatgcaatttttactaattgtatttcacagattggtttagattatattttaagcacctctggtagagatcattgctcctttttttgtctttttccttgataaacgaggggacttgaatccctgcctatcccctagtaccacttcactttgcaccttcgaatgacatccaacaaagtttggaatgaaaagggaaaattgccaatctaaaacgaaatggtccaaaatgggaactcaaatgaagcatataacaatgaagggtttatatatatatatagcataaatatccccctaaattttactctgtttggcaattaaatttgaaaactctttttttgactagtacttgagttttaataactttagcaattaagtattttcattacatggttgttgcaagtgctatacatctatatacaagatcagcaaacaacaaaagtaaaccagagatgaaacattacaaaaaggcaggcttgaaacctctgcattggaaactactagtgttgtagtgggttttgcgcaagcaaaaatcaagtatgattagctaaagtatagcaatgggcatatatgcaaacaaaaacataaacaaaaaaaagtggacagcagggaacacttaacttttaatcctgagttttggattgtaatgttgccatatttttccttcttcaacaatcaacctcttctgcagtctcttctgttgatcagaaaggtccttgtacaaattgcttagatgcttggctaacctgtattcaacacttcctgaatagacaaccttcaactcatctctacttccattgttccctttccttttctgtaaaattcatgcaaaagctctgcttcaataaatactgatgaaaattcttctacacgacggggacggggaagacgggaatgatcaacaaaacaaaattacctattattcatatagaaagaaaactaatacaagtacctggaaaatccacaagtatcacaaaagcaaaaatatgatatagcaagagaaaataaatataacaacaaatattccacgctaagacaacaaaatttctttaaaacaaaaaaaaaaaaggaaaaaataacacttggagctagctcaagtagtgggctatgtgagtgtgtaggagggaatggtagaggtgtatgtgaagcaaccattgacctttgcatcagttagatattaaaaatgtttttcttaaagagatgtatatagaggaacctcctgtatctcagagagagtcaaggcaaatccgtcatcaaaaaattttatataaattaaaacggttagaatttgacttaaattatttatttatctacatttataaagacacaatttttttaagataaatattaattgtgtgaaaaaaaaaaaagtcttttggttcccaaattgtcttggtacctaaaattatttttcctataaatatgcgttgtgtgtgggtgaggtgtgtgcgagaagtaaagtaagttgtgaaaaaacaagtgagtgaaaaagtgagtaagaagcaaagggtgtattggaatttgagtggagagattgaaacagagagtatatgtaattttaaaagtgataagtgaaatatatacactttgtgggtttagaagttttaccaaatcgagtaaattg

SEQ ID NO: 45222 - DNA, 1319 bp, Cannabis sativa
tacaactacttactaaaacaattggcttagcagttagcagagaaggtgtccaagcaaaagaataatgcaaagtccaagcttctacatttgtgaccaaatataaagaataatgcaaagaagcacttgtggtactcaacaccacaccaatatgacaaagaaaaaccaccttttcctaatttctctatctgtacccagcatgtcccttgtaatataatatgctaaatcattctatttttagctttaaacattaatagaaacttaattaatacaaataatataatgtgacattcaagcattaagtggtacatgctgggatagaaaattagggacagaagatttcaattcatcacatttgagagaaaccaactacttcagttgctgaataccaaaagtgcctcttagcattgcttaaataatgactgttagcatcataattaagtaattatcaaagttatttgcaatactagtacaagctctaacttagttttgatcgtatataatctaaattcatctaattttatctgtaaacttgtacaaacatcgatagataaatccctttgaacttagtcttatcagtaaatctaagcttaataagtctaagtttatagcacatataatcaaacacagaatacatcacattcagggatgaatatctgaacctgaacatatttgatcgattcacagctcgcaatttgctgtatcctaatcttataagcaagaataacttgaccgatctccaacggagacaaatcgccgagctgaacagaatgcaccggcgactcaatcaccacgtcgtggaacccaaccccgtccaatgcctgagccaaggaatgatcatcatcatcatgatcaggaactcctctggtgatggcagggtacagattctcgataacccgaatcttccaatccgggtcgtggggcggaagacggaagatctcgggagcacactggtgctcgtggccgatgcagaaggggcattggtggttgttggggttagggtttgcaggggatttggatttgaaatcggagggtcgtttggctctggcgggtgagaaaatgacccagcgatttgtgatgacgtcttttctgagttgggggctccgagttggtgagtcagactcggaagacgccatctattctgttctatctctctctttcgttcttagattattatcgttttggagtgtcccacacgtgtcctacttaatttccacacgtgtgccgtgtgcatgggaatggaatctaatagatgaattgttaatatatattatataaaaaagggtaaataccattttggaccttgtattttgtaaaagtta

SEQ ID NO: 45223 - DNA, 1272 bp, Cannabis sativa
  modified_base (1066)..(1075): a, c, t, g, unknown or other
taagatcctggtaaaataaattcccaacactcatcctatttcatcgtgctcttatcaccttcataataattccaatacatggagaatatctgtggagcagatgtgtccaaaactacacctttttgagtgtacacttctggataaacgttccgtcttcttctcaataagtgcgtcatggtatcaatttgctgtgttccaaaagaaaaaagttagacagatatcgcacatatgtcgcacaaaactcgcatgaaattgcacaagagaaatcaaaaaatagtttcattaatcgcacaaatgtcgcatataaatcgcacagaagtcgcacaaataatacataaataaaagaagtgcataaatcgcatgaaattgcacagaagtcgcacaataatcacattatgttgatattatctcaaactaatcgcatagaaaccgcatttaactcggacaaaaatttaaaaacacaataaatttgtacagttaagaaataacttacagcatcgtcgagccattctccctgcaccatcagtttgacgaaacaggatcgattggctgggccagtgtgaacatccctaggatggtcgttgtccctcgcgtaagtgatccacttctggaaaaattttaacaatcgcgaatctgcaagtttcacggtgtctacttcaactggcccatgtcgttgtttcttcttcccctctgtttagttcttcaagaaaaccagcttccattttctcctaaccctagagaagtccaccccagcaagtggcccgtccaactcttgcacatcttgagattctgtatcactcagggcaatcacaatggcctttgtaggagtacaaggaacctcatctacgttgggttcccaatcttccgaatacacatcatcctcatcaaaatcatctcttggcggtgatggatgtatcgtctgtaatggctctgtcaagtctgatggatgtgtcggcgatgattaatgtgctggccctgatggttatgtcggctccgaaggctgcttttgtaaaaaacttatcacggtcgcaatttgatccatgataagattcttcatctctttctnnnnnnnnnngaagtcaaccttcatctcagtctgtgcagtcagaatcccaagttgttgagcttcaaccttctccaatctctttgccaacaagtggtagtcgaagtcattagctgcagcagaggttgggggcacagtggtacacgttgggggaacagtggcagatgtggaggggtctggtgtttctttgggtgaggatggtggaataa

SEQ ID NO: 45224 - DNA, 3200 bp, Cannabis sativa
acttggatgcacttttagataaaaggggtgggttatgccattactttgctcgtggccctgacagccacaagtatgagtacttcccacgagtacatggagaagaatttaacctgagcaatcgattcaattctcttcacacttgtgatccagctaaagactactttgagggaagtagccagaaaaatgctttgaatgaacactcccacagtgattcctcttgagacgatctagagttcattttggaggcctcattagagttgccttcacgaccccatgatcaagagacaactacaagacccaagtcgactgaagtataagatcgacctggaagaccatgagacttgtgtgacctcttagccaagaagaggatggtggaggcaacaacttttagtgaagactctactctagtgataggagctcggactaggaagcagaccaccactcatggggttaattgagcataatttaacacctttcctgctttagtgaaggggatcatggttgctaagttgtctaaatttgaatttgacagagaacgatgctcattgctctccaaacgaataaaagttcttcacattcctacaaacttgaagaacccttcatgatataatacaccaggaaggaagatccactacctcacatccactacttcaatgtacagactgatctgcaaggtgtgagagataacgtcagttacagaatcttccctaccacactaataggcttagctcaatggtagtaccttaagctctctcctagattaattggctcatggagagatctagtagatgattttatcaatcagtttgctccttcccaacaattccagattgaacccaatgatttagtggatgtaaagcaactggaagatgagccccttaatgactacatccaacaattctttgaggcagctgctaagaccaaaagtcttggcaaggatgcaagggttatggcactcgtagttgggctcaaggagatgagttctatgtggcccaaccttcatcttaaggtggtatacacgaatgacttcttagattatagcagatggatttatcaaacttgaagaagacgtcacccgaaccaatggcttaaatggtgtcaagaagaagtcaccagacattagagcccctactactgaggcgcagggcaatgggaagaaaagaagtttgaatagagaaaagagagccaacaatggtggcaagcaaggtaactccctcagaggaaagaagcctaagactgggggcaagcccttacgagagcatgagccttgcatcaccacctacttcattctcttggctcaaagagaggagaactatacggctacatagtcaatagtgtcatattacaaagctcctccattcaaagagtcaagagagacatgaacaaattctatcgttactacaataattacggtcatgacgctaatgagtgtaattaattgtgggacgagatagagtttcttatgaaatagaaacatgctgctctttagcggtatgtatgacctgacgctccaactgggggtagtgtacctctccagcctacactagctgtaggcagactagagatcgtgaatggaggccttcacatagctagaaattcaagggaagccttaaaaagctatgcaagatcacttcaacatgaaccaagagccaaagtcctagagatagcagaatttcctccaaagtctcaatgctacagatgttaacatatcaccttcagagaattggactcttaccatgttagctaccctcacaatcctttagtttttgagcttcaaatcactaatatgatggtcaccggggtgatgatagacgacaaagcatcatcaaacatcctgttcaagtaagcgctaatcagaatggattcatccttagaagacctggaaccatgcgagcaactcatgtatggtttcaacaaagctagcatcactccatgtggcaagatcaaactgccacttactatcagcactcccccaaagctgacctccattatggtcatgttcatagtagtagatgtggtccaacgtgatgctcaaaagttctaccttttacgaccttcgagccatcttttcagtataccatttctctatcaagttcccaaaggcggctggtaatggttgtctccttggcaatctaggaactactgacaagtgttataaggcatcgttatcactcaccaagaagacctcctctgttgctatggcttcaaggggacgacaaagacctcccctgctgctatggcactagggggaacgagcacggcctctcccacaaaagcttgagagatgacaaagacctcaggagattaaactatagagaagatggttacaccacctaaagccacttgaaggtgcacccaagacaaggatgacattgaccccccttttggagacatccacttaagagtttgtctgactgatgaactcaaagaacttcccctcaacacatcggacctgatcaaagttgtcaagattggaacaaacctgtcggaggtcttgagtgagattgtttcccaccaccacaaattgatcaattggtggacatgacatccagacatgaaatcctcacattcatggatgcctattacacctagaaccaaatcagcatgcacgcaccaaacgaagaccacatcaaagatcgtattatgtaatcttatttactttgttggaattttataccttaaataaaccaaatttcattgtaattatatttacttttaataaagatcagaaataatcatatcttgaccttggcatacgctttgttcatatgttttatacatgattatatgtttaatatataatttctattaaatcccaaaaatatagtgattcacaattacaatgatgtcatcacaatagaaagtaattgtgattatatgctttaaattattaaatctcacaatttatcagtgcattggatttgcactaacgtgataagtagtaataaggtttacttaaacctagttgagtggaatgtcttttccaaggcattagcaaagtaaatcaggatacgatgtattggctatacattggactggactaatataagatattataaacttaccgttatatattttttaagtcaatatgacttagttgatagatcatctgatctcaatcctaagatggttatgttggaacttattttaccagatctagatttactaacatgtatgtttaattatattctataatctaa

SEQ ID NO: 45225 - DNA, 1104 bp, Cannabis sativa
ctggccaacaacctggtcaaggctctggaaaaccacctcctaagcaggtgggtcagccatctcttcatcagatttccccaaagaagatccctctggcgagacagtaatctggtttgcttctaacggctctcgaatagcgcctttccttgggccagtgtgctctccaagaaagaagcatcccccatgtatgaaagatcaatgttggtgttatgtagcttaaactcatggaagagtttcgaagataagctgatgtactcgtcctttattgcttgttggccatcgagggctacccttaacttctcatcacaccccgtgaggtcagtatccaacttggagatgttagcagcttgcatggtgttctcttgattcctagtgccaagcatggtatccaaaccagaaatcatgttctggctcagtaggccaagaacctccatctcagctaaagcctggcccttcgccatgagattagcctccttcgttaagagatatgcttccaaggtctttatctgctcatgaagagcactcgacgacccattagagttgtcaattgaaaggctgaacttcatgaaggcttgaaaacaaaataaggtcaaaattagtgtcagaagacaacactagccagttggcccttccacaaagctgctaaggccaactaaccccttaaagacacgacattggttggccaactccatttaacagtcataatagtcagccatcctataataatgctagaaaatgagtaaagttaagtgtgcaactcattgcagccaaatctcgagggccagcagaagagagtctatctggctcaatgtcatcaagctcctaaagctaatcatccacagaaggaaaggctctctctaaacgcctatgagccacctccatggctctctaccctatgctgaggtttctccctgactaggcttcggggcgcccctactaaaggtcgttccctccttgctagagggtcatccatcatgggttgcctgataggggcaggccctggtgaaggaggaggaagagatgatccagcagcatttctagcatgagtgttctgggccaccttggcccttagacgacccgaaggctcctctgaaggtccaccag

SEQ ID NO: 45226 - DNA, 4216 bp, Cannabis sativa
tttttttgagaaattataacaagaaatttttacatttgaaattgtacatatttgttatactaactccaaaatttagtaaacaaattccactaatataaccaatttgtattcaattatatgtaattaagttataaaatttaaatgtaaaatccattgagtacatttataaaattttatgaccaaacttaaatccagaatactaaatttatatgttgataagcaattactaaaaagtaccaaataagtcaataaaacaaaagatattaaatgagtattttatatttacccattctaatatatagtttctataaatatatatatatatagtttctataaacacgtttaattcatgtaaatagactgagtggaaacattaaaatttgactagaaatttgaattagaaggttctttacaattgaccgagcaaactaatattaaactcagtcactaccctccaataatattaataaaccaatgaacacatttttcattcattacaccaaaatatattccctttttccttttttttttccctcaatagatgaactaaacacacaaaaaaagaaacaccaccctaactgtaactgcataaatcttcctaagctaaatcttgtatagtagtctcttatgtagcaatctcatcaacctcagaattaaacacaaaacttgggaatgtcgttgtaatgtccctgcattttagttcaaaacacaaacaagaatcagattatttcatccttttaagttcccgaaaaattccactgtttggaaaaatcaagcacgcacgcacacacaagtggcataccttaaatatgggagagtcatgatttttaacaatgatggattcttcgaaacgaaattttgccattctgatttgtctattttcccatcttggttgacatcagcctccatgaaagtctgttcccagaaaaagaataactcggttataaacattttaaaaaatataggcaaaccttggatgaatgaacttgatttttgataaagatacttactttatcgagtattgtttcgatggtatcatctgccagcttcatttcggattcacaaagaagtgcaatcaacatttgcttgacctgcacattgcacacaacagtttaattcagaaagaacgaaatcgccacataatttttcttttccctctaaaataagaataaaaaccatgcaataaaagtgaataggcgaaaacagataggcagccttgttgacaaagttgtttgaatagtgtataaaaaccagagtaaaagaataatatgccatggaaaaacaccttactaacttttggaaaacagaataagaggaaaggatcatgtgtggagcttattattcacataagaacatttaatacaatgtgtcttagaagtaacaggggagcagaggacaaatagtaactgcttaaaggttgatctgcgattcaacagtttcgcaaaataccttaatgatatctcactgattactccaaaaagattccgaagacaagaacaagtattaagaagctacatgtacgtataggtccaaacaacaaaatccaaaatcccaacaaattgaaatccatagaaacaactcaaaaatgagcgaatttagagaaaattccaactttgatcatatgaagtaaacaagaggaaaaggttgtgagatcatcacagaaacaacagaggatcattcatgttctataaaaccaagtttataaacttcatcaaaatactagagacatgttggagcaatatctatgccaggccataccatgactccatgcacatacaaaccagaacgtaacaaaaaaaattggtatagcaaatttaaagagcatcaaaatacctcttggcgctcaataaagcctgtattatccaaatcgtaaagcttgaatgaaactgcaaaacaataaaaaatgtcaacacatcaactaaataataccagcacaaatctacaaaaccgtgtaggctgaagctattgctattatatcatgtcatttcaacttacagtcaatcttgtcgtcctgtggagcattgggatggaaaaaatttagcgatcttacaaagtcaccgaaatcaatgtatccctttcgattgacatcaaacatatcaaagatctgcaagcaaaattcactcagaaatcagaatgtatacctagagtttgaagaaaaattagtccacaaacgttctactcgataaacgtatgttattcaaacaattgcaagcaataaactgtatctccttcaaacaaattcattgcttgaacaccatctgatataaaatctacagacaaatatcattttgcaaattggcaacaagcaacagattcgaaaaatgcagtacttacccgatttgcaaagagattttctttcttcctgtttttgaaaagtgccaactggaactcttcctgcatatgaaacaaaaggattctattaaaaatggaaataacatatgcaaatgttgttcagtacttagccatgtgtctaatctttcaatgaaaaatctaaacttaacatgaaaaagaacaggaatctttggtaaaaaatgcatcaaatttttaacaaaaaaactcagctaaactcaaatttaactaaagccatatgacagatcaaaatgccaaaggtaagagaccttggctccaacaataccttgtttatcaacccatcatcaataacggagctgctaatactcttgtaaagctcaaacaatgcttcaacttcgctaacactaactggagaatgaaaattaacacaagataatgcttaaaatcaacatgagaaaggagtagaaaacttaataagcagtttattttgattgaagagcttctcaaacactgctttttcatttttgataaaaaaaaaaaaaaaacaaatacatgattcataatcatcaaaacttgaggacccaaattcagtttagtcatcagaagtcaaaaagttcatgcacatacatatatagatatacaagatgatctgtataactcattcaaagatcaaagaataagaacttacaagctgtttgtgaagcaaggacgactgggtcctcataaccaggaaattgccttcttcccttagaatgaaaacagcccatttaaagaggaggaagaagaaggttgtgccgcttagctaagctccttcactacaatttattatcaaaaccatcttaaccttgcaaattcaaaatcccaattccaaaaaaaaaaaaaagaaagaaatccatgcaaaattaattagtaaaataaagtacttattagtcctaatattttacaaacgttgactagttttcatacgtgcttaactagaacaaaagctttaatacaataataattaaaaagaaaaacattattaatttttcatgggattagcaaaagataataaaaaaaattaagaatttgcaacattataagcaataaaataacgaaaaataatacagggtcgaagttatgcagatcgaatgttgaaaaagtgttaaaatttcattattgtttttatattttaatttcccagtaaccaaacagaaagctaaacattaaaatacaatcaagatgaaccagttttaagggtataataaagaaccaatttttaaaagaaaaacacaacgaaatacaaatcagattaacaaaaaacaaaattcagcgaaagcaaaaaccataacagctaaaataacgcagaagaaacttacccaaattaataaatggccggaaaaaattaaatcagaaaacagagaaattgaatgagggaaaaagggtttaggtggagaaagagaatacaaggtggaacagagaggcttcaacggagaaaatagtgaaatttagcgaaaccgaaagagagaagacagtatatgaacgggtgagattgagttttgaatttgatcaaacaaacctaaccacaatttaacggtgatggattcaacaatgatacactaacgaacttggaaacgagagcccaaagtaggagaaagtgagttgctaaataccaggcttagatttcgcgagtgcatcgcacgcgttattataccgcgtgaaaaaaatcgggaagattgcttgttcttaagtttaaattaaaagattggaattttggaatattcctcctaataacccttaaacccaaagtccctcactcatagggtcacgctcccttgatgagctttttatttgttttattatttattatttttttaacaaagctttttatttttttattaatttgttaaattgtagattttttttt

SEQ ID NO: 45227 - DNA, 6377 bp, Cannabis sativa
agttttaaccaagtagcaattcttagttctaaggctttcatctctatctttctttctctctgcctttaatcctttactctgttttaaaagctttcatggtgtcaaagcttctctgactcacgtccatggcttcctccaatgacagctcgtctcccgttggtgttactgatcctaggcctcaagcgcctccacctgctgctgctcctgttcactggaatcctttctcaaattctttaacttcgtctcttaccatcaaactcgatcgagctaactaccttttctggaaatcccaggtagtccccacggtcattggtcatgaccttgatgaaatactgtttaccagtatctctccccctcgcactcttgtcaatggtgatcccaatccaatgtatttctaatggcgaaagaaagatcaattactcctttcttggcttcgatcttctatgactgaagcaattcttggcactatctcaaattacaactcttccaatgttgtgtggatggctcttgaacagaaatttgctagttagtccaaagcttgattgctacaactcataggacaattgtccaaccttcacaaaggtaatctaagcatctctgactatgttgataaaatcaagtctatctgtgattctttagcaattgttggtcattcgatcactgatcttgatcttatttcttcacttgctcaatggcccttggaccggagtttgatcctgtcgtctctggtatcacctctcaaagtgatgttcttacattagaataagttcaggcacttctaatgtctcatgagacaaggcttgaatgacacacatccatgatggatctttccaccaaaatggctgcaaacctcacctttgggtcaagagctggaccttatcaacacccatttgcctctggcagaatgcctgctggtgaacaacaacaatcaaggctgcctaacagaaactatggctgccctccctccaataacaagcctttgtgtcaattatgcttgaaatatggtcacactgcagcaacttgtcattacaggtttgacaagaacttggttacacccaagactccttcacctcagccccaagttcatctcatagaacagggacctgttcttgatcatcaaacccaaactctccctgattttggagatgatatttaatggtatgttgatactagcgcaaccaatcatgttgcctttgctgtggaatctttggactctgctacaccttacattggccaagaatcagttgtttttggagatggtaagaaattgctcatctctcatattgataaaaccactcttcattctttcaattctactcctttgaaactccaatctgttttacatgtcccatccattaccaaaaacttggttagtgtatccaaattaacaaaagataatgatgtttttcttgaatttcacaaatcttcttgttttgtcaaggacaaacaatcaagggctttccttctcaaagggattctcaagaatgatttctacctattaggtgatggccactccaaactgtccaaccattctcttgagtgtaatcttgtcacatctgttccaagtttatctacatgtaattgtagtacaatgaactcatgtaattccactgctactgcagtttcccattgtaatgatttttctattaataaaaatgcctcttgttcctctcctagtgtctataacaccaattttcataatgatataaacatgtggcattgtaagttgggacatccagcccctgctattctcagcaaaatattaactaaatacaacataccacactccctcaaaaatctgcaattttgcaaatcttgttaattagggaagagccatcgacttccattttctctgtcagctagtagagcatctcaacctttagaacttgtccatactgatctttggggtccctcccatgttgtgtccaaagataactataaatactatatactttttcttgatgactacagctgtttctcttggattttttccttgacactcaaatctcaggcatttgaagtgttcattcggattcaaaagtttagttgaaaatcaattcaacttaccaataaaggctgtccaagctaatgaaggaggagaatacagatcatttgaaagatttctcagtgatcaaggcatcaaatttcagttgtcttgtccacacactcatgagcaaaatagacgagtggaaagaaagcatagatatgtcactgaaaccggtttagctttactgacacattctggtcttgacatgtcttattggtggcatgcattccaatgtgctgtctactctattaacagaatgccaacctctgtcattggcaacattagcccatatgagtgcctattcttgcagcaacctgactacagcattcaaaagccatttgaatgctcttgttttcctcacttaaggccttattctcatcacaaaatggagttcagattcgaggagtgtatctttcttggatactctcccaaacttaaaggatacatgtgtgaaaataaagatggtagggtcttcatagctcgaaatgtggtgttcaatgaatctcagtttcctgcatttcacactagcaacacacaactggtacaatctcataccaatattttctttcccacaactcaattttttactcaatctgaacagaattttccccaaactaatattccacctattgctgtcaatgagcacaatgattctctttcatcatttgctgctcccttgcacttaggccattcatccagtagctcctctatatcactacatcagaccctatcaccatccaatgttgcaactatgtccactagttcctcacaggattcatctgaacctacacagaatttgcataatccttctgctgcacctcagagaacacatgccatgacaacaaggtctcaacatggcatctttaaacccaaggcatatttggcaacaaaacataaacttccagaatctcttctccccagagaacctaagtctctcaaattggctcttaatgatcgtgcttgtaaatgcagccatgaataaggaagttactgcccttaagaaaaatggtacatggacacttgtaccatatcaacctcatatgcatctcattgataataagtgggttcatcgcatcaaattaaattcagatggtagtgtggataggtacaaatctaggcttgtggccaaaggttatctacaagcaccaggaattgattatgctgaaacattcaaccctgtagtgaagccagtcactgtcagaatggtgttgacccttgttgtttcatttcaatgggaaatcaagcaattagatgtctctaatgcttttgttaatggcatttgagaagagacagtcaatattctacaactaagaggctttgaagatctcaccaaaccagatcatgtttttcatttacataaagccatctatggccttaaacaagcccctcgggcttggaatgacaaactaaagactactctaattgattgggggttcactgcatcaagagcagattcatctctgtttgtttatggtttagaacacgacttgatcatctttctagtatatgtggatgatatactaattactggccccaatactacactcatcaacaagttaatctctgatcttaaccactgttttgaactaaaagatcttggtgatattcattatttccttggtgttgaagttcacagaaccaaagaaggaatatatctgtctcaaaccaaatatatctcagatttacttgtaaaggttcatcttgatgaagctaaaccttgttccaatccttctagcagtgcacataaactctctctatatgaaggcacaccttttgaagatcaaacattgtatagaagtaccttaggcgctttacaatatttgactcttacaaggccagatgtggcattcgttatcaacaaactgtcacagtttattcatgccccaactcgtgtgcattgggaagcatgtaagcgtttgctcaggtacttaaaagggacaataaatgaggggttattactcaagccaacatctagactctctctgcaagtttactccaatgctgattgggcgagttaacttgatgacaggcactctactggtggttatgcagtattctttgggccaaatttagtctcttggtctgcaaaaaaaacagcaggtggttgctcgatcatccacataatttgaattagagctatggacaatgctgcagcagagataaaatggcttctttctctactttctgagctgcacattacatctcaagatgttccaattatctgggttgataatcaaggtggtgctgcccttgcagccaatcctattttcatgctagatgcaaacatatagagattgatttgcactttttccgtgaacaaataatgaggaaggaaatctctgttagacatgtcccaagtgttgatcaggttggtgacattctcacaaaatcactacctaaagaacgatttcattatcttaaaggcaaactcaaagtgttttgtacaccttttcgtttgaggggggtgataaccaataagcatgtgttagttttattggttaatttaggttgttatttcagttgctttcttgtaactaattctgttatttttcagaattctcttgctttgtacgaatcttagtataaataaagtgctcttcctcagttttaaccaagtagcaattcttggttctgaggctttcatctctatctttctttctctttgtctttcattcctttactttgttttaaaagctttcatcctgcaccaatagttactggtttgttcttgccagtcaccggagtccaatgaccaaccaccagtaagttttccgaccgtgcgtccttgaatactagaaccaccaactgtgttgtccactcgagatctctttgcaggaactagccttcgaagaacttgcactggctttataaaatcaccatacttccatctttgaccatgagtcacagtttgaggtaaagaaatacattctctcaagggggtgcccaatgatatcgtaacaaaaacaaagctccgagagtttttcgtattttaacggtatatttgattttggctcccctttaatcaaagcaaccttgagaaattttagaagaggcttggtatcaacaccaacacgagcacagatgaactttcccaagaaatatcttaaaaagaattagtatcgattttggtaacagggtgattaatccaccaagaactcggcctatatcctcagtcatacagcaaatgggtaaaagatgaaattgaaccaagaattttacccgactaaaatgaagtttcgtataattgtcaatccctgtaggagccttgagatccaacaattatttctccacaagccaggggccatcactgaaaattttacgttgatcaagtctgagaatcgaaaaagaaaagtgttattgccgacacactcaatcttcatggtaccattgatttttcaaaagccactagtggcattaatcatatcatcacagttaaaaacttgtgatgagatcatcttgccaactaatgtttttgcaacgttgtcagagccgcttttcgcaacctctaccttaagatttgcctctataatctcatcttcatcactctcacaatcaaagaaatatgatccatgtcaaataatcacgacgacttcaataatcaagctccgcaatctaactcagttactcaaacactgtcaatgagaacaatagagaaagagaccaaaaatatgttttatattaggggtttacatcagttggtttggtcgaattatagtgtattttaccaacccaatataaatgtcaagttacaaatatctaattgtaacccgtccaatgaacaaaaaaaaaaaaaaatgtaacacacccaataattttcttcagtttggtcaggttatacgtttaaaccgatcttcattttgtattttttttttattattcttagtttttagtattcaaataattgatttaaaaaaatatatagtataggcttttcaagattaaaatggttatagtttaaattaatgttaaaaaataaatgtaaattgaataaatattaaacaacatttttcaaaaaataaattaaaaaaatatactcagatgtaaattctaaatttcaactccaatattcaaaatcaaaattatcagctataaattctaaatttcaagttaaacactataaaatacaaactttaaatgtaaaatagtttaactattaaacgtaatttatattttatattattgataattttagtaaaaaatatgtaaatcgatttattcagtttatttggattatttgagcgggttagaataatattcaacccgcctaatatattcattgggctgtttgaatttttcgtaaacttattcagattgtattttttatcggttt

SEQ ID NO: 45228 - DNA, 1244 bp, Cannabis sativa
  modified_base (49)..(65): a, c, t, g, unknown or other
gttaaaccaagaaatgccgttagatatgcacttttaatatataaagatnnnnnnnnnnnnnnnnntatactaggtagaagttacgtgcactgtacgtatacttagttatatgtttaatttttattttaatttatgtattttaatttttgaattaaaaaaatatcaaatatagtttaattaagtatacaatattattttaatagaaaattgcttaattttttatttaaaaaaacgaataatagtattttgaaaaaacagttaaagaatataaaattaaatgaaaaatatttacaaaatgacctagaagtaattacattttgaaaattaaaaagaaattgtttactattctaaatattaaaaagaaatatagtctaaagttttaaaaattaagaaaaactctgcttataatgttaacatgtctacacgctattataaaaccaaacataaaggctgcattttataatttctagagttaacatcgctttaagaaaaaatatttaaaataaagtctatctctgatctaaattttaaaagaacttggattataatgctaacccacatataacttgaaaaaagaattatcattttctctttttagcagctccaccagatgtgcaagaaaaccacaaaagaaaattaaaaaaacaggtattagaaccaaaataaatcaatctttactgataatggataaatgaacaatgtttcagaaagcaaaaaaaaaaaaagaccacaacagaattattaattttctaatgtgatgaaaataaattcaatgttataaggctaaaatctactcaatttaagaaaaacaagttgagaaatcctcaatattattttactaattaaggtcatttgaaattatctaatcttgcggagaacattggacctctcctcacgctacttctccctcttacgggtttcgagcttcttctttgctactttgtcttatccaactttcagaagctcattaatccttttatcatacggtgctaataaacatactatgaaataacacaatagactcacccctttgcggtcagaaagtctcagagctacttcctttttagtcataacatatcctttgttcataccgtcggagctacttccttattttagattatcatagaatacttacgattttacttttaaaacttgaaactaatcctatagaatagtcaacttcatcacataaatacaaagaaatattttctccaaggattaaagacagtgaaaaactattacca

SEQ ID NO: 45229 - DNA, 2477 bp, Cannabis sativa
actcataatagtttgtgacttttgacacattaaagaactccttaccatttctcttaactgttcaaaaactaaaatcagcagtcgaattgagattaaagaggaaaaaaaaaaaagaaagaccccaaatatattatatacgccatattcatcgatctttaaataacacaatgtttttttcccctttaattagctaatctcgactgatttgattatcatacatatcttgtattacctgtatctaacatattaaagaatcaaaaaactaagaaaaaataaccagatagttaattattaataattatatatatatatatatatgtatatgtattagttattactagattaagaagagaagcatttccccagctacaagtcccatagtcgcatttgtgaggaggccaccagtcaagagttacgcacacaaagtcatcatctattcttccaatggcagaacttccattgatataaacagtaccattctcagtactgatctcatcacagtaggagtatatcccaaccccaaacaagatgatgactagtattattaacaaaatcacacaaacacaacaacctttacacttgtacctgttactactactactactactatctctcttttggtgaggatctctactgatgcctttcatgcaaactaattgcaattgcagccccagttgagttgaatattattgtggattagtgatcaagattaattatgtgtatatgtatatatatatatgtgtgtgtgtgtctgcgtggggacaggggtgggaagactagtactgtaggtgtagctatataatatgtttactatgtggtatgtgttgtattgtatttataatagatatatttaaatttaattattacttataaatcatttatcttaaaattaaaaaagacatggattgttggtggacctgcttttctaatataattataatatcacaataaattaattatctttttttatagaaattcttacatcaataacataaaagtcaacttgtaatacatctttaactttataagggtagattaatttttataccctttcttttgttttatttatcaaaataccacttgcacatataattatcttaatgttgatatcattgttcttacatcacactcaatcaatctatcttttctatataatttctgcatattatttcaatttcgtattttttttttttaattttcagagacacatttgaacttccctacattatttaaagaagaagtatctctaattgaaacctgatcatgatcttcaactgctattgaagaatcatccccattttttctcttttttttttctacaatttttatataaatggctataactcgttcttcatcttcttcatctctgaaaaaagttctaattataagccctaaagctttagaaatggggttgcaatctatctccgaaaaagaataagggaaaaaaagttagatattgatttttttacggtgattttgttgagctcaacagatggaagctcctgcaaagaagaaatctaaaattattaaaagagaggaaatcaaggggagtcctattgatgttggttaaaaggggaagaatcatgctcctcgtttgattgaggtttgtattgcatttttttagtttgtttcaggtttattatgttgattagttcatttgagtttcatttatatatttcgtattagttggttttagggtttatttctagttctcaacttcaaattcatatttctctttttaatgatttatggtaccttgctgttgattttaaatttttatagttttgaatttatatatgttaaatacttattatagtgtgatttgttgtttttattatttttctttttaatttttttaggtttcgtttatgattcattattgttttagttgatattcgtgatgatatttataaattattgcaatgtactatgtattctggttttcttgacattttttatttgttctgtgtgaatgtgtttttctaaaagtttatacatagttttaatatacttttgaaattttgtatgtcataaacaattttctatttttgtgtttctatatatttatgcaagattgggaatacaaattccatccttctaattattccaggtctaagtgtgttaattattgcacttatggtgttattaagaacatcaagaaaacaaattcgggaatgtgatgaaaatattccgtgatactcaattaggttatttcttggatgtccctgagtacaaatttcatccccaagctattcacatcctttttgttgagggaggttcaacaaggcaatccaaaagaattttggaaaagttagtcattgggtttttggttacctcgatgtgaatgaaggcattatttttctctataatataagaatatttctatacacggaaatatatttctatttaaggaaataaaataaataattgattttttgataaatgaatattttatattcattgaatttggataaaat

SEQ ID NO: 45230 - DNA, 851 bp, Cannabis sativa
ctaatatcctggtaaaataatttccaacacattcaacatcaatgttccccctagtaagttacttttgttcgtcgatgcctcttgggaaaatggatcgggtggccttgcagtcgtggctctgaatctttttgataattcttggtcctactatctgatgcattctaaagctgcctctgctatggaagctgaaactaaggcatcaagcttgcccatgagtgggttgctcaaaattcttgggagcacttcatccttttgtcagattgcaaagtagttattgaagctctgggtaatagactatgccctcctcattggagaattttacacctttcgcttgcagatttagatgttattaaagtcttttcgtattgtaagcttgtttacattaatcgtcgttttaacttagttgctgatggactggaaaaaagagctagagattctagtcatttggctgatattttctaaggggagggacccccctgtggttcccatcttttccttctataaatgaaattgtgttcttttttttttttttttaaaaaaaaaaacttaagaattttagagaatcatgtaggcttggtgaaaggaagttactggaatgaatgaattcttaaatttaattaaattgaaaaatttgtacataaagttttatgttcaattattgcattaatttttattttattttcttctataaaaacaaataatatttttatccatcagtttcatatattgatgcttcttatcaatttttgagtcggtgaagatttctatttcttttttttttttaatttttcttttcataataaaattagatattattattattattattattattatagatcggaagagcg

SEQ ID NO: 45231 - DNA, 995 bp, Cannabis sativa
agtaaaatatgtgtcataaatattgaacttataaatttattgtaggggcaataggtacacttgatagaacactagtgcatgctataattccacttgataaacaaactgcttatagagaaagagaaaaggggaactgttacaaaaatgttatagcaatatgtgacttcaacatggtctttacttatgtttacgcaggatgggaaggactagcacatgattcacgagttctaaaagagatagtagccaagctaaataattattttctatttcttcctccaagtaagtgattaacgaaatttattttatcgcgataaactaattccttaatttaactaattcaatatttgtatgcgtatacatttcaaatacgaattacctatgtgatgcagcatatccatgctctcagggatttttatcttcttatcacaatgttcgatgttggttaggagattatcgccgtagtcgtgctgtaatgaaagaggaaaagtttattcatgctcacgctaaacttagaaatgtgatcgaacgttcatttagagttttgaaagtaagatttccaatactagataagatggctccatatgagtttcatgtccaaagagatgttgttattgcatgttttgcaattaacaattttatcatgaaggagcgtattaatggtgaattattcaatcaatttgatcaacctcaagtaatttttaaggaaagatcagaagaataaattatggaggaaacaaataagcccaattggagagcaaaaaatgcacatttcatgaataatttgataaatgaacttgcactaaagttaatgcaaaaaacaggaaacaattgatactttaaattttttaaaattaattatattttgtatttgaatattaaaatactttttttttttaaattagatataatataataaatttattaacattatataattcaaaactctgaaaaatacattcatatatgaaaaagacaaacaatctatatatttaagt

SEQ ID NO: 45232 - DNA, 2503 bp, Cannabis sativa
ggcatttgagcttgagcaagcaaggtaaggcccatttcaacaatgtgcctatgcttacgctcagcacgaccattttgggcagaatcatggggacatggatgttgaaattcaatgccatgttgatgaaccaaatcagtaaagggttggtattcaccaccccaatcagttctaagacttttaattcttttatcaaacttattttctaccaagttcttaaactgtatgaatgcattaagtgcttcggatttggccttgaggggatacaaccaagcaaacctactgtgatcatctaggaaatgtatgtagtatttgtggtttatgttggatgcaatgggagctggcccccataggtcagtatgaacaagttcaagcaaggtgttagcacgattagatgacaatttatgagggagaacatgtgatttaccgtactgacatgcatcacagaatttttgcatttcatttttaaagtttcttacatttgttgactctagaacaagctttaaaatcctaggtgatgggtggcctaaacgtctatgccacacatctaatttggacagagagttttcatcagcttcaagctgatttacattggcagagaaacaagtagaaacataagacgactttgactggtgtttatttttgaagtgtggttgagttgaacctgttgatgatgggtgagatgagggtgtttccagcctgtataatccatctttaagcattcctcgaagcaccaccttctgtgttgccttgtccttcaccaaacacacattagaatgaaactcaattagtacattgttgtcattagtgagttttgaaacactaattaagtttttagcaatttgagggacaagtaacatttcttttagttgtaaatgtttcccatcattggtatcaagaacaccactaccaatatgggaaattctgattttgtttccatcacccacagtgacagattccttaccaacatatggctgtttctggtttagagctgcactgtcggaggtgatgtggttgctggctccactgtcggcaaaccacacatcactctcaaggatttcaggactagcaacaaaggcattatgattgttctgaggtggtttatttcctccactggtttgattcggatcagatcccatgaagttttcatcaaacctgttgtagcatattgcagcagaatgaccgtatttgccacagacttggcatgttggtcgatttgtgttgattcgtcctcttccacgaaaccttccagggctcccacgagtaccagagaaccggcctccagtgccagaatactggttgttgttgctgttgttgtttgaacctcgaccacgtccagtgttgtgagatgcagagttattcttggcagcaatattagcttgaggatttgttgagttggttggtttgctgcctatggtaagattctgcagcctttcgattttactatcgaagctcaagagaatatcctgcagttcttgccaagttgtgcttgttctagcttcgatttgtaccacaatcgataagtaatcagcatccagacctgacagtacgtttgcaacaagatgtgcttctggatatggatcacctgcaagagcaagaatatcagaccagtttttcttttgtcttaagtactcacccatcggtgtggaaccttttcgtacagtctggattaaggttcttgtatcatccatttttgatttagagtaggctccataaagactttccaaagctctccataggcctgcagcagaggtggatcccatgacttcagtggcaatcccttcggtcatggaactgtaaagccatcccatgagtagttgatcattgataatccaatgttcatactcagggttagtctccatttctccttcgtattttgcttctccagtgactggaagaaattctggtggacacaactttgtgccatttaagaatccatgcaacctgtgacctcgaacaatggtggaaaccattgttttccatagtgtaaaattgtttcggtctaatttgagtgaaaagggttgattgagtgtagttggttgctggttaaaggtgtttgggagctgagatgccgaggcaccatttttgtttgtgctgacagctgaaggtgtctgagaaccttcctcgataggttgctgttcttgaggtgtagccattgacaggggtcaatgattggctctgataccaacttgaaattcagagaatttaggaaaatgatttgctcagctcattcaatgcagagcagagtcttgccttttatagatttagaaagttgttacaaaaggtaataagagcaacggctctttgacaggtggctaatgcaaaatacaataaagatcatgagggaatatcctaacagaattgccaatgattattccctaaatgttggaccacacaattgcaaggatgacacatgtccaatgccaggcagagaatcccctgcttctctgcaattcatctgcaccagtaatcaccaatagagtgcagaattttctatttctcaaca

SEQ ID NO: 45233 - DNA, 1147 bp, Cannabis sativa
aaattggtacaatatttaaaaaaggaggtaaaaatgatagactttaaaaaagagggtaaaaataaaagagaacaatataaaaagagtatagagtgtaatttcttcacaaaaaaattatattgtgaggcttctttatcagctatatagtgagctatcctaactcctcatggatttgaaatgtaaggcccatttagtagtaagtggcgttgggccctgaaagactttagtatgtttatcagcttctaatagggatatttatatgagagatttcataaatacacaaaaacactaaaaaaattataaaaatacggtttcacggaattttaaatatttttacgatttttttattatatttataaaaaatacgatctttttatgttgtactcttgttaattagttgttaattttttattatctgtatgttattttttttttttttgttattttgatgttatttaaatattatttttatttttgtattgtttcagtgaaaaaaaaaaattctttaaacgtaaaaatataatttatttacaaaaagtaataccttagattatctttatttatattttattgaaatatcccacaaaaacattaggagttttacatatcacacacatttttttaatatcttcatcaatttttttcctttttcccttcgaggactcactttttttctttcttctttctctctcttctctctaagtttagaataatttttggctatagcattactcaatttaaatttaaaaattattattgtgatctactcttcaatatgaacattttaattagtgaaaaacatatatatttttactatttttagaaaagaaatcatttggtttctaatataatgatttgttactattttattattttaaaaatatttttttttctgattttaaattcttaaatattttaagttgtttatttcataatttatattatgtggaccaataaaaatttgctacgtgtacacttgtatacatgtgggaaattcactgtggcacttaactgagattttttgacaaaagtgtaaagaacaaaacggaatgagagttcaataggttttgccgtcaaaattttggtttatatggttaaatgttaaaaaaagtaaagttcaagtagttttgccactaatattccaacc

SEQ ID NO: 45234 - DNA, 938 bp, Cannabis sativa
tatacaaattaatccatttgaaattgaaaaattactagaagattaaactaataataatagtactatgatagtatagtttttactttggtatcttataccatgtaagttcgattgtacttttgagtattcaatggttttctatgttcatttaaaataaaaatattactccttacaaataaatatattaatatttatatatattattaagtagttaaaattgaataattgataatgatgtatttataataagactttggtctttatcaagtttattacataatggtataataaatttataatgatgctttcatatattatataatttgatactcgttggtattctatacaaatctatactatttgacatcttatttcatttatataatattaatcagcctacctaccatattataacatatgatattgtgtactattatacagttttgtatccaaaataatttttttcttgccctacaatatattcttattttacaccttcttctttaatgtaatgaagaatcgcttaacaatgtttttattaaccggctaagtattatacactaaacatgtacaatattcaatcagatattttattattacatttagtaattattccttttgtttagtgttttatatattaggaagttttctctataatgagatgtgactacgtgttatatcgcttattattataaaaggataattacacaagttattatttttttttgtaaaaaaaaaatacatttttacgagttttttttttttatatttttataattttttataaaaataacatgaaaataaaaaaaaactaaataaaaataatataaaataacatttaaataacatcaagataataacaaaaataacatacacataacaaaaaatcaacaacaaattaataagataacaacataaaaaccgtattttctgtaaat

SEQ ID NO: 45235 - DNA, 3448 bp, Cannabis sativa
ctcgattccgctttgaaaaattgtggcttgctgaccctgaaagcaaagaaattatcaatcactgctggtgtaatgattttgctactgatcccatctcaaatgtcattcagcaattggacaattgtgctgttcaccttcaacgatggcacatccgaaagtatggaaatatgaaacgaaaaattactgatgctcaagcttcggtggcagcgctgaataatctaaatacacaatctgaagctacagccgcctctctcaaagcacatgaatcagtccttgatgatcttcttgaacaagaagaaatgtactggcagcaacgatcccgcatagattggcttcagttgggagaccgaaacaccaagttcttccactccaaagcatctgcacgaaagtccaataataaaattcgctctatcactactgaagccggaattaaagtcacttcaaagcacgaaatgtcagaggctattcaagattactttgctgcaatatttcaatcccagcctgttgatttacccgcgcttgatgccgttcttactgcaattccatgtacgatcactgatgacatgaattttgaactcgccaaacctttcactcggtctgaagtagaggaagctttattttcaatgggctctgataaaagccccgggattgacggtatgtcggcaatgttttatcaaaataattggaacattgtgggcgattccgttgtggctgctgttctaaacattcttaaccacggtgctgacccaactccccttaactccaccatcattactttgattccgaagaaaaaaaaaccagtctatgtgaaggactacagaccaattagtctctgtaatgttatctcaaaacttatcactaaagtgttggtggctcgctttaaggtgtttctccctcatgtcatatctgaaagccaaagcgcctttttaccaaaccgtctcattactgataatatcttggtggccttcgaacttatacatggaatcaaactcagaactacgggacgaaagggagttgctgcaatgaaattggacatgagtaaggccttcgatcgggttgagtggtgttttgtccagcgagtaatggaaaaaatgggtttctgcagccaatggatcacacttatcatgacttgtttgtcaacgaacagtttcacttttcaattgaatggtgaaacatcgggttcccttattcctacaagagggctgaggcaaggttgccccttatcaccatacctttttttaatttgttcggaaggtttttctcgtttgttgcaacaagaagaagacatgggtcatctccatggttataagctgacacgaagatccgatcccatctctcatttactatttgcggacgacagcctacttttttgttatgctaatgaggagtcatgccttgccatcaagagagtcttggatatttatcatcgggcgtctggtcaatctctcaatgctgacaaatcggtaatgtccttctcaccaaacactacattggctgctcaagtttttttccatagaacgctttccatgccgatttgtgagtgtcatgaaaaatacttggggttacctgcctactctggaagagataaacaactcatgttcagtgatgttaaagacaaaatttggaggttattgaatagttggaatgaaaaaattttctcaacgggtggaaaagaaatcttgttaaaagctgtggttcaatctattccaaccttcgctatgagttgtttccgcctcccagttaccatgtgcaacccaactagaattcaatgattgtctaaacttttggtggggacgaacggaatctggctctaaaattcattggcgcaactggaaattaatttgcaaaaccaaattggaaggtggtttgggcttccgctcttttgagcaatttaatcaagctctcttagctaaacaagcttggagacttctagaaaacccatcctccatgattttccgacttttgaagagtagatatttcccccacaactccttccaagatgcccctcatggtcattcaccttcactatcttggcaaggtattctttatggaagggaactgttgctggctggtttgcgttggaaggttggagagggtcgaaatatcaattgtggatctgatccatgggtgccaggttttaattcctttttgccatacctatatcaaggacctccgactgctgtggtggccaattttattactgaagaacgccattggaatgttaatctgcttcaacaatgcttccaccctacagatgttgaaaggattcttaccatccccttgagctactttcctagctctgacgaactgatatggcatcacagtactaatggtgtatattcggtacattcaggataccactttgcaactaagctagcagaccagaacaattcatcaagttccacaaacgacacatcctggtggaaatttttttggtcgctgcaactaccagaaaaggttaagattttcgcatggcgtgttattcatgatgctcttcccgtggctacagctttagtcaaaaagaaggttattactgatgctacttgttcggtatgccgtaatgcttgggagtcaattggacatgtgttttttggatgtcgatatgcaacggctgtttggcgttatgcttcttcaactttcgattggaacttggctactgctttacataagggagattaccttaaacacctctccactatacactcaaaaactgaaatggagcagattttttgtactctctggtgcatttgggctgagcggaatcaagttgttcatggtaaatcggccaaacctgctacatcacttgctgccttttcttccaactatctgaacaattatcgagcggcacaactacgatacaaaaaaccagaatctgcttctcctgcctctacaactatggctcctgcggttgcatcttcacctgctagatggcagccaccacccccaggtctcttcaaactgaacattgatgctgccatagatacaactaagcatactattggtgttggggcggttgtaaggaactcttcaggccatgccattgcagctttctccatgccgactgttggtctctattcttcgcacgaaatggaggctaaagctatgttcctcagccttaattgggctcttcaattacaactacaagtatcgattgtggaaactgatgctcttatggtctccaatgctttaaacaataaactaatggctgtttcctcttttaatgatttgatattagatattactagtctcctttcctttttccctaacatagttgttactcatgtaaagcgatctgcgaagttgctgattgtttagcaaaatatgctctagggcgggatgagtctatctcttggatggaaaattttcctccatcgatcaactctgttattgtaaatgattatcctctttaatttataataacacagttatcttttcaaaaaaaaaaaaa

SEQ ID NO: 45236 - DNA, 1227 bp, Cannabis sativa
taaaatatgttttattaatggatacaagtattcctcaacttatcccataaatttttgagaaatttacacccggtactattttctcatttttttacaattttactgttatacgcctaaatttatttttttactgcctattttatatactgtatactgtttttttcttaaatttaaacaagcccatgtgatatcctctccaatatttatttaaacaattaaataataatttaattaaagagatttaactactataaatagaagcttaatttgagaaatcagaacatcacattctgcactgaaatttcgaaatctatagacataaaaaggaaactaatttttctctcagttattcttactcatgtgttgagaactcaaaaagaacaaggttatacactttatcctaatagcctacactattacttatgtgtgctggatcttcaaactatgtctgatgatgattgttggcaactattttctagacatgcttttaacaatattggctcaaatgtacaaatggagttggtagacattggcaagcaaattgttagaaagtgcaagggccttcctttggcagtgaaattaatctcaggtcttcggtgatcggtgtcaaatgtagaagaatggagaacaatcctacaaagtaatgtatgggagttgcaatttcaagaaaactagaacaacaacattctaccagctctatggttaagctatcactttctatctagacacttaaaaaaatgctttttcatttgcaatccgtttacaaaacaattttttggggttcctcaacctcgcaatttcttccacactgatgccagatttggactaatggtatcaaatgattattataatcttatgattaactataaggtggtcaatatcaatactggagtaactgagtctacaactattgtaccgccatactcattccatttagctattttttcttctgagaccggacaatggagttactcaacttttaactgcgcgattagctctttcgaaaagatgttgaattatccaaaaactatggccataagcaatgataccaactaattgaattttcaaaagtaataggccacttacattcattgcaacctaagatacacattgggttagttcgagagaggttgcgcttgtcgcagttcttctgtgaagaagtgtgtagttggaatttggtgcattatcacaataaaatgatgataagctgtacgagtttgtcgcaca

SEQ ID NO: 45237 - DNA, 1597 bp, Cannabis sativa
  modified_base (65)..(65): a, c, t, g, unknown or other
gacttttttttttttttttacatagattagaattctcttcttgtataataaatttttaaataatnaattatttttaaatgatatttaattattttcttacaactaaaaaaactaagtatgaggcctcaatttcataaaaaaaagtatgatgcctcaagttgaagcctaagtggtatatgtttaaatactattggactagaataataattttgcttacaatactacaccgttttgttcttcagtcttaaaatacttttaaatctctgtgcaaaattttacatttaattctattaacaactttttcttattcaatgttaattaaataatagtacgttgttcaaatcattagcacaaactagagttaataatatacataaatctcataaatttatggaaagatggtaagcattattgttgcacgtacatacttacctttctagcaacaattcaagcacatctccctgaaattttaaagcttcagaatcaattcaaagcgagagatgaaagaaatcagaacttttctctcgttatagtatcgacataaatttcaagtttcaataatcaattcaaagcaagagataaaacttaagagtagagatacttctagaccactattgccattattgcaaaatgaaattaacaaaaaattaacgttaattaagagaaagattgacattaaaaaatcaaaagaaatcaaagctattatgatacatagagtgagggttgtagtacctcaccagccatgactaataagactactgaaatttattgtgttgttgagaaatcgaagacaacaacgagaatcaaagaaagtgatggggataagagagcgatgaagataggtttctctgcttttgatgtttgatttttgtttctttgaaattagaaattgctctcagatttttctgaaaacttaataaatatagaggattactagcgaagggtcttcaggtgaaagggtccttcaattttgtacaaaataagtcgaagcaagaagggaggagtttttcttttcgagtttgaggttgctttattttctgggggagcttgaatttattttttgactatggtttgattttttaaataaatgactacttatctaaaaaaaaaacgagggaagagcttaacctttttttcgggaaaatacgttcaaccaatttaaataaaaacaaactaaataatccagtgtaagaattttaaattaaggttataagtgtaataaaattttaattatgaaattatatgtgtataattttaaattataaagatttgataatttaagggcaaaaaaaaaaaaatactaaaagatcctatttagtaataaattacaaaatattaattaataattataattaatttaattttaaaatataattaattttaattaaaattttataaggaataaattattaggtgactatcatgttataagttaattattatttattattattaaatttctaaattaatcacaatcattcaaaactaatttaatgactaaaataatataaccatgataaataaaagatttggacatccacataattattaatatttataacactcccacttggatgtccataataactgccttatt

SEQ ID NO: 45238 - DNA, 1193 bp, Cannabis sativa
tatatcagtaagatgtatcttctttttggtagtccatcatttaagaattttaaagttaagtgtgcttgacttagaggatgggtgacctcctaggaagttttcccaaagcatgcaagtgaggacaaagtacactgaaaaaacttatgttggtttgcagggctagtcgtcattccatgatgcaaccaaagtggcatacccgtgtataagaaccataagtctttgagggaaggcctaatggagacttggagcagggatgttacaaatagtatcagagtcttaacctagtccgaagtgtgagtaacgaggatgtcagacctcgtaagggaggagaggtgattgtgacagtcagtagtcccgtgatttataaagagaaatactaggtaagctatgttatcccacaatattgcctaaagaaggtgaagtgtaatgattataagactgtgtaggtatgaaactacacagttgaagtgagcttaaatagattgatgggtaatacctatattaacaagatgcatcctcttttcggtagcccatcacttaagaactccaaatcaagcgtgcatgacctgaaggatggatcgaggaaggcccaataaaggcttgaagtagggatgttacaataactaatgtggttaatttgatcttttaatgtctcatattcgagtccccagatatcacggattaggttagagtcttttttttcttctatatatatagagagagagagggagggagaaaatggaagtatccatataggcaaatcatactaagcttattattacatgaagatataactcaaacaacaaaataagccaccaacagtcaaacatcaaagagatgtgaagcatactaggtatctaaaccaaatgaacatctaattgtagtccacccatagatggattttgccaataatcttgcaataaaattaaatgaaatatagcactctcattatttaaatcgtaaataaggacagtaacaaaacgattaatatgttctctatcacgaagaagtagagtacaaaatacaaggccaattgagatatgagaatccctcaaatctaataactaagaaaagaatccatacccttaccaaagcgactgaatggaactaaagaaatacaaccaaccaaatgggtatcaaagttgtcctccctagagatggaaatttataccgcggggatgggtaaccgcggg

SEQ ID NO: 45239 - DNA, 669 bp, Cannabis sativa
aagatgaaatgaactaaaagtaagctaattaagtgttgatctttatttacttcaacctaataaatcaaatgaccatattaccattaacactaataataatataattactaacatgttattttggtaacttttatcacttattgttgactggtttttagccaatcgacgtaaagtcgtaataaatgagaaattaaaccaaaatcataataaatgttaataaagaacactagattttaaagaagttcgaccccaagtattggtgatagtctactcatgttgtgttttattgatctttgttgcaggtcaagaacagaatcttgagtgcaagaaataaaaatagcagtgttctactctttgagtaatgaattttggatccccttcccaggttaggtgtgaccccttacataggggaatggttggtacgtctcacttcaggagacacgatcttggtgctaaaatatctcaatcactctcttgatttttgggagttgttgacattcgatttttgcgattatatcctattatttttgtgggttcataacaacttttgagcttcgtgcaggattgaacgacgctggaagagtgttggatgtgacaagttgtttaagggtgcacccctatggtacattatggtcgaccgaccctaggatgggtggtctagccgaccga

SEQ ID NO: 45240 - DNA, 3332 bp, Cannabis sativa
ttatcagaaaatcaattatttatttatttccttaattagaaaataatttctataaataaaatattctaatagtatatgtatcaattaaatcagttgcaacatttctataaataaaatgcaaatcacgtccctggatgcaattttttctatattcaaagcatgttcctgtggagttgacttgtcccttttgccatattgaagaggaatcaatttctcatgtgttgttgcattggcatttcagtaagtcatgttcgaataggtctggtttggatagtgtgtcttcacaaaatagtagtgtctttcattagtttcaatagttggttgataggaaaaggcccgagcttatggaggaggctatatatcaagatttgttggtcaatatggaaatcttgaaatgatattacttggaaccgaaaagtttgttttgcagctgatgttttgcttactgcgaggttagttttggctcaatggaaacaagcttactcaagaaaatttgagtcaataccagtaccccctggaactttcaatagctgcgagcattagacaaaacctactactcataaactcaagattaatgtcaacagtgctgtatttgaggttgcaaatgtgtacggttctggtgttgttatcaggatgagggtggtttcttggttgaagctttctcggtgtatactccagggggtgttcaacccgagcttgctaagattgttagcatcaaagaggccttaagttggatcaagagaaaggttgtttaagacgttattattgaaacagactatcttttagcccttcaagctttggatagctttgttcgtataccttcttttattggtttattggtttattttgttaagcaatctgctaatagttgcgcactgtcagctccgactgttcttcaaacattgattagtgccgatttggctgattaatggattgtaaccattttcaaaaaaaaaatataactgttacactacattacaatgcttggtggtacaagatttattttgttcattaaaaaaaataaaaaagttcttcacaataccaacttttttataattggaaaatcaacataactaattactatatagtctactttctcttaaatcataaatcggcagaaaaatcaggatcctcaggcttaaataactttttaggcatagcatcaggcttaagagtagacgtcactcctttatgagaaatattagcagtttttctagtatttgcagcaaacttagaagccaaaacagtagccccaagttgttgcctctgatgggtagtatcatcatccatcgttgaacagctctgatcatgatcatgatgatgattattatcaccacaatattcttggtccgaataatagtactgatacaactcttcttgttttgtcaactcatgcgccatcttcctcttccaccaccttctccaagccacttgtacataacaagccgcccaagtcctccactgctgggagtagtatcgaaacgcctgttgcagcctcttgctatgcagcctcctaaactgactagccacaaacttgaggtcctcggcccggagagcaaaagcctcaacttccgttatagaccgaacagttcgagtggagcaaggaaggttgaggctagaagtaggcatgagagcccaagtcaaaagctcctcaccacaaaagtcgcctgacctgagcgctatggagttaaagaaaccagagcgtccaccatcagtggtagagctctctaggtgacctctgataatgaagagcatctcgttcacagggtcaccctctctgactatgtacgtgtcttttgtgttcaaggatgacactagtctctcacatattgcatctaggagttggtcatccatttgggcgaagaatggaacctaacaaaaaaaaaaatccttctcccttttagtaattaatatttgtgagtagtgttaatatttcttagtcgtgtgcttcctaagtgtgacatttatataagttagagtagatttgttacttacacgacgaacaagagcaagacagagatgtctttggatttgacgcctgagatccaaaggaagatcgtgtaaaatggattcttcatcgactcctctcgtggcaatccacttgtattgtacgaaacgacgaactctatcttgtagttctagaggcagttgacggtgtctcatccactcttcagtatctcttcttctcaccctccattcttccagtctagccgttgttgattgcaaatatgacttcataaacagtataatacatattaatccaatatcatcatatttattatgtatatgcatttgagggataggtagatggtttagaatatgattaactaatatataatattttacatacctgcatgttaccaatgagatgtgagaagagaactagacccgcagagcaaataaggaggctaaatagtatctcaccattgattgcataacttgccacaatgttttgtccatatgaactgcaaatatgttcaaaatttgttagatagtctcacatcgctaatgtctagaaagattataaaatgatgttccatctcaaaaccaattttcattacgagtgtgctgaaatctaataacaattttataagtaaaatggatattcttcactcaaagtttgtcattttggtggtaattagcctcttaagatattttggttgaactttgtaactgtgtaactgtgcctatgttcatcttcttggaagttgtatatggactttataatcctttccattataaattaaaaaaaaaaatatatatatacattactctcaaaaaagaaattgctgatcataccatacttttttctttcctagttgaattttgttgatcttattatacttttgcttttatagtcgaatatttactttataatttacttgcttagagtttttagttttgtttatttttcaggccatcaatataaagaaatcaattaagtgaatttgttttatttttcttctgaataattaagtaaatttgttgtattatacaatacttgttatggagcttggtcattgtataattctactttctcaatttccttttcattttcctttttttttttttttttctttttctttcattctttcttacaatatgatagttatttattttaaggtgttcaacaccactgtatcaccaaggcaccttgggccattctaaggcacatttttttttttttgaaagaaaaggcttatatttttattattattatacatacataaataaaaaaatttacaattgaaaatttaagaaagcatgttaaaaaaaattcagaatgaaattatagttttaatatacccccaattttttttatatatataaat

SEQ ID NO: 45241 - DNA, 2896 bp, Cannabis sativa
tttaaaattttaatttttttttaagtttttttttttttttttttttttttttctgacatgatttgtagtgaagttatttatacagcatcttaagatttttgtgatttggggccatggcgagtttaataatggtccattaccatgtaagataaatcgtaccatattttcttagtgcaaatccaatactattgctattgagaagtagctgtcaaagaaagggattaaaggtcaaaaaaaatattgatgtttcaaccttaaatataatgcttctgttgagcaccgctatccattctttttttcttcaattgattagtttattaatattctaattaaaaaataataaaatacaaccactaaggtagctaacattagacctttatattttgagtgtcccttttcctatatttgagtattatttatatatccgtctactagggcagtaaatagatgaacatgtagctgatattcttttagaaataaattctccgatttataatatttcttgtaagaccataagattcactccacccaaaaatgatagtggtcaatttggtcccaaaagaaaatgctcacatatatagcaaattaatgcagttaataaggacagagtgattgttcaaaataatatgtatataaggatagagtgatctaactaattacagctggcaacaaagatgtttaagagaaacttgtcaagttaaactaagcaaacaaagaagtcttgacagattcaaacaaaacaaaacgacgccaatagaaataaaattccagtcattactgaccacatctctgcatcctaaagctgcttgaaaaaggagtaacacaatagcaatagcgaataaagtttactggtcctgttatagtccagaggtggtgctttacttcaagtccattttcaaaacgctgccttgtagatataaccaactaaaacaaaacaaatacctctttagctaaaaatcaatgcaaagtcatatagttaagtataaatgtgcatggagaaaaagcagaaaccaaacatagagatgaggtggactggtgcttctaggacaagagagaggcttcaaatctccactagtaatcccaccaattgctataagttaagcaaataatgaaaacacaatggaagaaaacagcatttttaaaataaaaaaataaaatgaaagaaacacgtaccgttacatgtcgtcatcactgatgtcgtcattgatgttgtcacgatcggattcactaccagtgtaattaacccatggtctttcatctggggcaaaatagtccttgccccatgcatcatcgaacatttcagctgggagaccaacagcttcttttcttaaatttggaacaacatcatcattgatcacttcagcttcaccatatcggttaacaagacttgtcattgcaatgtcatcaatttgttcattccattgaaaattacaagagttgaggttatcatcagtagtgtcatcctcatcaacttccactttgctactcatctcatgaacatcccaaaacagtctgtgtctcactttttgggcatacttccaacctaatctgtcttcgtaataaattgtttgctctgcatatttagcaagtacaaacggagcattctgaccacatgtattattggcacatatacgagtcatattgcatttactaggtattcctgtctctgggtttgtgttaaaccatttacatttgaacaaaacaactcggtggccaaatgaatatttcaactcccacacgttgcataaagtaccatagaactccccaaccttatcttcaccttctaataaacaatacaaaccactactctgagcaattctatgcctatctttctcttcagtaagaaatcttactccatcaactacgcaaccagagtatgaatttgcctcaaaatcaggtccaatagctaatgaaagaagctcattcgtgaccttcgttggctcagttacacacaaccgtttcacctagtacacacacacacacatatatatatatatgttataaattgtacaagcaatattaagaagaatattcaagccctgaaaagaaaaaatagtggcttacatgatttgccaaccaagcaggaaattcttcatcatgcctttcttctacgttgacatcagatattgcatccaattccttcttatgctctctgaaaacaaattgattaggatcattttctagtgaaagaaaagttcaaggaggaaacaaagaagcaaatatatcacttacttaatatatggatctaactcgttacaatggagcagtacaaaccagtgggcatgttgcaacatttcacgagtcaactttatagaaccctcgtgtccaaatggttgaacacgatgtgagaacacatgaatggatggatgagtttttttaggacctaaattgacgtcttctttactagaatgtgtatcaatgtcacggtcatatatgttgcaaaatctaactgcttctttaacaatgtaagcttctgcaattgagccttcaggctgacaatttttcctcgtatactttgtgagtttttcccaatatctgtaaaagataagaaaaaagtttaataacattatcttcaagcaaattaaaaataccatttacaatttatatcaaatacaaacctttcaaatggatatgtccatcgaaagccaacaggtccaacaagttttgcctcatgtggtaagtgaacagccaagtgaacgatgatgtcaaagaaggagggtgggtagattttctccaacttgcacaaaattagcgcaatcctttcttgtagtttgtccagatctttatccattaaagttttggcacatagcttttgaaagaaattagaaagctcggtcagtgtaattgtaatatcctcgtttaagtactgaatgtcaactgcaggaggaagaagacg

SEQ ID NO: 45242 - DNA, 1538 bp, Cannabis sativa
ggctatatcaaccttagttttagtcgtacgcattgattagtttttcttaataaactattgtttcttctaagaaacaaattaataaaatatgaagatgatgagaatggtaatggaatatcgtccagagaaaggtacttttgtaataaaatataataagagacaaagagaagatgaagattttagaaataataaacgtagcaagtatggtggatgggtgaaaggaaaagttactcggaagggggaggtttttggatgtgttaacttgattaagtttaaagaacctcgaccaccgcactataaagatttgcctgagcttttggcagtaaaatctgcactaaatgatacttgttcaaaggatctagttagggagatgaaagtgtatgagtctcttggttccagtcctttcattgttaagtgctacggtcaattagataattataataaaggggaggtaaatatggcgatggagtatgcatcaggtgggtccttggctagtgcgatcgagagtaagaataatggagatggattgagtgagtgggaagtgaaggcacacacttgctccattcttaaagggcttgagtttattcatggaaagggttttgtgcattgtgatttgaaacccgcaaacattctactggtggctgatgatgatgatgatagtccttatagcgtcgatggttttgtggcgaagattgctgattttggtctggctaagactagtagtgttaggagtaatactggtgatgatgagtgcatgaggaggtcaaaggttggaggaactctgtattatctttctcccgaagctttattagaaaatactcaagaagaggcgagtgatatttgggcagttgggtgtgtggttttgcaaatgttgactggactagtgctgccgtggtatgataaccccaccgaaaatcagctttccagtataattagtatagacactccgtgtagtggtttaccttcggattggctttccaagaatgcttgggatttcttgttcaagtgctttactaggaaccctaataatagaccttctgctcacatgttactaaaccatccctttcttctctcagaagatgaccaagaaaatgatcaacaaataaatcacaatgatattgacgttgatgaagatcatgctaatgatggtgatagtgatggtgatggtgatagtgatggtgatggtgatggtgatggtgatggtgaagactctgaagacgtcgacgatggtgatgatgatgaagaagaatacgaggacgacgatgatgatgagcagcctcccttttatgattcttggtttagcagtagtccctgacattccatttctatactcgtatattaattcattttttcaacttcagacatcaattccacaattttttattatctataatatatttcttttgtatatacattgtaatcattattataagaaaaatttgtaatatatttattttgtatgtaaattgtcatcattattataacagaaatttataatatatttgttttgtatatacattctgatcatttttataaga

SEQ ID NO: 45243 - DNA, 1315 bp, Cannabis sativa
ctattatgccaaagagaaaacatactagaggaagtggtagacacattacaagaactctgttgagctttattgacagattgtgtggatatggaaaatgaagaagaggcttcagactgtagctgagatggatgaatgacataaagaccatctttaacctgccctgccatgagagtggtcttggttacctgatccttaacaaaacaggagtcaggatagaaaacaaaataagcattgttgtccctagcaaactgagacacactgattagatttttggtgagttgaggaacatgtaaaaggtgattaagagcaagttctttagaagtgtagggagtatgaaagagtttcttaccaataccttgaatgtttatacctgctccatcacccatatggatctgttcatgaccaaagtaaggctccttttgagtaaaattggtctcagtgggagtgcaatgagtagtggcaccggagtcaggataccaagcaggatcaagaatggagtcagctgttgctatgtttgctgagaattgatcaacattggccgctccaactccagggaaatcgaaattgaagcgttggtaacatctagcagcaatatgaccagtccttgcacatagttggcacactggtttagatcctgtggaaccagtgttgggagagaaagatgagggaactgaggagttcatgtttggggaacgactttgaggtggaccaggctgttgtcctgtgccacgaggagctgcataaggattccactggccacggccacggccaggagacataaaggaggattgagtattgtttcttgattcagatgcagaagtggaaaaattcttgttgcgtgaggaacgatttgtagcaagatttattgattcaagatcacgatggtgattgtccatacgatgttcttgagagagaaggagggactcaatttcagccacagtatacggctgatttcttgagttcaccgagataacaaacgtatcatattcagcaggtaagcctttgaagatggcagcaacatgttctttaatggtgacagagtgtccaacggatccaagacgatcgacaatagatttgatgcgaagaagataatcattgatcgataacgatcctttcttgatattctgcaattgattagtaaactgatctattttagcagaagtttgagtggcaaagtatacctcaagagtgtgccacacttgcgcagaggtgtcgttgccaacaacacgggtgaggactccttcggtcatagacgagagcaaccaggaataaagcagctgatcctgctgctcccattgaatgtataatggattga

SEQ ID NO: 45244 - DNA, 2676 bp, Cannabis sativa
  modified_base (2604)..(2633): a, c, t, g, unknown or other
aagttcattagaggcttggaagaataaattgccaaggatgttattgtggcagctaaacaaccaaggattgtgaagtttatgctcagattgaaagttagatttcgctgttgagggggttgcagattttattcgaaaagggagcaattagagaagggacgtgtgaaaaaaaccattgattacttgaatgattgggggtcctgaccccagtgattagaagaggaagcctaatgaaccactagtcgcgggttcagacaagagattttagggtaatcagagcttttgttgaggtgggaacgagcttgggcaatcatattcatatcctgagtgccagcattgtggaaggtgtcatttggggaaatgtcatgccagggcctatttccaatgtggagtaataggccatttgaagagaagttgctcgtagttagaaaggatgaaaaatatcctatgggtcatgcacgggtgtttccttgatctaactagatgcagaggctattcttttgactgttacagatgagatttctattggtggtattatgttttctattttgatgaatttcggtgctacacattcgtatatttctagtagagtcattgagaatttgcgtagaccatgtgacgttaagcctagtgggtttgatactttgttacctactgaacaaagggacgatgattaccattcaaaaattaaattcatgacgtcaattaaaattgttgttaggttgcttacttgtcaattgtcttattaaataatgacagagaaatatggattctaagttagggcatcagctttgcgttattaggcaatgagatatattgatgtggtgttagggcattgacattgccttattagataatgatatttatggattcccgattagggcatcagagttgtcttattaggcaacaacataattggttactttatgaagtagcagttatggcttgtcgtattatacaagtacttgagtcttactgtttaaccttgttattatccttatttagatatctgactgttatatttcattgtttacatattttgttgagtctttgtcactcatgggtgctttgtggtgcagttaagggtgaagggaaactagattagccatgaggcataaatcttcttcggtcaatgtacatatcgagttatttgacttgtgtggtcaagttgtcaggattttttttgggctgtactttatgtttattttgacttacttttgtatagccctctttgttaaatttttgtaacaagggatccatgaaaaaaaatttagcaatgccgtcatcttcattgctatggttttactttggtgaatttattattattatcatggattttatcaaatcattaatttactattacaaaattatgtttccaaagcacacacatggtgtccctagggattagggctttatagtcctacttattttctaaaatcgatgattcggaaacttgctcccataacttaagtttgcatatttgtaggatattcagttgaaactccaagtgcctatttctatagttatcaagaaaaaaaaagtatttgtatcgataatgctacctttcttgaacatgactatatgaaaattcataaaccacacagtcatgtggttatcgaggaaataagaaataagcatatttctgtaccagtgattttagcacaattcgtttaatgaacgatagcgattaccataattcttgaaaacgaaaccctgatacatcattgtagtgggaggatttttagaaaacctatccactatgaacatgaaacacgtgttcttgtctctgacagagataaggacgatttgttgacttatagagaagaaatggaagaccctaactcagacaaatggacaattccatggattccatgcgcataaaaaaagtctaaaaatatgaaacttcacctgaggatattacacccataaaggtagagatctttaaagctaggcatagcgagaaggcaataattatgacaaaaccttctctcttgtggcaatgcttaaatccattcacattcttcttttcatagttaccacttatgatttcggatatggcaaatggacgtgaaggctacttttctaaatggcaatcttgatgatatcatttataaggaacaactagaggggtatgtgttactaggagaagatcaaaaggtgtgcaagttacttaaatccatttatgggttgaagcaagcctctaaatctttgaatatcacctcaaataagggtattgaaagtattgctatgaacaaaatgtagacaaagcctgtttataaaaatacattagaggtaatgtattaatattccttgttctttatgttgaggacattctacttattggaaacaatgtactaaggttatcaaatgtaaagaagaggttagccaataaattccaaatgaaggatttgggagaagcaagctatgttctcgagatcaaaatctacagagatagataagaacattagcaccttctcaggcaaattataatgataaggttctcaaaagattctcaatgaagaattccaagaaaggacaattaccatcacaacatgcaattactctgtagagacagcttattttaaatttggaaattagcaaataatnnnnnnnnnnnnnnnnnnnnnnnnnnnnnntatttaaataattatttatgttgctatatttgaattcagaatg

SEQ ID NO: 45245 - DNA, 843 bp, Cannabis sativa
ataataaactttatataaatatttttaattttaccaaatcaaaatggagaagcaaagtagtttagaaaatggagaagcttttattaacaaaatcagagttgaaatatgtaccaaaatcatacatatttccatctgaaattagacctggaaatgccaaagttccactatgtgagtttattcctgtgattgatatgaaacaagaacaaactaaactcattcaacaaatcacaaatgcttgcaaagattatggaatcttccaggtttgatcttagaatcatcatcatgtgatattttgttcaagttaattatgttattatatcaatttgtgtgattatgttatacagttgattaatcatgggattgaagagaagttgttagaagatgtattgaatgtgactaaggagttttttgagcttccttatgaagaaaaatcaagcttattttctaatgatccaaacaagatttttaggctatacacaagcattgattatatgaatgagcaagtacattattggagaaatgctttgagacacccttgtcctgttgaacaacacatccaattttggcctaaaaaaccacataattacatgttagtgtgatattcctagtaataacaaaattttcatgtttcattttctgtttttgttttgaatattaccgatattaaatattctctcttaattttaaacacgtcactaaaataatgagtaatttaatcctcccaaattttaaccacagtcaagtcataccttattattaacaaaagttcagaagaattgatgtgatagtaataaaagtttgggggacaaaatatgataatagtcatacttgggcgataaaatt

SEQ ID NO: 45246 - DNA, 744 bp, Cannabis sativa
aaaaaaaatctataaaattaacacaaaaaatgagaaaaagaatcaatagtaaattaaaatgaattaattttcttaaaaaatgaaaaacaaataaataagttgcttatatatatcattagtagtattattattggcacaaatttcccttcaacatattttaaggattttatagattgataaagacaatcctttcaaaaaatcaatcaaacaattaaataataaaaagctaaaaaaacatttaaaataagaattcaaacaaaaatcaatttgttaaatatattaagaaacttgaaataagaaagaaagaaattcttcactgagaaaaggaaacatttgactaatgatagtatggtcctataattttagaataagtttagtactaacttttttttatttattaatcaaaaataccattatattttattttaataaaatatatctactttactagtagataatttatattaacctaaaagtataataaaaacatcatgtataaaataaatatatcttaaagaatatgaaaataaaaataaaaattaaaacaaataaaataaaataattacacaatataacttcattaatttttcattttgtgctacacttctcaacctaatttcagttcttttttttaaagacatacattcattataataaaggtaaataccattttggatcttgtgttttataaaagttactaattgaatcctctattttgttaaatgacaaaatagattttatatt

SEQ ID NO: 45247 - DNA, 2522 bp, Cannabis sativa
acgtggcttggcacgtaacaatcacctagtatatatatatatatgcacttttcatataaatttttttatcaaattgttttttttatttaccctaaagagtggaagaacaaatttttatttatcaattttttttttatttaccctaaagagtggaagaacagaaaattctttattaataactctttattaattttattttattgcgaaaatttctcaaataaaataaactaaaaggaatattttattaaatataaaatagttgaataatgattttaacaaattagttaaaaaaaatattgaaaatagaaaaataattttctaattatttatgtataaacaaacaaacatttaaaattgatctagtaaggtaataataatatatataataacaagttatttctttattctgtccttaaaatatataactaaaattttattttatttttttcacacttttactttatactgtagatcaacttttcaaaaaaaaaaaactatattatttaaataatatatttataatatacaaataatagaatagtaatcctattaaattttttttttttttttttatgtttacacttattaattaaacaaaccacatcatctatcgtatgtttaaatgtaagcccatataattctccatcattatctactaaaacatcatagaaggattaatatatcatatataaagtcatgtttaatttgatgtagtagctattgtaatggaattaaaattgccattataatctctaattttttttaaaaaaaaaaaatggtgattacattatgtaatgaaattcttattacatcacttcataaatattaaataaaataaaagtaaaataattcaaataattttttttaaataagaataaaattagaatggaaatttttgtgtgaatttatgacttattttaatatttatttcaataagaaatcaagcatcgtaatcaaagtccattactaattttatatcattacatcactattactaagatagataaaaaaaaaatatggttataatatataaacggttaaataaaaacaaaaaaaataaataaataaaggtatacaaagaattaaaaatatatataattttttaaaaaatggattatataagattaaaacaaaacaatatttttaaaaaaataaatggagtaaaaaaaattcaaaaaatatgtatgatttttttttaaaaaaaaaaaaattatttaaatatatatatttgagattaaaaataattgaaatttaataaagaagaaaagtgagattaaaataaaaagaaaaattgagataatatatataatcttgaaaaatggattacataagattaaaacaaaacaatatttctttaaaataaatggagtaaaaaaactcaaaaaatgtaagatttttttaaaaaaaaaaattatttaaatatatataattgagattaacaataattgaaatttaatgaaaaagaaaattgagataatatagatataatttaatattttaaaaattgttatattaaagaaaaaaatcaaataaaaaaaattggaaaagacaaaaacaagctgctcacttttgtttttttatgagcatccattctgttatgtatttagattttaattgattaatttaagtaaaagataaattataggatctaagacatactaaaaagtactcgttgtatttaataacattttcaatggtacttttttaaaaaaaaaaaaaaaaactaaaataactaaaaatttaaaatatattgttgttgcttaaataataatctctactataattagtatttgatggttttaataatacaaagagtaaaaaaaaaggttattaggcgtctataacagcaagttcagagacggaggtatttaatgaggtgtggtcgccctgttccccctcaaattttccaaaaaaaaaaatagaacaacaaatatatgtgtaattaatctcatttaacttactattataataagcatttggatatgtataatcatataatatattctaattatatatacgtatttagtaacttattattatcaatatatttatggaaatataattaagatagatactagtgttttactattgggatgtataatgaaatattgagatattgtcagctaaatcaccttaacttttagtttgtaacagttaaccacaaaaactaaaattttgatggcataactctctgaaccctaaatccgttttgcctagcactattccgtccctcaggctccgtttcagtcccaaattgcttacgtggcacgatccacgtcagcgagttatgccaccatggcattaaataaatccctctcccctaaaaaaaactaaacttaattcaaaaattaaattaaaatccctaaattaaataaaaattagaaatacatattaaaaaaacaaaattaatatccctaactgaaataaaatcacttcctgcacgactcgtgtaaagaccgcttagttttaatttggaaattagcagataactagggcttaattatgaaaaattatttattaat

SEQ ID NO: 45248 - DNA, 3772 bp, Cannabis sativa
ataggaacctctgttgttttggattccttggtttctgatgtactatttgtgttgttatattccacttggtcattatcatttcctgataaaaaatcatatatcaaacttgaaaatatttaagaaatttcttttcttcttttaaaatgactcacctgtaagcgtctagcagcctcctgaaaatatttaatgaaaattcaattagaagaagaagaaaaaggaaagagttgatgtgtttgttttgtttcaacctttttcattattgtttcctttttccaaatttcaatgcctttgagaaaagactttgttgatgtgactgtaagaaagataatcataattaaaaaccctttaataatgcatatatgattatacaacaaaaagaagaaagtattgaaaaaaaattgaggctaaattttattactgaggaatacaatgataagtaagagtatgattatccaatctgctaaaatgacattaaaagagactccaatactaatcccaagcatcaacattggctgaaatagaagtgcaaggtcataatctatgatgggtaattctagtgttgggtctttgccttaagttgtagaatacagtggcaactgctccccccataaccatgcctataataagtcaaattaacaaagcttagaaactcttagaatcatttttatgtatttaaacagtgttgtaatatataatattatgagagttacttacacttagagattgcagttgataatttctcatcaaacccaacaatgagagtgagcattgggacaaaaatctcaccaccaccaacccctccaacactcccaaatgctgctgccccaagaaatccaattattatacctcccaccacaattctccaccccaatttcatgtcctgaccaaaatttcaactttctttgcttagaagaagaacagtgaaaatacaggaatgattcaaagccaagcaccaaatatcaatatctttatatatatttatggaacttactggccaaacatgagtatatcctgatcgagttacttgatgtgaagaattaatcttggagactctggtgacataattggaatcaatatctttctgttcaatactaatttcattagctgaaactaataacactgatgaagctacaacaagaactccaatcaccctcatattattacaccattttggtccaataatcttagccatgtgatatgatgagacacttcacctcagccctctaaagattcaatcttttctctcacaaacccaaatcttgtgataagatgaagatgtgttaactattgcttttagaaagaaaaataaggccctgttctgttcttatataagctctatttatccccacttggaagtggagtgtagaagaagttgttctctccttttacacatatatatagtaattagaatatttttttgtttcaaactgttccactgttacggaaaaaaaaaagaagatatttttgataaaattgtgtactgtgcatgaagtggtgtgaactcttaatttcacattattaattggtagtttatagttaactaccagtttaacgattcaatatgaagaaaagaaagcagttaaaaagttaaaatatttatccaacattctgtccaatcatctcaaattattcaattatacatgttttgcaatatatatcttctcgttatttatttattattaactttttctttttatggagttaaatcttatttaaagctacccagattttctaccccggagtctaacaaattaagcctaaaccataaattaaaactattaggtgacatttattcattaaaaaagaaagacaaattattgttttcattattaagagaaaagaaaaaaggcctattatttttggaagtcaatatcaataacatttcaaaggaaataccacatatggaattagatcacaattgcacggctttaaattaaaattaaaattttatgaactactttttttttaacctttattaactacagttgcgtaagtaagataatttttaaagggtaacagtaccaaacataatattggtgtaatttaataattattattaaaaaaaattattaattaaaatgctctaaaggtcagaaaaagcattgttttaattaaaagtttacataactaagttagtcataattatgtaaacttaaccacataaatttaatctcttttttttattaacttttaggactaaatcatttctccctttggaattggaaaattaaagaacctttttattctgatcagttgaacacattttcaaagcaaattcttattactcagtattcattatgtattgtttacgtatttttttacacataatgacgtaaaaatacttgaaatttaagaaattgtgaatggtttttttcaatcacaggtacaaacatgaaattatatttatatatttgtcatataatgagaaattaaacctcttttactttctcataaactaacacaccaaacacttgagctatatatagatttagcctcaaacatgtcgacattatatttattatataatttgaaaagctaaaatgagtacctcaaaacaaaatatttttaataaaaaaatatagatctgatttggtattaggaattaacaattaattatattgctgatgatgatgctgaaatctttattttcaataatactaattaaaattctgatcgtgtgaagaagtttccaaccatggagatatgcgaatatgtagacaatctcacttctttaatatttgatttggcaaaggtggtgattttgttaaattaattatattaactttattgataacctattccttcataaatcagcaatatatatcattaattagttagcataacaaaacattgaaatttgtatatgaattctagctagcaagaaaataaaaaataaaaaaattgcagactccatttttccttttttttttgcataattttgtagcttactttcaggttttctcaccaaccttattaaaacaaaacagccacgttatattttataattatatcatgtatattattataaatattaacaacctccatatatacagccacgttatatgcaacaatacttgatatatatgacccaaaatcacacacataaaccgtaatctggggtctgatcacactaatttcatatactaatattttactattacaaattctgaaagtgggtgtagcttagtcagacatgtacaactgtacaagtgccaatgaaatattgttaaaaatgtcacacatgtttgtgtaatttggttcatatcatatgtcattggtactatgagtaatggaattgtaataatgatcgaagtctttttccaaggaattgatttccaactactattcagtgaaccaacaaatttggaacattttaagctaattgaaatagtactaatacacgatatgtactagcagtttgaaaattggttagtcatagctatcaatatcaaataagtatagtatagacttactaactaagactatttccgtttttgtaagttttattttattaagaacttttatttgcagtggatgaatttgttagaagttctagaattactagcccagatgtcggtcattttcaaggggagggaaacctccctgtaattcccacttttgttgtttagctaatgaactttcgttccttcaaaaaaaaaaaaaaactaagactatctccgtgttaaaatagcggtaatattttaatactttttaaagaataagcttttcaagtgtgctaaatcatgtcatgctaaaagttgtggaaattttt

SEQ ID NO: 45249 - DNA, 1035 bp, Cannabis sativa
tattttatgttatttttatttagtaaattaataatcctatttgttggtttataaattagttgattctatattcatcttaatttctttcctacttctaaataacagtttacaaattttcccattattaaaagttttttttttttatcaaatttttttagtcagtatctttattattatttttttttaaagtaattcatttatgtatttttaaattatctcattacttccaaaaattgttaaaaaagactaattaatacataagtgaaatatttttggagtgggctgacgaatgattttttttttattatttattaatattttacgaagatatttaggttcatttacgaaaataattaatttagtaataactagttaagttaaaaaaaattcccaaacaaaaaagttaaagttaaaaaaaaaaaagaggaatatcaatagtcacactcttataaattgtgtttaattatcaaattctccccgcagtgttattatcaataaaaacataaaaatttacaaaattattatacctttcttccaatatcattgcaaatttgagtactaatttgtaaaattaacacaaaaacatatacaataataaaatgaaatatgtaagatagccagatagtaatttcataactaattaagtctctatttatcttgccaatgatttcatgcaaaacaaaactaaaaaaaaaaatatataagtcatcatcgttatgatccttttcatcgatccctttattttttttattccgataattatataaaacactcgtttttgtaaattttttatattttgacatttaaagttttttttttttttttatacatttttaaacaaaaaaatcacatgaaagtaacaacaaaataacatcaaaataatataaaaaataatatataaataataaaaaatcaacaacaaaaataataagagtacataaaaagaccgttttttatgtaaataaaatctacaaaactgtaaaaatatcaaaaatttccatacaaactgtatttttcgtaattttttttttgtta

SEQ ID NO: 45250 - DNA, 3317 bp, Cannabis sativa
  modified_base (3011)..(3021): a, c, t, g, unknown or other
aaggtataattattagttaataataatctccgctgtttgtggatttgtgttaggtttttgtttaactatgttttatgaaattggacccaaaatttcccaaattaaggagaaggttctctctactcgattagttaagctaattataattactttaattagtttagtgactaagatccataattactcccttttgtccctttccatatgagatcatcacccaccaaattaatataatataatattgaaatatataattatatatactttatccttttcatctcaatcctatatacaaatatttcttaatttaattgttgattaatttgcatgattacaaaattatatcatttgatgatgaattgttttttttagtatttatataatgtgttagattaattaatcataatatttatgtgtatctattttcctttcactcatatataggaccgagcataagactagaggtagtatatgtctattttaaaattttaatttaagttttttatttacaatttagtctattttttttaattattttttacatttatctttaattttgtaaatattttttatatttttctagttataaaaacatatgtatgtaaagccatattggctaatttatgtaatgtttggttttattttattaagcataataaagtagttcatgaatttgtacaaacgtctttattttgccttgattgtactttcagtttagaaatattctaattaagttattgcctactctggtgactgaatttaaaggtatttttttttaaaaaaaaaacacatgtatataatatgaatatataatttgtggatgtgctcataaacaatattatcttattatagttcttagatacaatggatggagacgtagtgatgtgggtttattgtcttggaaagtttagaataatattaatatcagttaattatctatgcaaagggtatattagtaattccattcagactatttttgtgtattaatttatatttatatacatggttgaaaatcatccaacattatgtatatatgttcatctatatatcatatggcaatatatataataaataaataaataaataattcaattaatggagtcaatgagatgtagagagtttatataaaccacaagtttatttcaaattaataaacatataaaaataattaattaagtaatactcataaattataattttaaatagcaatatataatttaattaatatatatgcatgtatttagttaatttgaactggcactatattagaatgacagaacacattctccaccaatttatattaatattaattaaaattgtctccttttttttaatttcacgtatatatttatatatatatatatagttttttatcttttgaaaataataatgtcaattaatttcatcaattgtcaaatatatttatattggtttcgatctacatctttacaatctaacaaaaggtttttgttctacggttaattataatcaagttaccttgattaatataattaagaattaaggtgatgttatatataaagaaaccctaggttatagagaggaattcaaacgtgtgaatagatttatatatatatatatcacatgtaaatatatattttttgataaaaagtataatttttttttaataatgaattaaaagaagtataaattaggaatctttctcccatttttttgggttaccatattagcattttcttggagcacatggacaagaaatggtcaactctctcttagactatagaatagttgactaaaatttcaacagctctactctctgtctgccacatcttaatttgtggggtccacagtagaaattgtggacccgctgtctataatgtaattacataatttcttacttataaatacataattataagaaatattgacaattgattaaaatagtaattatagttgaattaaaatagtaatagagtaggccacttatgggatgtgttcaaaataatcaatagggaaattacaataaaatatttaaaatttgatttttttttatatatttttacgaatttattattttaaaaacaacataaatacaacactcatatataattttgttaaaaaaaattacaaaaaaataaagaactataaattcatacaataatccctaattgagaagtatcctctcaatataatatttttttaggaaatcattatatattattattagtttattattttaaaataattattagaatttataattaagcatataaaactaaattaaaaagtgtgcccatctcttttctgtctatcaaaacgaaaaatttaggctctaatcccaaacaaacatgtgagttgtgatttggccaaaagcttttgtttatttgcaattgcattttgtaaatatatatatatatattatttatacatataatatataataataaggtccaatcaagtttagttttttgcatattgagatattgaaaaaaaaaaccttaagtagtgtctgcatgagatcacaatctatatatgtcgaaattgcatgcaaacgatcatttgtacgttattaattaataaatataaaagaataattatttattttcataattctatattaatttagtagtttgtgtagccccataaataattatatatatgtatataatagagtttattaactgctaataagcagtaatatagttttaattgcatgtcttatgtatttatatatagattaaactataatatataattattataacatagcctaccattttagaaagattttaataagatatatcctgaatttttaaccctcctaaataaaattaagaattacatcagagcaaaatgtggatgattaagatccatgttagacccaatttttctttctattttgtggcattgttgtccactggcaccggcagggccggttctacactaaggtagactacgtctgcatttagaacccactcattttagaggccaaataaaaaaaatattttttttgaaaatatacatattttttnnnnnnnnnnnaaaaatattatttatctttatagtgaaagcttatttatttttttttttttgctaatgattcatttcaactcagaaccgaccttgggcaccgatgtcttctttttcttaacattgcttttaatttatttaatattgtaccgcacaatgtgatgcactgtgagtggttagagttttttaatttatttattaaactaaaattgtatgagatccgaattgtaaaaataatagtaagtcttttgtagtattaattttttttttggtaaaaacctttggtggtgcttaattgacactttatt

SEQ ID NO: 45251 - DNA, 2254 bp, Cannabis sativa
ctgtgttcccttgtttccccctctgtttttggatcatatatataaaaatagaagatctggcaactgggttttctttttggaatcatatggattaattaaaataaataaatatgtgattgggtgctacctgagaattgtttatagtctgggatatggctaaggtgagtttagaggttatatcactatgtgtgagtgtataagttcttgggagattccctgggtgcttcttttcatccactcctaagaaaagaaccttcaattttgatgcttcaaatatagctggcccaaataacctcgcaacctgaccaaaattaattaatctaacattaattgttaatttcttcctaataaataaacaaataaagaaaagaaaagaaagagtgttttacaggaacaatagcttggttcttcttcttgttggatcttcttctattagaaaaaagaaaagtttgatgatgatcaataagagaaggctttaaattcctcaaaggggagagaggtgtagcagcagttaatgaagccatctcaccacaccgaaccacttcttttctctatttttagctccagctttcttacttagttgccaaaaatagaattattgaattataatactatacgcttttgagttgaaaaagaagatgttataagtaataatgagtaggtccaattttttaatttttttctaaattctatctttagcttgctctggttttggcttttgcttttgctttagggttttggtttggtttacttgtgagatcagcaatctgttggaatcagtgactttaaagatttgtccgtatgagattggttgaaagaattaggttgggcatgattttgggagaccccaataatactattgcttcgaggcttgtatctctaaattgaccggccaaactcatacaattattacttgtatctctatggtgagcactaatattaaaaggagtattcctaattgccactagtggtatttaatactttgtattagtgttattttatgattagttagcgataatttataaaattattatattaaactaataaatttaatatttaattacagcaatattgcgctggtaaaataaaatttacttctaatgtgttggcaaaaagggttgacaaatcaacgttggtattagaatttttgcctgcacaaaatgaaaagtactggtaaaaataattttttccagcacgtaaatatactagtaaaagttagattttagtcactgcaaatgtacgctggtaaaactttgatctttttgccagcatagtttgcaaaatgcgttggtaaaagttacttttactagtgcagtagcgaactgtgctggtaaaagtaatatttcttgtagtgctcttttttgtatccattagtcaaaaataccttcaaattatagttcattaaaatatacccacttttataagtgggttgcctaattcaccatcactctctacttaagtctaacatataatttgcattaatctgaaggtataattgagacatcatctataaaagtaggtatattttaaaaattataaaaataaaagtaaaaatcaaaacatctaaaattaaatgagtatactatctaatttcctcttagtatttctctattaaaagtgtctggcatcttgctcaagggtgcccaagacactcaagcccagaaaaactctttaacaaaaatgcttcaaatttattttgtaaaaatactattttttttatttattatttattacaaaatataactatttttttaaaaaaatatatatatttaatttattttttaagatattacatttaatatttactaaaaaacatatccaattatatttaaaaattactaaatttaaaatttgcaccattatatatatatatatatatatatatataaaaacataaaaaagttcacataaaaaaactcaattaaattttttggctcaaagccctcaattggcttgagacgtgcctgactgttattgatgtaattaagtatagataaaattttcataaatatgggaattgagggtatagtttacttttgtatggcataaataaataataccatatggttacaggtttctttctttatttatttatttttttttttacatttatatgagtttttttatgtcatattattgtaagaaaatgtggaaatctcatatttataaaacaacaataagttttttcggaaagtcatcagcaccgaaaaagtcactggaaatgtaaagccctaatgctaaggcacgctacagt

SEQ ID NO: 45252 - DNA, 1739 bp, Cannabis sativa
aagtcttttgtgccaaagtgccaaagagtaaaagaattttgcatttctctagaagcaacagaaattaaattgtttaaggtattaccttgtaggatgtagacaccattcattatggtacctttcatgatagttttctgacccttttgaaccttgaggacaccattttcctccttgattgagcatccatccttgtctagcatggccactgaaatgagattcttttttatctctggtacatgcctgacctgcaacaactcactgtgagttcttcctgaagattggagctttattgatccaattcccataatagcagacaatctgttgtcaccaaatcttactgttcctccatcaatcttcttgtaatcacaaaattgatttatgtttgggcaaacatgaaatgagcagcctgaatcaattatccaaccccctcctgaatctccatttgtgacaaccatcacaccagcactttcatacccatcactgtcatcccagtcattaaccacatcagcattgccatgattcttgtgatgattgtgcctttgatttaaattcaagttcttgagtttagggcaatctctcttgaagtgaattgtcttatgacagatgtaacatttcttcttgaattttccgttttgttttcctttcttttgattattattgtactggttctccctttgatatgttcttccttgaacaatcaacaacgcttccccaggttgctcttcattcaactcagattttctctttaattcttttgacataagagcactttgaacctcttctaaagtcaaagaatcccttccatacatcattgtgtctatgaaatgttcatagctttccatgggaagtgagttaaggaaaataatggcttgatcttcatcctctatgctgatatcgatgttttccaaattaagaatgattttattgaaatcagcgagatggtcttcatagcctatccaggttgcatcttgaaagagtacagcttttgttttaagaacaatcgatttgcaagagatttggtatcatgtacaaaccttcgagctttgtccaaagaccagcagtagtggtttcttttgaaacttccctcaagaccttgtcaccaagacttaagatgatcacattgtgagctttctccagaattttgatattttctttctcaaacttgtccttgatcttttcagcaccaagaagaacatcttgaatcccctgttgcactagtaaagctctcattttcaccctccataatccaaagtcgttcttccttgtaaacttctccaaatcaaacttagaatttcccataatttccctagatgttcttcacgctctatcacgcttggccctccttgaatcaagcctaagaacctgtccagctctgataccaaactgttaggaatgcaacctcaattttttgcttcatgcaatctgagttcttgaacagaactcttacaccagcacacaaccaaaaatagagcaatcttaggtactggattaggaggtgcccttatgcaaaatggcaaggtggatgcctatgcttctcgacaattgaaatcacatgagaagaattaccctacgcatgacctagaacttgtcgcagtaatctttgtcttgaacatttggagatgttatttgtttggcataaaatttgtgttatactctgatcataagagcttgaagtatctttttactcaaggggacttgaacttgaggcaaagaagatgggttgagtatatggaagacta

SEQ ID NO: 45253 - DNA, 2109 bp, Cannabis sativa
  modified_base (1507)..(1511): a, c, t, g, unknown or other
tttgatttcttgctaattgtaatttgactgagagtggattgttgtgatgtcaagaacaacttttggccataataccattgattgtttggcatgaaattactgtcctagtatttgttggaaatgaattgaagctttaggttaaaagcttagagctttaatagtgaaatttgagtattaagttaaagcatgttttgagctatgagatatgttatgttggtatttttaaactattctatgaagtttgaattgatttggagaaggttagagaagttagaactcgaaattttttgagtcgtaggtttctgcaaagatttgggcacctgaatggtagaattgggcttccgatgctctggcagtgcccagaatattcgagcactaggttgtaaatccagttgcccgattcaggattcccggggtacctcaatttttatatttttagggtatttaaggtattttcaccttatttatagatagaaacacttcagataatgaattttagaccttgaaagtattatagtgagacacttacaagtttaccaatagggcctccgatccccaacagattttcactaaggttaattggcaaacctgaatcaagaattaagattagaaaagtattcaaatacacatatacacatgtttattatacatgtattatattgttatgtagctaccagattagagataatggtatgggtgtttatagagttgcactaagatatcaaaatctaatataatgggtaatattgaatagtatagattaattctaccaatcccagtatgataagagtactaagattagggttgtattatggataatcatactatacgtatgaacgtttggatatctgtttatacatatttgttgcggttagcaaacttatggtatttgagtgtatgagcgcttaattacaaatcagatatatgttgtatttttaaaaaatttcttatagagtttgtcgactcatagataggcttccatgtctaggtaaaggcaaagtcaatgtttaaccacgctgagagcaaagcttggtgaaaattttacatatccagccgtctaggcttggagggttgcgatctttgagacaccattaattggtagaaacaaaaggcagatgtttgaggggatctgtgagaaggtcaggaaccgtgttcgagggtggaagcaaagtttcttttctacttgtggaagagaggtacttatcaaatctattctttaagctattacaacttaaattgagtgtccttaagcttcctttggcaacgtgtaaaacattgaagtccattttatgaaaattatggtggggatgaatggtgatcaaaggaagattctttaagtgaaatgagaaatggtgtgtcagcctaaggcgataggcgagcttgggttttaggattttaaactttttaatcaagctcttttggctaaataagtgtggagattacttctatacccagagttattgcttacccaaattctgaaacataaatattttccaaattgctctannnnngaggccactgaaaaagatggttcatcttatctttggttgagtttgatttggggtttgggtttgctcaaatgtggtctttagaaatccattggagatggaacacaagtttgggcattcaaagacccatggctcctgcatcgagatcttagccaatcaagaggtgaattaatgatgattattggttgagtgaatttatccttccatttagtacatgggtagtggggaagctttaacaggttttttgcccatggatgtagatataattcggtctattccattagcgaggcgagagacaaaggatggtcagtgctgtcactaagatcgagatggagtttataatgttaaaagtggctactcgctggcgtggtcgctttaagttaatgagggagtagcagactcatcccaattgattaaatggtggaatggagtacggaatcttgatatgccaccaaaggtgaaagtttttgtttggcgtatgttccatatggtgttaccaatagctacacagcttatctcagaaagttcaggtacctctttgttgctcacagtgtggagaagaatctgaattttcctgctctggttagattccaatggtcgg

SEQ ID NO: 45254 - DNA, 1131 bp, Cannabis sativa
cctatctaatctaagctctggctcatgctccattatgttatgttacccctgccatgtggaacaaaatttggaatagtaaaactctggagcgtcacaagatcctttggtggtgtatcctttcgaatgctctccctattcggtctatcctgaataaaagattcccggttgaggatacaagttgtcaattttgtggggtcgaggatgagtcgatggaacaactctttcttaggtgtaatttggctttccatctttggaggtcctccccttgggggtatctttcttttctgactcaggtactcgagtgtgggattgggtcaagtttatctggagcctaaatcgtaaaggaatcaatacggatgaggttttcctttatgcatcaacagttgtagatgcaatttggaaagcaatgaatgaaaaattccataacaacagagtggagagcattgtagaattaattgactctgttactttttgttatgcagattataagaattctatgttacccacatctctttctccccaattggtaacttggaatctttctcctctcaagtggattaagctgaactgtgatgtcaaagttggtttggagagctcttgcctagcggttgttgctcgagatcatgatggattggtttgggtgactacagccaatctgtagttttcggacgcttttcgtggtgaagtcgcagcttgttgtttggctcttgaaattgctaagacaaggggtgaattttgttattgtagaaagtgattctaggatagtgatcaattctcttaatggtattgaatctatgtgggagattgataactactctaaacgtaagattttgtaactttatgacccataatgtgactaggtggacctttacccacaaccaatatggttgcctggacatagcgaccatgcttaaggaacttttttgtaatgacatgaggtctaattgttaatatatatgcacgttttccttaaaaaaaagattagttattattattgaatttttattaatattatggtaaaaatatttaaacggctcgaaaagcgcaatatgttttagttttattatatgtattagatttttaaattattattttctttccattaaaatgttaattgtacatataattttt

SEQ ID NO: 45255 - DNA, 3050 bp, Cannabis sativa
agtaagatctacacaattccagatttaaaagttatatcgactttccctaaatttaactagtgtaatttgctcggctctaagagttggggaccatccacaaataccaaagttattacatgaggaggcatcatctttagcttcctaaggggttgtgttgtttagataatggcaacgagccacatagtctttgtcctcctcgtcgacaggaacaggaacttgttgccagtctaaaaaaatttagaccttgaagtctccagtagattgatccttgccaaggagggcgcaagccatcaaattaattattctcgtgcaataagaagtgtgccgcttgcaataaaaggaaggccaagaagaatcatgtgccttatctcaatttcaggagttggaacaggtctcgtagtgatcgctgttaacacaacaaataaacaaatttaataaagtatagccaatgcgcattgaattaaaactcgaaactaagtttttgagaaaagatatacttacgcatgatttgaaatttggtggtgttgatgaagaaaagacccaaggtctaaaagaagtcatccttgaactctttttgttgggaagtctcacagcaatcctgtgattgttggtatgagtttcgagatagtaaaaaccacctacacctcacttccttgcagagcagacccttactgagtaaaaacatagaatttctactggggttggactgctttagctcttatatgttcaaggctacaagctctatcctagagggttcactggtgctgaaaccatcatctcaaactaaatgttcagggggataacaactgaactcccccttgacaactaacctaatgcggtatccctgttcattcctaattctgcatgaccttaagaccttcccaacgtaaggtcctatagatctaattttggactcaattaactcagccttaaatgtcatagtaggatcctaaggagtctttgatttatgagctttttaagatataatttcaaaatctaagtcacctggtgaaaaagcagcagtgactggaggtaaaaatattgtcttcactaagggagtatcagttaatttagaaggttcaggccaagctgcttctcgcaaatagtggcacctacccttaactatctcttgtaagaatcacatataatgactagatgtgtcatcttggctagttttaacaaggtggtgcctaattatcacatcatttatttcaagaatggtttgaggtatatgagttttgggtctaaattttatgtcgaaaatttgagaacaaattgattctaaagattctaggattgtgatttctgggataaattgggacataattatgactgataatatcccaatttctagaaaaatagaacacaaataaaacccaaaaatctacaaatcgtataatctaaaattttctagccctacagttattcagacaaacaaaatcaaaatacccaaataatagaagcaatgcagacaaggaaaacactaactaagaaaaagaaattatgagaatagaaggaaaaatcaatagaaaaagagagtgagtcacttactgtcttgatgagaatttctaggcagaggaaaactttgcaattaaaaactgtaaaggttgaaaactgggtattgatgatttctaggacaggaaaaatgatcagacgaaatacgcaagaagaatgtaagagataataaggggatgcaaatttgagaagtaggtggtttagattttagtgaaacctcgaaggtttgaaagttgaaaatggaaaaaaagatgcaaagtttcaaatttatacccaaaaagtgcctaccgttcgatcaaggaagatctaatctaacagatgaaaactttacaagaatggaacaatcagagcattaaatgagaaatgatgtgcctcgaagttttgaaccgcaaaaattctaagcatgcaatttttaaatgggataaaaacggttgtacccctacagacatttaaaaagtacttttgaattaaaaaataatgtttagagggcaattgttatactcaaaatttagctattcaccagaagatgacctgggtacaataaaaagaatatgaatcagctcaaagattataataattaaattgtattattaaatgcgatttaaataactcattacaattaattaaagttaatagaaatattcaaacttgctgccacgtaagcatatgcgagacaagaataataactattaatagatatagttgacgagataatatgtccacctcgagataaacaaagtacataataagaacatacatgacgagacatgaaggagcttgtagcacattgatccacatactttggagtaagggcttacaactcattgactcaaatatttgtagctagaagataactacattcatccatctcaccctttacgtaacggagtagccacctcgaaaataactttacaatattaagaacactgtgaggagaagtatatctatacttagcgttttttcttataaagatagatatgagtgacacctcacatttagcgagaaataaccttcttaatcagcataaccgtttaaggataaagacaaagaacagttgggtggttattagatattgtcccatgtgcagaaaagtaaaaattgaggaatgtccacatttcatgaatagttgtaaatggatagatcccaataaaactaattgtcatcctttacacctataaatatggacagaatccaagaaaaaagagacgacaaattgagagaaaaaactactatttatattttactgagaaatgtactctatattcaaataataatccataataagaaggacacgtggagtatgtagattttaactacaaaactacgtaaaatatatggtgttcatttattattattaaattctgtagtaaatttattacgtaaaataatatatatttagttaatgaaaatttgcgttgataatatcaaaaaatatctcttattttacattatatcaaaaatatatttatttgaaaatatataagtcaaactcaatttttttttatttccataattttttttgtttataacatcaa

SEQ ID NO: 45256 - DNA, 940 bp, Cannabis sativa
tacatgttaaagttcggggggaaaaattactaattagcctttctttttcattgtttatattctctctccaccagtcaactcaacagatcaccaccaatcgtcctcatcttccccgaacacgaccctccggtctccacttccgctctgctagtacgcactatatattaatttattatgtatatacatatatatatatgtatatattactttttgttttatattttttgaaacaccaccaaagcttaggtggcggaagcggcgaaatttgttaaattgtggtaaatctctctgtcacgctgtatatctttatcttactattataaaagtgatataatggtgtgataattttggactattttaccctctattgaaaataatattttcaaatttgtcttttctttttctattctatattggctattttcttttaagataaaattattcatttttgttgtttctcttcaatcattattggtgaagaaaaataacaaattaatcctattatttactataatataacattattttattttttatgactaatctatgttcattaagttttatattatttttaatgttaatagtgttataatcaatgtaatttttctacttttttctttttgtttgttttattttctatttttataaagctaattccttcctaaagctaattctttcctaggtaaatgaattcaaaaaattcgaattttgtaaagatgaataaacaggcttatataaaaaggatacgaaatgcagacatgaataaaaaaagaacagttcgaataccatatactaatatcacttaaaatattgttaaaatccttttaagagaaggttttattgaaaacatgaggaaacatcaggagaacaacaaatactttttggttttaaccctacgacatagaaggaataggaatttgtttctaccgagctaaaaaat

SEQ ID NO: 45257 - DNA, 2962 bp, Cannabis sativa
ctgctattcctctgccttattttactctatttcttatcttttaacttggtatcagagcgggtatggcttctccaggcaattcctcagtcaacaatgccagatcccaagctgtcgaagctcctcctcaagctccagctctcgcaccagctgcaccagcccagcccgtgcctctgctgcaaccattggcacctattagcattcgtctggacagggatactatccctactggcactctcaagttgtcccagctgctcgtgcacatgatctagatggttttctttttggcacaagaccagttccacctcagtacattgatgttcaagatgaggtaaaccccgatttgaagcaacagcaggtaaaccctcaatttactctttgggttcgcactgaccaagactttttaagttggcttttgaactctatttctgaggccatgcttggccatgtattacggtgtcgagtctcttatgaactctggtcattactggagaatctcttcaccacacaatctcgagctcgcatattgcagctctgttttcagttgcagtcactaaaaaaaggatcgatgacatccatgactacatcctcaagacaaagtccattgctgatggcttgaactctgctggtcaaacatttagtgatgatgaccttattttatacattttagggggtcttggagctgaatatgactcagttgttattaatcttacctctcgtgcagactatttaactttgtctgaagtgcagttccttttacaaagtcaggaaatgcgcattgatcaactcaacaacactggtgcaccagatcatgctgccccatctgccaactttgccgctcgaggaagaagaacctttccacagtctaactcaggcagatctgctggttctcgaggccgtggccgaggacatggaaaccaggggcgtataatatgccaactttgcagcaagcctggacacccagccagcaaatgttactaccagtttgacatcaacttcacaccaccagcaaacaacaacaacaaccaaaaccataatcaatatttcaacaccagcaacaatcatcacaaccagaaccagcaggcctttgctgccaactcaaatcagaacactcggcctgatgacaataattggtatgtggacagcggagctactaatcatatcactgataatgtcaacaacattcaagcttcgactgaatacagtggtaagactcgattgacaattggtaatggtcaatctcttgctatctcacatatgggcaactcggttagaaaaaccagcaatatattcaaaccagtcaagttaaataatattctgtgtgttctaaatattgctaaaaatctgttaagtgtttcaaagcttactagagataatgatgcctatgcaaaattctatgctaactcttgtgttttgaacgacatggattcgaggaaggtgcttcttcaagggaaacttagcaatggtctttatcaactcacaacaccagcatcacaatctacaagtcacagtagcagtcatcatagccatcaacctacaccaaaaccacctaatatcagtcctagttttaagtctaatgagtcttgttttctaatttctgtcaatgagtcaagtttgtggcatcataggttaggccatccctccttcaatgtactcaaacatgttttaaataatgaaaagaagtctttaccttcaagcttgcaattctgtcaaagttgtcaactgggcaaggctcatcacaagccatatcctgctgcattaaaagagtccaaacagccccttaaattgatacattccgatatatggggtccttccccaactatagtcgatgtacttggatctttccactcaagacaaaggatgaagccttacctacattcaaaaactttcaactacaagttaaaaaacaactcaacacctccattaaaaccatccaaaccgattggggaggtgaatatcgcaagtttgaaccataccttcagtccataggtgttaaatttagacacccttgtcctcacaaccatcaacaaaatgggaaagtcgagagaaaacatcgacatatagtcgaaacaagactcactctcttagctcactctagcatgcctcaaaggttttggtgggaagctttccaaacagccactttccttattaaccaccttgtcacacccgtccttcactacaagtgtcccattcaaaaattatttggtctttctcccaactacaaatttttaaaagtgtttggctgtgcatgctaccgttacctcagaccttacaacaccaacaaactccagtttagatctgttaagtgtgtgtttataggctatagcccaagtcacaaaggttacttgtgtcttcacagttcaggtcgtgtctatgttgcaagcagtgtctcattcgatgaaaatgattttccttttgctagtggtttcacctatcctactgcacacacagatccgccatttcaacctagtcactatcctcaatggctgccttatatttctaatgtgacttcagattatgatgcaggtgctcgtgtgtataatgaagatattgtctctgttgtcctaacagaaaatccttcctcggattctactgccgcttcaccaccccataatgcctcatcatatcagacaccctcaccatctaaacacacacctacctcccataaatcaatctcctcctactcaactataccactacatgtccatcttccaatctcacctctcactaaactcacacagccgactcaaacaattccctccacccaaccacatacaactccaccacctatacaacgcccaccatctcaccctatgattactcgggcgaaggctggtattcgaaaacctcgcaccttcactgtcttctcatcatcacccatggcctttatgatcgagtttgaacccgataatgctctcacaggcattcagaatcctcgctggaagtctgctatggatactgaaat

SEQ ID NO: 45258 - DNA, 2843 bp, Cannabis sativa
aaaaaaaaaaaaaaaaaaaaaaaaaggacaaaaagaaaatataaaaatgcatatttgcttcgctaagacatttcaagcatctcgtgatggagaatggttttagaacttttagctattttaattttagtattgttattagtctaattagtattatttataaatgatattttacgattggttaataatattattcttaaattatataagagtactcaatactcaatacatcaataacagtataatactaaaaaaaatattaaacaccaataattttttttagcaattctctcaattttaagattgaactattataccgcaagtgatgcggatgctctaatagtttcagaaaagtcttaagttcgaaaaagtcaaaaaataaataaatgtgaccattattaatttaaaattaatgaaacaaatattagtatgtatggtaagagggtgtcatgaatactatttaggaaactatcaataacattaaatgttcttagaggaacttcctttttaagggaaattttcataattactttttttttttttataattcttcaatttaaaatttttatttacaaaaatatatttataaaattttaaaattataatttcagtaaaaaaaatttaaaattataaaaacacacattgctcaacaaaataaaaaaaaaaaaaagtaacaaaacatcacaacaactataaatcagttataaataaattataaaacaataaaaaaatattttattatttttatcaaaaaaaatatttttagaaacaaataaatttaaagcgaaaaaaaaaaatcatgctgcaattgttttttaaattttagtgaatttttctttttttaatccccaatttcataatttgtcggtgttatagtacgtaacataatggataataatacagccacgtgtaataaacaaccgacatttagctaagtaataaaaaattatttacatacttttttataataattatttacattattcattactagtaactcataaaaaaaattattgcattcaatacaatcaatttattcctccaaaaaaattcaaaaaaaaaataattaattattttgaataataacttagcataactaaataattaattactttattattatattggtctttaaacatttcttttttaaaatttgtccctattttatttttgaacttttcgtgagcattcttttttatgtgaatcgcaacgttaatattgcagctcataaattaatttaacatgccctttaaagtatcaccaaggagccatcatatttggtgatgtgtgtgaatggctctccaatgtaagatatttgttgtgcactgatgtatttttacctgtttctgcatctgagacttttttagtttattttttttatagtcgtgtacattatagtaatttaagatattttgcaaaatttcgaaacatttaaataaatttaacatgtcgaaaataattcaaactgcatgttacatgcgtaactattttatttagagggtgcattgtagaagtaccttttaatttattgtgtgtaaatttaaatgtgaataccataaattatttttatggtaataaaaaaaattcaatgcacctctttaaaagtagtgcattgatatactcttacctgtttcgagattcgagagacatttttagtctatttttttcatagtcgtgtaaattatagttatttaagacatctttaaaaatttgacaaattcataaaaatgtaacacgctgaaaataaaatttaaaaatttaaaatgtgatacaacaattcaataatgctgaagattatttcctgatccgccaagataatcataatatgaactataatcttgtgagttactattgagttttaccgattttacagtattattatcttttaacaattgtagtgatgttattaaattaatataataaaaaatatatttttcaatataattttttgtattgtgattaaataaaaataatttttaacactaaatttagtgtacactttgaaaatacttttaagataaacaataaacttgtttgtataaaacaactctctttatttttgctttttgatattttttctctaacctataacaaataaaaaatcccttaaaatatcaaacactataaaaacaaaatattattattttttgatgtatttcaatatagtcactatgattcaataaagagaaatgctaaagggtattgcggtatttaacactttcttatgtattaatattactattggtccaactaagtataggtctcctataatttactatactagcttttaagaagtatccattgtcaatagtaatgcaacatgtcgagaaagtattaggcaccaataatacttattacttaataacaatgctctttaataaattctataaaaataaaaatcactaactagttataaatgtcacagggtgtagctgccaaagtgcactttagcattatggtatcaaaagttaagcagccccaccataaataaccaaatattaccatcaccaatattcaatactcaattatcaaaccgcgtctcagtcaaattctattggttgtaataatacttagacattcccaacacacaacaattaacattaccaaccataccaatgtacacaacaactggctacaccccatcccatccattcatcattttcaaacatttcaacctttctttgttgcttcctctcctccctactctcacccaaacccaactataaagactatcccaactcaaatcacaattcactcatcaaaatcaaatctttttcttctacaagtctctaaactttaacctcctcacttacaaagaagaatatggcttctctttcttcactcat

SEQ ID NO: 45259 - DNA, 1564 bp, Cannabis sativa
ggacctagacccaaagcggaccaggacccagcccagacccaagacccatgacttagacccgagacccgcgattaagacccggtacctcaacctggacctagacctggagcgagactggtacccaaacccggacccgaacccgaacctgacccgtagttggtgttggggtcgagtgtattgaagatatattataatttattcaatctattaatataagtcaataccaaatatagtagtgtattaaataatattaatacaatacaatccaataaaatacagtacaataaaatatggcatcccaaaccatgaaatgtattggatttagatgactagattcggagcaatttttttgacattaaaaaaattcattgtttgtactactatttgttccactctagaaaaccgttggtgggcactgtgtttttgacttttcttctttccttattttcgaaaaagacttttcaatgtgatttttttaaagagccctagttttaggggagataagattcttctgagaaccatgaaataattcaaatggctgggtctatggagaattgaaatccatactaaaataatatttgaccattgataaatatatatttatatctcctccttgagagattaaacctaactgtgtaatatatattttatagtaactttatcgtgtaaagagtttaacctttttattggtacttgtcacaaccagcttttttagacggccactttggattttggactttcaactttgaactaatatagaatattagtgtatgatatcttaagttatactaaataagtaactattttcaaaaaaaataaaataaaataagtaaccaatacaactctaaccatacatactaaatacttatcaagaaaaaaaaaaaaccccaatgcatactaaattataagctgattattacattagtcataatttttcttaataagtaaagattaattattttataaaaataaagactaattatgaaaacacatatagtctaagttatgattaaatataggagttttttttgtttttcttattgtagttttacgaaattccattcaaaaattcttatagcagttaacggcactacaacaattttctgtattaccggcggagacatccgccagtattaatagcccagaccgccgggaataaataataccggcagaattcgccggtaattatccgccggaattaattggtcgctataagtgactaatagcgacgaaaatggtcttccgccggtaataatattaataccggcagattaatagcggtgggtggggtgtgtcggtattaatgtctgcacttttacacgcagataaattaataccggcggaccacaatcagtgttccgccggtattaatatttttaaatatttaaaaacagtattttaaatatttatataataaaattaattataattatatataataattattttataaatatattattaattagaaattaaacattaatattaatttgtctatcacaacataaactatattatcttaaataaaattagaaaattgtctttaaataaactttaaaacata

SEQ ID NO: 45260 - DNA, 2423 bp, Cannabis sativa
ggacgctataattctgaagcacaggattgcggtcactaaacgacgccgttttcttctacatgctaagctaagctaagctaagagcaattttcttgtcgtttttgtagtatatattaacgaataacacgacatgtagttttggatttttgagctgaatcatgaaaatgacttcaaaaaggaaaattctcccccaattaagaataaccatcactaaatttttaggaaaaattatagcaaatgactccaaatcataagtaaatattttcttattttgttgaaaaatcacaataaacttcattcaaaagaagataaaatagtggtgatcaggtggggattcacctcccaaaacttcaaaaaaccattacaattactgttcaacttccactaagccaaaacatgagcagccttatttaatcttataggcacccaaataacattacaacacgaagtagaaaggatatctaaactagagagaaaagtaaaagaaaccttctagtgaggggacgatgaagaactaattcagttgaaaatttagaggcagacagagctaaggcgccatcctgctcacccctaaccgcgatacacactgcctcgagaccattcttaaaagcaaaatccacattaactctaatcatttctggacctggaatcctccaactcagagcatgagtctcccgcaatacagtaaaagaggacataccagccaccctagcattaacgcgaccattaaactttgcatcattctgccttttaatctcagatcaagctaaaattcatcaattgggaaaattggcatttctgcaaaattagagtttgtgatacaaaattattacaaacaagataaaatctctcttctctatattgatatgaactccgtgagagtcaaatggatttaaaatccaatttacaacctccccatttgtatggaaaatgatttcattaatacgtaccccatttactagtaaactataagaacttggtaatagggcattgtgagaaaaaaaaatgagaagcaccatcactcccctcaaggccacatagagaacaacttccacagtaactattgaaaatggtcgagagacgagagccaaagggaagacactccttatataccttccataagaagagcttacgtcgatcatgaatactcgacttccatatcttagcacaagtattagtaagcatgtttcaaagagaagctcccattatcagtagattgccaaataagtttattctctttcggaagaagagtcaagtttgcatatagaatagtaatagcagcacttggggtgaataatctagagacaagattgctatcccaatcaaaacaattttccctcaccaaatcctccactctggtcttgtattttatttaaggattacaatatgagggactaatgagtttaccatcacaacaagaccaatagcagttttgaatttccacattagagtgtttgccaataattcacgcgttgttatctctaataaaccccttggtcttccaaatccctttagctgacagagaagcgttcccaaggagaatgacgtcccaaaagcttgaagaggaacaatgcttctctttcatcaatgtaacccaaagagcattgttattttcagctataaaccaaccaagcttagccaaaaggcagaaattaatatctttgaaacctctaacaatcagacctccacaacgttttagcttacaaatagtctcccaattcaaaagggaaagatatcaatcttctttgctattgtcggtccgccaaaattttctgataaaagcattaagagaatttgtaattttgactgggagtggaaaaactgtcatggagtaaataggactagccgagatcacatttttgataaaaacgattctggcagcttgagaaaggagtttagctctccacccttctatccaagatcaaaatttctcaataataaaattgaaatctcttgacctattccccttgacaaacaaagaatttccaatgaacttttcctctccagacattaaatcaaaacccaactcctttgcaattcttaaacgtagtggctttccacaatttctcgagaaaaaaattctagatttgtggaagtttatctgttggcctgattaataataataatttgccaaaacatccttaatatgctccatattagagaaattagcttgtgtagagaaaatagtcatcaacatacataaggtgagaaactgaaagactagagcatttgaatttatatccttggatcagtccttgatgttctttagcgaaaattagcctagacaacttcagagcataaaatgaaaagatgaggggagagaggatccccttacatgagaactctttggggctcaaaagtttttgtcaaaatgtcgttcaccagaatctgaaaactcattgtaaaaatgcatatatatatat

SEQ ID NO: 45261 - DNA, 930 bp, Cannabis sativa
catccaaatgtaaaagcaatccattcatctaaagctgttggagagcccccattctttctagcatcagcagtgttctttgcaatcaaagatgccattgcagcttcaagagcagaagtggggaacactgactggttccctcttgataatccagctacacccgaaagaatccgaatggcttgtttagataaattcacagcgcctttcattggttccgattttcagcctaaacttagcgtctagttcgactctctcctcctctagtagtcaaataaaaaatgtatcaaatttaacgcatgttaaaaattgtgctaaatttgatacaagatatagtattgtgtcaaatttagctcacaataaattttacgttttttatttattatagtaccattatgattttttggtaaacaagtacatgtatattccatcctcaacaatatgtacaaagatttttgcttaaacagactatacaaattaaacaaattattttctttatgtctaagactttaattctaatacaaacaacttgtttaacattttgcacaaatctctttacattagggaactctttatcctaaaatatcttgttcttagttctctctacaaaaatacatcttcactaaaaataataaactacttttgtggttttttaaatttatttataattgtcatgaaattatttttttagtttttttttggtgttttatagatgatttatagttgtcgtgaagttaatttcttattatttttcagtttttatttttatttttactttttactgaacaaaatgtatttttgtaactttaaaacattataggcatatttttgtaattaaaaattttaaatcgtaaagttataaataaaacaaaaaaaaaacataatattgtaaaaatttacctaaaaaattgagtattatcactctaaataactaaa

SEQ ID NO: 45262 - DNA, 2636 bp, Cannabis sativa
tatatatatttaacaattacattaattaatacatatatacaataataaaccatagaattataatactgctagctagctagccttccctcaagtggacccctatttgagttatacagtttggggccaccatctattatttataatgcgatagttaaggacaaacaattacaaaattaaaataaaacaaatacaaacagatagacaatttgaatcagcgccgtccatgtgtaatgcaatggacggccgtgatagttttgaatgggtgagttttccgctacaagcaaccagtgacgttaagaggtaaaatatatgcttatgcaagtgtcatgctggccaaatatgataacaaacacacagccaagatcaattatatatcatgatcaccacttcacagacaggttttctttttggtgagattacatatatttatatacaaatatataattgtaactatataaatattgatgagacacctcatttttggattaatttaaccaaatgggcattcgtaagcgttcacgaaaggatataatataatatatactgaatatttagtttaattttatcatggcctaatgggtggttttctaatgggtcatgctcttatatgaaattttaaataaattaaattaatagctgtgttttaataaggggatatataataaatgaatgggttgctttcacatggggaaggaaggattctctttttgtaaaagagaggaagtggtcagagaatcccagttaagttttgttgttttgtgaaagagagtgagtttaatgaagaaagagagatttgagcccaaaaacaatagtagtattcctattaacagaagtatataatattataaaataagtagtttcttcgtttgtcatgcaagaacgtggggcaagtgttttgtctcttaatacccccaatcaaagtgaagattcaggaatcagtttgtgtactaaactaataacaaaactttatattaatatatacatatatacaatatgctatggaccacactttaatcttagatatttggtatttgaaaaaagagagaaaaaaaaaggagagagaggtacttttatcctatagaagcgggggcatttaaatttaattttgggggtgatggtcaggtttctttggacatatagaaagttattattataacatgatcaacttgaaagaaaaacattaatttgggagttctcattaatgtcatatatattttaggttttagtagtagcccttgatgatacatgcatcattttcaattccactcatacctcatgtgtagaattttttcagttaattataatggttttgaattataattggttagattatatgagagagagagagaggagagagagaaagtcgagacacaatgatatacgaggactaaaacagtgtgtaagaaaggaaatatgggtgaaaagaacacaagaaaatagtaaatggatatggttaagctatctacaattaatggtcttttgaaaaattccacagccaaaataataaaaataaaatacccttaacaaggtggccttagaatgttgtggagaggagagagagaggtgattaggcctatgacatacatatatatatatatataaatatttatagggtaaatactattgtgtgagacgctctgttttgcagaaattatttattgaatcttctctattgttaaatgataaaatgaatcctgtattttttaaaatattacaaatatatacgactatgaactgattttttgttaaaatcaaatttaataaaaatctaatttaaatatgttatgacataactgtttaaattttttatatctgtttgtagaaagttaatcccagagtcttatttttactattttgaaaaatataggattcattttatcacttaacaaaatatacgtccaatctataactttaacaaaatacacatccaaaatactatcatacatgtatgggtcatatatatatagattctcaaaacatctaatcaatcatgcatatgtgaatgagaggccgaggccggttgtatgattccctcaatgatcatcgtttggctccattgaaaacttccaccaactatactaattaatctaaaacgcccacttccttttatccacaacatcccacacaaaatattgcttattgcttttattttattatgttgcattatatatacataaattattaaatcaaattccatgatggggttaacggcatagaaaattactatattcttagtaaacatataataatatcaatgaacatgacttgcctcaaatttggccacctattttcttagtaggtaacaaacatgattttgaatagatggccctattattttttttttctctatcattcttttaataaatttagtgcgagtatgcatgatatgatagcatgacagtcgaccacaccaagaagtaaaaacattatatgttaacacaaatttttattaataataatatattttgctcatagtattttgtcacattatcatttatatttttcataaaattcttcattagtaacaataataacatttcaaacattttctcttattgaaaaacaaagtaacatgatttcatatgtagtactatatatcttgctttcctcccatatttttttaggttagctttgtt

SEQ ID NO: 45263 - DNA, 867 bp, Cannabis sativa
atttaaattatgcttcttaattgtactcctaattgattataattttgtaattaatttacagaacgcaatgtacgcaccacaatacaccatgaacgctcacaacattatctacgcgataaggggaagttgcaggtgtcaagttgtggacaacaacggacgatcagtgttcgaaggtgagattcgccaaggccaggccttgacggtaccccaaaactttgcagttgtgaaaatggccgagaaggaaggatttgaatgggtgtcgtttaagacaaacgacagagctcaagtaaaccaattggcgggaaaaatatcgttcatgagagctatgccggaggatgtgatcgccaactcataccaaatctcgagagaacaagctaggaggctcaagtacaacagagaagagtcttctcttttcaccacctcccaccaggggattagggctgctgttagtgcttaattaagtacattaattaacaatgtgtaatgttatacattatcatgtatagcattacctaatgtacctaatagtgaaacttgccacatggtcctttgctttttgttttgttttttttttggtttaagtttgggtaattttttctgtttggcgccatgagtaataataataatatgaataaataccctttttatgttaaagacttggtgagtttgagttatctttttttgaatcaatgtaataaatcttcataagaagacaaatcaaaagtttggggtaatttgtcactactttgtcttttagatttcttcaactattatatatatatatatattttactatatctatttaataatatatttgagaccaaataaattatattctaattaaaaaattataactaaataaaatta

SEQ ID NO: 45264 - DNA, 1538 bp, Cannabis sativa
aaaatgctattatatcttttcaaaataaataaaaaataaaatgctattatattattaataaggtatattttgaagatgatgagcgtcgaccatatattcgagtcatcaacctaacaccacgtatgcgatgcagttttcttcaataaccaatctatactaaagtcagaaatattatattacaaaagaaccatatataaatctggtactggttcaccaaaataatattcgttggaaaatacaaaaactattatatcgtcttaattaatattagttatatataagaaggtaccataaccaagtccaagtggaatgttcccagaagaagaatataggtttggtatactattgtcatccccgcgtaccaactcatcatttttcagcctcggcttttttttttttttaaagaaaacatattcattaagaaaattttcgtccatacatgagaacaaataaatcgaggacaatcatccatccatacagactcatcatttttttcagcctcagctttaatttaacaatttcgtttttagctttaaaagaaaattgttttttttttaagtttaactatacacaccaaaaccacaactacccacaattttagaagagaaaaattcatcaataagtacacttaaaattagggaaattttaataaatatacattatatacattaatattacaaaaaaaaattgttatgcaaaaaccatgtcttaatataccgtgacacgtcaacaagcataccgttactgccattaatttagaaccaccggcaatgaaagagacccgcccacaactccacttttttcggccttccctgcgcgtggtttgcaagattaaaatggaaagctatatatatcataggaataatacacgaattcaaaaaacagaaaccaaaacaaaacgataaaactccattgacggagaactcaacagatctgaaaattggagaatcggtcatcatctctctctgattcgttgttgtatacaacaaacaaatcatcatctctctaaatttatctataattcaatcgatcaaaaaacctatcagctgatcacagaaaaaaaaaacagagaaccttgcttcgaggaagaagaactacgaattcaacttcgacatcaaaaattggatctgaaaaaggtaaattatacaattcgatacatactactgcttcatagagtataacacattatacagatcgatttccaaaaacagttaaaaatgcatcatattaaaatgaaatcactttgtgcaatcatatatactttgttaatgatttttttaactaaataaatatgatgtttgttaattttgttaaacacgattatttaacaataaccagtactaatcagattgttaactaattgtaatcagtactaatagttaattaatcagtactaagtacttttacattaacaataaactataaacctttatgttgcccctgattttgcccaatatacgtggaccaaccaggcagggacacgtggaccaaaagatcttaacatttaaattaatcgctaagtctttataaagaaaggc

SEQ ID NO: 45265 - DNA, 1886 bp, Cannabis sativa
  modified_base (699)..(713): a, c, t, g, unknown or other
  modified_base (762)..(766): a, c, t, g, unknown or other
  modified_base (870)..(880): a, c, t, g, unknown or other
attacgttgtggagtgtaattttctcaaatattatccatgcttatatccatactagtgtgggtagcacataaggtatgtgctgcaattttttattttttaattatttattatattttttatatactaattaagaaaaagtttaattgaaaacatattaaatattttgacaaactgctaagttataaatgatacaacgccagcacaaaatatgcataatacaacttaattgacccaaaaaaaatatttatattctaaatcatatcatttttagtatattttccttcttaaaaaatgtagtaaaacaaaattttaatatcaataataataaatttgcaaatttggtgaaataaattaatataacaataataagagtagatatactgtaataatatttgtatttgatataaaatgatattattgtatattattattattatttggcacattgatgaattttaccaaataaaatgtgatatttttttacaatattacttggcccaattacaaaataatgaaacaaaactgccactaaaaaacaagatatataaacttagaatacatagaaatgtgaattcccaacatatgatacatatatataggctaattagtaatttttcctcccgaactttgacatgtaccagattatgtcccttgaacttttttggccgttaaaaattcctcctgaactattaagattnnnnnnnnnnnnnnnttttgtctaattttagtaaaaaatatttaatatggatgaaagttcaagnnnnntgatttagtacatatcaaagtctgaggggcatgatttggtagatatcaaagtctggtgagcatgatttagtacataaacaatcactgaaacagtaaaattaaannnnnnnnnnnaaaagtccttaaatttaacaatgtcaatagttcggggtaaattttaacgacgaaaaaagttcaggagcaacgatttagtacatgtcaaagttcagtgaaaaaaattactaattagccatgatttaatttaaagcaaatatcacatctaacattaggatagtaatgaaattgagtgaaaaagttagacgaaattttatgtgaaaaggttaataggctcatagtatatagtaagatatattcacaacttaaaagtatcatttcagcaaaggttggttaatagaaattaaacatgcatgttagagacgtgttatatatcataaataaaatgcaactttgttggccacttcagactaattcaagtaaatggatgtgaatataagaggaggtgataatttcgtatctgtttttgaattatgaatttccttataataattattcttttgtttagcatctatcaaatttatcttaaatttttataattattttaatctatgcatacttgaaggatgaattattattgttataactatgtcacatgctgtatctttgtgctatatgtgaattaatcatacatgttgttggttatgtggggtcttgatacatttacaaattgtacattaaagtgcatgcgtaatggtttgagtgttgagttctacaatttttgctattgtttatttataataacctttgaaaaaagtacatatgatctaatatctgataagaaacgaataaggtctaaagacaagagattataagacgttgaagccactaactaattaatattttcagaaaatctttttttttttttgaaacggaattttcagaaaatcttgaatgatataaataaataggaattacaatgaaagtttacgcgtatttacatatgtatatttatttattttgcactaacttcctgatttagctgggtgggtgtcatatatgaaacattttacaactcacaacaccaaatatctagcttgtcattcctcaaaaaaaaaaaaaaaaa

SEQ ID NO: 45266 - DNA, 1661 bp, Cannabis sativa
aaataaataaaataaaaaatatttatttattttaaaattttaaaattattttttataatatttaaatatttaatattacattgaccactcaaaacttaccacgtgtacaagtgtgtacatgtagacagtctaccgtaacatttaactgtgatttttaaacggatgggtacagagcaaaacagaattggagttcaataggttttgtcactaaaattttagtttttgtggtttagtgttacaaaacgtaaaattccagtagtttagctgttaatatctctaattttttattggttttatgtatttgtggaataattctaaaaaattaattatatattttaaaaaatagaaaagagagatgagagtgctccaagatatcatccctatcttttcttaacttaggttttgtcggtgttcctctaattttaattgtacgattctctaaatataagtgttgcttgtattggatagttttttttcatattgaaagtttatttaatccgtaattactaattcgtctattttagtttttccttaaaatggaaaatggaaaaatcaacgttttcaacgagcgaaaagaaagagtacatcaagccttgggccccgcagtcgcacatcgcattaatgtgattgtattgatcatgtaggtgtgtttatcaaagtgcccactgcactaaaatatatggtttacaatttttgcattgcgatatggtttgccatttttaaatttagtcatctttacaccatttttaaatgagtgctaaaactatacatataatgaactgtataaactaatttaaatttagtacatattaaaaaattatattaaatttaagcataaaatacaatatttattaaattttatactataataaatattaattttttatttatttttttctacttaataatgtaattaataattatttatatttccatatttaattactataactaattgtaaaacataaaaaattagtgctttatttttaaatttatagcggtagaaagttattttttttttccaatcaagtctactgaccttttttaggcataagtgcgatttgatcgtggttgtattttgctattgcgatttatttttgttattgtgattaatcttatctctgaaatataattttaggtgttttagtcttatctttataatatagttttaagtattttaattatgtgtgacataattttattttgttgtttgttcttattgcggagagaataaaagtgaattttattattgaaattgagtgaaatgaaattataaggaatagtctaactatatataaattgagaacaaatcagagttagttagagcccactaactctaactgaacttctaattaataaaattcacaaaacatattaatagtcttactgaaattaattcacaaactgaagttaattaaccaaacataactaatataaccattaaccacgcatatacattgtaaattatgttacccctcacctttcaagatggactgtagatgttataaatagacatattggcaatgtgagaggaaagaattgtggaagacagtagtttagtaaaagcatctgcgagttgcaaagaattattgactggaataagtcgaatggtcgagttctttattttatctctaatgaagtgatagtccagttcaatatgt

SEQ ID NO: 45267 - DNA, 1726 bp, Cannabis sativa
tacaaaccgtaaagttcaggtggtttagccgccaatatccctaattcttaatacgttttgtcataacatctctagattggattattaataagttttattttaacaaaaaaattagttcagatcctacttatacctttttggaaaatacatagtccattttattatttaacaaaataaaaagttcaatcgataactttggtaaaataggttcaaaataatatttatccttatttttataacaaaagaaaattgtgtttggtctaaaaaataaataaataaataaataacaaaaatgaaggtaggctacagaagactagaagaggtcggcaaactcggcacacggaattgaaggttaaagttcagatttctaacaatgttttcctaaagattattccgtaccgtgtcaacctcaaacagtggcaaacttgtggtttgtgtagcattaaatatttttctcaattaacatttttttctcaactttgtattgttttgattttaattttttatgaacgtattaagaataagatgttgcacgattaaataaataaagtgtttttatttcaaaaataaataaataaataaaggtagtatagataatttctagtaagaacattcttaataggaagatcttaaagcattttaattctaattttttttcataactgtattcaatataataataataggtctcttgtaagtttttaaaaataaaattctaataaaaaactaagcacaagaaaaaaaaaaaaaaaaaaaaacttgcgcgcaacaagcttttaatttttctttttcgatactgtaaaatatttataatttttcaaaatcttagaggaacttactattactacaataaatactataagggaacaaaaaatttggattacaacactttaaacttactatattaatttgtagatctaccaatacaaatagaaagtgttatataaccacatatactctttcttaataactaaataataataggtataaatattattttgaactctgtattttataaaaattattaattaaaattctcttgtgtatattgaatatagtacaaaataattttaaatcaaattattaataaattttatttgatgaaaagttaacttacaatgtattttagtaagttcaaaatttattgtgcattatttgaaaatgtatttagacaataataatttagtgttgaagaaaaggaaaacaaaaacaagcctacataatttgaaaatgtctcttagctataacctggggccaaaagtgatgggtatatataaagcacgtgaaagaggatatctatattctataattttatgataaaatcccttcaaaagcaatcattatataataatggcaaacaagtattctatatcaatcccaattaataaaatctatataaatatgagtaatgaataatattaaaacaaaattgaatttttataattaattttttttatttcattagaaatttcttttcatttttatattatatgagttggggttgttctgctaaaaaaaataataaaaaaaaagttttcggcaaaaaaatgataaaaaaaaattgaatttgacttaaatatttttcatataaacatattttttatatagtgttaaaataggtattttttgatatttttcttaattaagtagttaatttaagcatagaaattaaaaatttctcttttattattcggtatcagactaaaatttaataatttaatatttt

SEQ ID NO: 45268 - DNA, 1310 bp, Cannabis sativa
caacatatattgtattaaaaaattggtcagaataattaatacaatacattattttatccaaatatagtgttatttattatttaaaatacaactcttatgcggcataccaaacgagcttataatgttttcttcatttgaaaaactatgccttaaaatatttttattaggagcactgttattagtcacgggtgcctaatactttctagacgtgtcgctttacgattagctagtaacactctttaaaaataattatattaagctatatgagacctgatacttagttggatcaataacgacattgacacgcaagagtgtgttaggcactaataatactttttagcatttctcttcaattagtgatgaaaatgtgtacggggtcggccctgaatatacgcgggctatgtctatgcctagggtccacgtaacccaggggccaaaaaagaaaaaaaattccctttaaaattatacatttttgttttattgattttgaaaaatatcaatttttttttttaaaaaaaaataagggtctaaaaatattttgtttcttatggcccactataattctaggttgtagagtgtaattttatattcttggaagggttcaaagtgggggtggggcaggatcgagggtgatactagtcaccccatattggactcaaaaatatatagtgttttttaattattacgtattaaaattattaactatacttataaaggttactataaattttccttaatttactgagtaataaaggctttttaaaaggtagagtgtttatttattttaaagtcaatatcttattttttattttcattttaaattacattacattattttctttttattattattgttttaatcttaatgggtatgcaataggaattcccctacctcgaatccatcggggattaagcggggcgagggcggggatggggtcataaacggaaaacaaggatagggttgggaggtgcattacccgcatattacctacctaattttcatccataatttccacatataaaatacacacaaacataacaattatgtgacaagttacttttgataagtgaaactcatcttaaagaaggatgattggttgcaattacttaacacataacatgtttgtatgtgcatatatcattactctacaatctaagagcactcccaaatagttttactttatcatttacgagaaatgttataagacaccagtagtgcttagtgtcacgagccgactatttggacacccccaaataggcagaacgtgcggcacttgttggcacaacgagctagcaagtcagcctaaatg

SEQ ID NO: 45269 - DNA, 890 bp, Cannabis sativa
ataaataagcagtgattgtgttactatatcgttagataaaaataaatgaagcatgaataagcattttgctatctcaaataattaaaccaaaataatagtttatttgtaacacaccacaagttgactaacacttgacagtccgatttaatcactacatttaaaatttgctaatccactatccagctcaaaaccccagttgaataagtatgtaacatagctgttaaaagtttgatagtttgctgttgaatttttggctataaactttaattaatgttttaatttataaatttgttgaattatttgatggtacatgtaaatggcctccaccatattgtactacactgaatttgtgatgcggtttgaggtcttactcaatttagtacggtataataaaataataaagaattgtaccactatatccttaacaatatctttttattttttagttttgcataatggacaatatagtatttaaatctaagaaaatatatttacactagtagagatggtctaattaacaacattaagaggtgtaattgtaagattgtttatcaataagcatagtaatgggttatcccacaataataatacatagtatacttaatattttttttattatatattaaataaaaatatatagagcctaaatcaaaatgcactgttaataatgccaaaaaagaaataaaataataagcaacttcttgtatttctagacataagataaagtgccaccttaatattaatttcattattttagttattatagaaactattttcttaattttttttttaaaagaaagtttttttttttttttgcagcatttttttaaaagaaagttaagggcgcgtttggaaagccacctgggaattggaattgaatgtaattggag

SEQ ID NO: 45270 - DNA, 2210 bp, Cannabis sativa
agaaaaaacatgtataatgatgtacaaggaaataagttctaatgaagctcatcttgcatgggaaatgagattctcgatagctaagaaacaatatataatgagctgcagtagaacacgagtaataatacccaatgaagaagatactctgctgcaacgatggttgtagcatatgccctcatagttcggttaatagttgacatcaccatagctccatctggaacagttaatgctgctatagacttggtgaattcagcagggtttgctacgtgctcaattacctaaagtaaaatgtgcacaccatagaacaaattggatgtgagcttaagaccgcgcgaagaaactaaaaaaatggtataaaacccaaaattctagaatcccagttagccatttcacaagcagactgagattttggtgaacattagggacagaagatttggtatgagacacacctctaatgaaatcacagcatcaaaacttttctgttcttcaaccatcttttctgtccacaatattagtaacataacataagcttctaaattgaaaaaaaaaaaaacaagcacaaaccgtatacaacgagaagacaaaatttacagccagttgattactagctcaatgaaatatgtcactgaaatggcaccacaaaaagtaaataaataacaaaaacatcattaccatgaaaatgttgtacatgtctgaaagaattagccatcaattaaaatttacaaaaacatttagcaatgaaaaataacatgttagcatagtgatgcatcaaagcctcttcccttgtagacatagtttagacggattaaaaaacaaagttcataacataccggctgttgtgcagcaataattgattgttgaagtcaccggatccaaaccctgttttcattaagtaatgtcttattaaaatactaatcctggcaaagtatagaaaacattgtaattaactggaaagataactgaaagcctcttttcccactgtacgctgtcttcttcaactccacaacaatagatccttgaaggaataagacaaaggtttaaaacaaaactcgtcacatacttacagcatgaaggcgtgcaattttgatattcttatccccagcatcaactccagttacagaagctcccattcgagctagaggctgagatatgaaagaaattaacaaattagaactggcaatatttcaagcactaaagaaaaatacccattcgaatttagcactgtttgtacataaaatcaaggattggaatgattgcatgatgagcacatttgccacaaataaaaaggcgaaaagtaaactaaaagacaatctaattaacaatattgtattgtatgaaatataaacgaaaagaacagtacctcagaaagaattccaccaccacaaccaatatcagcaaatttcagtccttcaaaaggcctagcagagtttgaatccctcctgaaacaagaatgtttgcataaattataaaattaatattaagctcacgatcgtaatggtaaagctattgaaagtaatgtacctgaaatgtcgacaaagagtggagcggatgaaggcgagtctagtaggattgatcgcatgcaatggtttgaacgggccttcagaatcccacctaattacaccataataaatcagataaacacaagactttatatatattttaaccctaaacagattatcagttataaggaatgggtaataaattttaaagtgatgagtgagaagataagctaatcagaccaggtttcagcaatggaagcgaacttggcgagttcagactgatccaccgacgaactagtcgaagaattggcgccggactgagaaagtcgaggcagtggagtagaaggttggggtaaagacgggacatcggagtagagtctagctccggcactgcgaatgaggattagcggtgcttttccgcagctcaggtaccgacgagcaagggtgtggtggccattcgtggctgtggacagagatcggagtttgatcaggaggttggaagccatggccgtcgtttgaacaagaaaatgagaaagaatagcccatctacaaaaatggtcaaagtttgaccccataatagatttgtgcttaaattctgatcagggcctgatcatcaggcccaataaagtaaaacaagtttggttttaaaaggtaaaaataacaacaaaaaaaaaaaaaggatcaataagaaactaatcataaaataattat

SEQ ID NO: 45271 - DNA, 824 bp, Cannabis sativa
agtaaagtatggaaaatatatattgaactaaaactcaaatccaagtttttgagaaaagttatacttacgtataattttacattttattgtgttgattggaaagagaccagtggtccaaaagaagtcatccttgaactcttttttgttgggcaacctcacaataatcctatgatcattggtgtgagtcctgagatagttaaagcctcctacaccacgctttcttgctgggcaggctttaacaaaataaaaacaaagaatctccagtggagttggatactcccacttcaaaatatggtagagaaattttaaataggccaatatcctatgagtttggtgccaattggaatggggtaatattgaggtagttacagaattctttgaagtaatctttaagagggagaattgtcccagcccttatgtgctcaagactccaagcgcctattctagaaggctcgctcatgttacaacccttgtctcagactagacattcaaggagatagcagctgaattctccattagcaatggacctaatatgacatccatgttcattcctgatgctgcatgaccttaaaacatccccttcataaggtccaatggacttgattttggactcaattaattcagcctcaaaagtgactgtaggatcctgggggttttggatttacaagctttctgagtcattatctcaaaatctaagtcacctagtgaaaaaacaacagtgactagaggtaaaaacatgggcctcgctaaggttgtattaactaaattggaaggtacaactcaagctgtttctcgcaaaaactgacgcctaccctcaataactt

SEQ ID NO: 45272 - DNA, 4055 bp, Cannabis sativa
aactaatttgtaattttacaaattagatttgagtaataatatatagaatagttgaaataaaatatagagtaatcaagaactctcctcaacttccctactttatatttaaaatatattattaaaatcatacttttttattttacatcaaatttttacattacaacatcagtttcttaaaatatatcaccaagactaatcaatgtggttgagttaagtttatttttatatatatatatataaatataattaagtgagggcttaaatgacttaagtttatgggttggtgaccaacactaatcaatgtggtgtgtgagtagttaaatatatttttatttttatttaataaaaatatgtggaactcaataataaattacattaattaagatatgacattcatttgataccttgaggtgtatcttagtatttttctatttatattacaattcaatagttagagagctattttcgtccctattggcaagcatgtatatttttttttttgaataaaaacataatttattaagataaatctattgttagagaagaactcaaaaactatgaacatgtatctatccaaatacaatcccctaaactagtaatagaggttgtcaatgtgtgggcaacaccatttgctgatcgcagaatggcgctgtaagaacatccaccaacagcagctaataaagaatagatatcttataaaataaactaaaaactaaaattaatgtaaagcttattaatctagccaattgttacggtaaaatcactattaataatggatatactaaaactaaattgatgcacaagagtcaaaaccaaacgaatggcaagcagctctgcaacattagtagaaaaatcacctaacacacctggtgaccacgccaaccaaaccacaactgctgcatctcgtattactcccacaatccaacaaagcccctccctggaaacaccgaagcatctgtcactagagcaaaggactcaagaagaggtggcatccatcgagtaggtcgatttacaactgggtttgcaggaatcactcccaaatgaaggcctccctggccacactccttaaactccgacagatagttatgggctaaatctgaaaaaaaaaaaaaaatatccaatcttaactgcttgttgccaaataataccgagtttttatcataccacaaccaccaaagggttttcatcattaattcaaaagcctcacgggatagcctgtcaaagagaaataggagaatttcctacattggtccatatacacatcaatggagcaccgaccacacccttaaccgatgccacattggaatcaaaccagaacaggaaaataaggcatgctcaggtgttttagattcttctctgcatcgtgaacaacaaagaggtacctaaactttctaagagataagttgtgttgctactggtaaagccaaatagaacatatgccaaacaaaaactttcacctttgatggcatattaagattccacactccacttcaccaatgagttaacctggatgaatctgtgactctctcctcaacctagagcgaccacgctaatgagtagctactcttgacattataaaccccgtccctatcatagtgtcagcaccaaccatcttctacatcatgcctcgttaatggaatagataaaatatgttcacatccattggcaaaaaaacctgttgaagcttcctcacatcccaagcactagatggaaggataaattcactcccctgacagtcattattaatcttcctcatgattggctaaaaaaaacctcagacgcgggagccataggtccttgaaagtcctaacttgtgttccatctccaatggacctccaaagcccacattttagtaaattcattccccaaattaaactcgaccaaagataagatgaaccatctttttcagtggcctcaaggatagagcaatttggaaaatatttatgttttaaaattcgagcaggcaaaatttggatataaaaataatctccatacttgtttagccaaaagggcttgattaaaaagttgaaaatcccaaaaaccaagctcgcccattgccttaggctgacatactattttccattttacccaaggaatcttcctttgatcgccacatgaaccccacaagaattatcttacaatagactttaatttttcacaagttgtcaccgagatcttaaagatactcatcatataagttggaatagcttgaagaatagatttgataagcacttctctcccaccagctaaaaagaaatattgctttcatccccgcatacgcttcctaacttctcactgatcccctcaaacacctacttttgtttctaccaatcactgtaggcaagcccaggtacttgtcatgagtagtcactgatgtcaaccccaacactctcagaaccccatcctgatccaacctgttgcacatttggactaaaaatgatagcagacttcttaaagttaatcttttaactagaggtagccttataagttggaaagatacactttatagtttcagtatcacctctattagctctaccaaacacaaggctactgtccacaaagaataagtgagtatcacgcggtcccgatctagaacacctaaaccccattagttcaaatctagcctctgcgagagagaacaacgaagacattgattttgcacaaaagaggaataaataaggagataaatgacatccctgtcgtaaccttcatgttagaatcacccgaacggtcattgattaaaaaagtgtactccgagatcgtcacacaatccataataaccctcacccagtcctcagcaaagctaaactatcgcatcatactggctaagaaccaccattccacctggtcatatgcttactcatgtcaagcttgagtaccataaatcccatttttctattatttcttttaaacaatgaatgaagtagctcaaaactaacataatgttatcatgtattgaacgccttgggacaaatgcactttgaaaagatgagatgagggggtcaagaatacttttcatccttagtgataaaattttgaaacaattttatacattacacaaggcaataggttaatactctttaaccaatcttgatttttgtacttttagtttcaacaccacatttgacttattaaactgtcacaccgaagcaccgtcatttaagattacaaggcatacttggcttaccctctcacccacaatatcccaaaatctttggaaaaaataagcatgatattcgtctagtcttgaagctttagtggcaccaatggccgtaacagcctggtgaatatcctgagtgaatggtgccataagacgctcattatcagctaccaaaatatacaaattaacaacctttgtactacgatggacttgctcatttgtcgagttggctgtttgaaaaatatatgtaaaattctacttcacttcaccaacaatctcttcctcaacacacaacttttggcaagtttccgtcatatatagtctcaataataacatttttcttcttcctccccaatactttgttatgaaagtatttcgtgtttttatcaccagtcatcatccactctgatctcgatctctgatttcaataaaatttctctctattcataatagaaaaaattatgatttgtttttcatatgacgatattagaattcaaaatcctattatcgacacctacaataaaatttaggagaattatcctatacactatattttaatttttttttttagacttacggtttgggtcgctcctgtagtttctatgtaggttgctacatgaattttgattgcaatttaagttgcttcgttagttgctataggagtttttgtgtaaaaaaaaaaaaaaaaagactcttttaaagtataaaaataaataaaaaaaatctaaaatttaacaatttgaactagtcggatagaagatattgaggtgtgtggggtggaatcgaatatcaagtttgtaattaaaaattgtaatataaaaagcttaagaaaaaaaaaagaagacacctacaataaaattctctagtaaataatatagggtgattctacaatgca

SEQ ID NO: 45273 - DNA, 1629 bp, Cannabis sativa
ttgcctaaaattttgaaatcccaacatttaaacttcaaaattgggaaaaggttattgtagataaagattaaagagtatcacaataaactaacaataactagttggataaacttcaaaaaaaaaaaaaaaaaaaaggggtatccaaaaaaggttattatagagtttttacaagatgaatgactaccacaaagtcattggtcgttactaatcaggtcgttcataaaattaattggaagatttggatgttttttgagttgttaaaaacatcacaaatgttcaaaaacacacaacttgaacatggtaaaaaataaatagttattggttacctattttttcagctttaattaattctttttcaaagtctttcaaatcatttctacttgatgttgatactctttttctggataccactttttttagttggataaaaaagactatttatacagggaaaaagcaacaatagttgaaacatgtttaagagtattcctaacaaatgagatataatatatatattttttttttttaaaaaaaaaagttactttcaatattttttagcttaagaatagtgcatttttacatttagctaaggtttcttagctattttattattattattattatagtcattttttttttattttttcatgttatatatataaataaatttaaacgaatcaaatatatttaaaaatataatatttaaagtatgtgtagaaaaaaattgatgtatagtgtaatgaaaaattttaaggtgagataaaaaagaaaaataaagaaagattgagttttcgcagtgtattttgaagtaaaatttgcaaactaataatgtgaaatactaaaatttataaaataacctgacttagtttactttatgcgactataatggtctttttgcgaccatacaaaattattttgctaataaattttttgtaaagttattttgctaataaaaaatttcacaaaccttatttctacaaaacactattttgaaagatatagagaagttgttgagaaaataagaatatttgataacatattgaagtatttatttgaagtgatattttattttattattatttgtgtatagtgcatttggtaatttcttttattaattttttgctttttaaattagaaaagtgaaatatttttcaaattatgttctataaaattgttttcacttttaaattttttaattgagaatcaaaattttgaaaaaaaaaattcaaaatttttttaaacagtttttttttaatatatattttggacccgactccaacctaaaccttgaaactcggacctcgaccccagattcaaactccgacccagactcaaacctgaacccagacccagacttagaccttgaaacctaaccccaatcctagacccgggatccgacctagatctcgaaccccaacctgtaccgcagacctcgaacgttggacctagacccaaacacagacccaaaccctcaccatgaccccggacccaaattcgaaccccaaacccgaacttggcccaagaccctggactcggaccccgagccctacctcaaacccaaacaccagttccgacctcgaccccaaactcaaccttagtctcgattcaaaacttagccccaatctcaacctt

SEQ ID NO: 45274 - DNA, 3180 bp, Cannabis sativa
tggaggcttgaagcggggacgttacattattggatctcataaattaaaaagaaaatatgtatacataaaaaaaaaaattggtttggcactggtgtttttttgagtgtagcgtaatggtattttacaatcaattaacagcttaatagcttataaatcttagttttgaacccatgacctctcttttttctcccatttctccctcaccactaaactaactttagtggcttaacaatgagtactttttcttgtcttctctctataaaatattatttttaaccctatttagccttatagtaattgataaagactaatattgacaccgctactgctcaaagtgtcattttgttattaatataattaagtattaagtcttacataatttttaatttaagagaattgcaaaagatagcaccctcctcgttatcataccactattagtctaattaagtatcaatccatataacttaagaaaataacttttatgaaatattgctaactaatcgtaagacactacttataactactaatacttaatagtaatactctaatttaaaatatggctaactattggtaatatatttaatgttttggagatgtagacatcttcatctttttgtgtttaggtgtcattaccatcacaatttacaatagtacatcaaattctattctcttctaaccaattagggcacatcatgagaagacttctccataacaaaattaaaattacaaaaatacccttgaccttgactttgacaataaaaatctcacatgataactgattggggaacccaaaaataattaaccaaccaatttttgtttaattagtaatgttcactattagtcaatttaatcaaaagtaaaaacacattattgttagtcaagataaaacagtaataacaaagaagtgatattttagcaaatttagatgaaactgaacagtaaaagcccaaaatggattgttacataaaggtgacgtgtaagaaatggattgtttttgtgattttgtgtatatatttatatttatatacatatatgtatatgtatatatatgggggttgagagttgggggttcaacaagaccataattaaacaaacccaaaaaaagaagaagaagaaaaacaaaattggttaaatttaatattgggctagttattaatatggccattattatttcttcttcttctttttcattttcatttcttatcttattttgtgtttggctatttgggtcatgtttggctttggaatccaaagagagtatttctcatcatcaacatcataatactcatactcttcaactcaattctctttttccagcttctacttgcaacccttcatccacaggttaacaaaacccctctctctctctctctctatacctatatatattgtatatatatgtatatgtgtatcaatatgtatatattcatgtgttcttctctgtatgtatattaataataatttatctccatgttatattagttatggtgtgttattggttcgagtgaattaaattgggcttaatttatatatatatatatatatatatttatatatatatgcatgcatgtgaagtttatatgtatatatatagaaaaaatagtttaactatatattgggttattattctttttttaggggttgttattcctctgattaattagaggcatgcataaaaaattgaagaattaattattttatataacttttttatattataaatcattttataaagcatctcacaattaattaagaaattagtaaacataaacttcttctaatttatgttcttattaattttttcaaataaagaatatttgatagagtttaatcacaaattatatattaattattattatatatttatttatttattttagtgaaaggaattaaacaatttcttaatgtagattctttctttaatagatatataagccaaaaaaaaaaaataggcgtccatatatattatatagttttcaaagggaccacaataatgaaaggtagagaaaagtttcatattataacaatggcatttagtgaatattttcactaaaatctaagaatatttaattgaaatatataattaatttatgtttatttgagtggccaaacatgatgtgggtcctaatattttttgaatttttctcttgtgtcatgataattttttttcattattagtggaagaattggacttcttggttgtcatgcatatatataatatatgtatagtatatatatgtacatatatatactcaagctatagcttacttatgataccaaaaaaaaagtaacttttgttatagaaatgtcaatgtcatcatcattttgtttgttatctttaattatgtatgttaataaatatataaatggattaagtacattaatttaattggatatggtcattattgtgatgaaacacttcactataatgattagaaacaaactaccaaataagcatttaaaattagctataaattaattagataaattaatgtattatatttaagagtaattgactaaaaataaatgtttaagtttaactctcaattataaataaatatttgagtttaatttttagtggtaataatacttaattataattctgaaatatctgtaggtacctgactattaagtaaactgccacgtgacaatctctttttaactcaagtcattaaattattatttttttaaaaaaaaaaaataaatttataacttaagtattattaccgctaaaattaaacttaggtattatttatgctgcaaattactatttactttttatatatttaactctcttattttttttcttgtggtaaaattcacttaaatttattttgtttataaatttaaagcgtcagttaaatattatcattaaataccaattgaattactactgtgtatacttgaaagtaaaatttcgaaatcaatacagtaataattcaattggtatctaacggtggtatccattacccaactggtacctcaaatttataaacaaaattaaactaaagggattttgcaaaaaataaataaataaataaatgtgaaaaatcaaaacataatttttttttcacatataaccctatatttaatttgtgattagaaagtactttgtgaaaataataatactcacgggttaaaatttcagagtcacaagaaaacataaaaagagaaaaataa

SEQ ID NO: 45275 - DNA, 1477 bp, Cannabis sativa
tgactgtcgtagagcctttgtgcaattctatcaatagctattcaacttctttcttggtaaagcttcttagaggtggcattgggataccacgtctgtgcattatgttgtgcaagattagacatcttccagccatccctcgaatccttgcttttttactagggttttgattgggggtatgctgctgtaggtgtatccatgttagttgtccaacaagtttatttcttttgaaaaatggaggcttagttctttgaataatagagaaggtatcaagttttccttggttgtcaaggcacaactggttagtcgaacgagtgcgtcggctgttgtgtcatctttggggactttccttttagtatagcctttgagctgacttaacaagtcttgaaattagctcaagtaggtcatcatcttcttgtatcgagctgtattttcacttaggacataacctacgattagttgagagtcgtggtgcatgtcaaggtggtcagctcgcgtttcgtgtgctagcctgaggccaatattcagagcttcatgttaagcctcattgttagaaactttaaaactgacccttgttcctcgtgcatccattgcccccaagtgccctaggggccatgcttgcatcgggcaggtggtcaatgcacctcttgggttgagttgtcttgctcttcctctcacttcttctttggctcttgcttttctcccgaaccttaagagatttggggagatatacttttatgattagcaatgaagctagtgagagcttggccttagctattcatgtttggttgacagacgaccttatattggcggagtcttagtggttcacttgagtagttggcccgatgtttcaagtttctgtaaagcttgccgtagtggttgattggtgtacacctttagagggtgtgcctagaagtatggccttagctttctagtaaccaagagtaagatataggtcagcttctccatgagtgggtactgacttttagtgtcgattagtctcctcctgatgtagtttccagggtgttgtacaccgccttcttctcttgtgaggacatcactcatagcatgttctgtgattgctaggtacacgcttagctcttcattgtctaggggtttaggcaacacaggtggttcagccaattatttctccagctcctagatcacaatttcacattcctttgtccactaaaattttttgttacctctaagaatgttgatgaaggatacacatgtttctgtagacttgaacacaaatctgcttagtgcagcaatgcgtcatgtttggcgttgtacttcattgatggttatgggcgaattcatgtccaaaagaccttggatcttgtctgggtttactctaaaagaacatttaagggtgttgagattcatgtctaggttcgccacatgcccctagctcttttggacttgacaagcatgttgaccacatacacttctataagatccttataaattttgttta

SEQ ID NO: 45276 - DNA, 1392 bp, Cannabis sativa
tatttatgataattttattttttggtaataaaaatagcatgataaacctttctcgagaaaatcctatatcatttaggttgtattttgtttgtggtgattcatgtactagtgtgtgtatattgctttggaatactaaaaggaatctttttaatatgctgaatgaaatattagaatttcttaaaactaaatgaaataaaattgacttctttttagtagaaaaattcacacatgattcatgctacaaaatacggaatggtatgtacaagacatgtgtgtttcaaaagcaacatatgtaacgaccaaattctatctcataaagtaaaataataaaaaaaaaggttaggtgatgtgcatttcacaccgtcatacctacttaattaattgttaatattatatgtatttttaattttttttatagcaatgtattttttaaaattgaatatatcgtcaaaatcgttaaagaaattaaatatgaacgtaaggatatgttcatgtgacatatttaatttacaaattgttgaactcgcttctagttaatgatgttaatggtgatgagtttttaaactaattattagaaattagaactgaagaaatagataattcaaagaaatgaatagaacaacacttggagttttttacgttaaggcgttaaagaactttagtccatgagtcgatattaatatgtatttaggctagaaaagccattaggaatacaatgagtataagttctctatttttgcttgagcatgtattgcaagagaatttaacccttattcgaaagatttgttaggtatttatattatttacaggaattgtacttggtttcccttttctcctctaatgggtagtttatttgaaaatacacaaagtatggcagtttcgtaaggcccaactcatgaaagggttgacgagctgactaggaatataggacacgatcaagctgccattaccgtgttctataattgtgggtaattaattatgaattaattacttgatctccattttaggtaatttttctttttcgcttgatacgatcttttatcggagatttgaggagagttaattcctttttttgtgtgctcggatagaaagggaaacaggactagtcttccaggaacacgctgtctggccctccagaatcacggtattagaactccttctagatacgggctgtccttggcagaagcttgcctaagcatggagctaagataccttcctgaaaggtcttatctgagttgggcttgacccaggttatcttctttgggcccactggtgggatttagatgctaacctggagtccacacgtcccttgctggaaacgtggatagcatttacctaatccatatgagtgaacatgtggaggtttaaaaataatattcttgttactttcta

SEQ ID NO: 45277 - DNA, 1604 bp, Cannabis sativa
cattgagtacttaagtagtgggactctccttaatgacaagaataaagcaagaaaattattatacaaggtcccaacgttcacactattagagggaaggttatacaaaagaggctattccatgcctttgttgaaatgcgtgataatggaagagtcactagtcatcctcaaagaaatacatgtgaagggttttatggggactacactgagggaaaatccttgccaagaaggtgatccgcaaggatattgttgacccactataaaccaagactcttccaactatgtacaaaaatgtgacaagtgccaatgcttttccaaacttccaagggcccctcccatggaattgacatcaatgatcaccatggccctttgctgtttgggggatagatctaattggagctcttccacaaggaaaaagaggtataaaatatgttgtggtcgcagtagactattttaccatgtggactgaagctgaacccttagccacaattacagcaaaaagatgttggactttattgtgaaaaacattgtgtgtcgcttcggtataccacaaaaattagtgtcggataacggcacacggttcaaaagcgatctccttgtcgatttttgctagaaaaatgaaatcataaagagttttgcatcggttactcgtcctgaagccaatagacaagtcaaagctgtgaataaaattttgaaagacacattaaaaaagagaatcaaagtagtaaaagggaactggcccgaagagctcccccaagtactatggtcataccacacctcacatcgaaccacaactaaacacactcctttctcgcttatttttgaagtgaagccatgattctcgtcaaaattaatattgcttctcattgcacataatattacaaacaacatcgtaatcatttgttgctagaagaatctcttgacttacttgatgagagaagggaagaatcacaaataaggaacgtgacttgctaacaaatggtcaaaagatatttcgatacccaagtacacagtaaagagtttgagataggggatctagtacttagaagagtttttctcacaacaaaggacccatctacaggagtacttggaccaaattgggaaggaccttacaaaatatcctccataattcgtctaaggatgtacaagctcgctagattaaatggggatttgtgccaatagcatggaatgaccaacatttgaggaaatactatcagtgaaggtagtcgcaaattttctcaaaattgaacaattttatggttttttagttttaagtgccatttcaaaagcatgatatttaaatttttttttagacatttatttttttaataaatgtttgcacttttttgcaaaaatgtttcttttataatgttaagtcatcacccaaagaagttacaaaagtaacccaatgcatttataacttagggggcatatagggtatacgccataactatactctaccactccacaaaataaatcttattgtcattgtcggcacgtcactttacgagcaattatcttcaattaatttggttagtaagcttttacaatcaaaggatatgcttattgatattgctatgaaaaaaataaaggggttaatttctttt

SEQ ID NO: 45278 - DNA, 1168 bp, Cannabis sativa
tttccattaattgttcttcttttccgcgacagggacaaggtacaggttctatagctgagaagtatgaaaagaatatgaaagacattggagtagacccaattatggaaacagaagactcatctcattggcctctagaattcgagagactacagaggatgatcctggaactttggcaaacttgtcatgtgtcattagttcatagaacctatttcgtcttgctcttcaaaggtgaaccctcagattcgatttacatggaggtggaactcagaagactatctttcctaaaggaaacatattctggcggaaatcattctttagaagatagtcgaactcccacactggccgaaaggttcactccctcactcccttaaagacaatgctgaatatgtagacatgaaaactaacttcaatttaatatgctttaattgtaaacagtatgaaagctcttcgtcgagagagagaggtgcttagcaagaagatgcagaaacggttttcagaagaagagaggaaaagactattccaagaatggggcattgcattggactcaaagcgtcgaaggaggcagctggctgaccgcctatggaacgacacaaaggatatgaaccacattaagaagagtgctacaattgtggcacagttgatcaggtttgtagaccaaggacgagccttgaaggagatgtctgggcttagttttacgtctcctctagcgaaacgaagatcatttgggtggaaaaacagcagggcaccccttttgtaagcatgttgatttgtgtagttaagttagattggccatagagccattcatttttactgtgaaattatgtttagtttgctaacaactttagtagtgaaagttgtactagtcttcttggcctggccctccacgttgtcttctggtatgcggttttgaggttgttttttgcctcattttaatgaaatatataagctgtgttattatacatgtttctttctttcttttttgctcatatgatgagattcaaagcctgcctgaaattgtaaaactcatctgttttcaaacaatggttcgagtctgttgaccaaatgggattaagcaaaaaaaaaaagatcttataaagggcgtgtgattatagtaaaagcatcacttttatgcataacaaaaaagtgtttttgatgtgttcttgatttt

SEQ ID NO: 45279 - DNA, 1017 bp, Cannabis sativa
  modified_base (299)..(301): a, c, t, g, unknown or other
tctctctctctctctcttttcaattttcttctcttgccagagctgaagcttttcagctttgatttggcctctcaagttgtcaatgagctaaaagaatctcgtttctaatttctttgtgttgagagcttcctaattttgttgttcgcttttccatacaccacctttgatcggagacgaccaccatgcacgacagtgctctgtgtgcggttctaggaagaagaagtagaagaagaaagaaggaagaaggaaagaaaaaggaaaaaaaatacatatttttttaagaagaagaagaagaagannnaaagaaaaaaaaaatattttaatttttttaaaattttttaaatatttaaattattttttaataaaattattaatattaagattttctctctctctcttcgttccttgcagttcgctcggtgcaatggcgaaaacgaggtctaagatggtgggaaagtcgaaaatctctaatagaaaacctaaaaagaaaggtccgaattcatctgctgatgttatgaagaccaaatcaatggaagaaattcttggtgttgaaccagtggagttttcggatgaggaagatgaccgaacagaggtggatctggtgcaaccgttatctctagattcatcactgagattgatcaaacaacaggatgagatagctgctgattttggttatttcctagctgcaaacagggaatgccagaattcaatctcgaagggcattcgcacaactcctccgattctgagagctaaaccagtaatgagaagcttagaaaaggagtttgttaattcgaagaaggaggagaaggtgaagattactatggatgatatcgaagaggaggtgtcgtattggcaatcagctattgtgtgctatgtccttggtgctaacccaccattgtctgttcttgaaggctttgcaagaaggatttggagggacaaggtggacaagataggtatgatttcatatggtattttcctaattcgttttacaagtattaaggatagggatgagattct

SEQ ID NO: 45280 - DNA, 3228 bp, Cannabis sativa
ctataggcttcattccaacattttaaaggtaaactagagtgtgcaaatagagttaaaccagtttctacaatgtgtcaatgctttctttcaactacaccattttgttcatgagaatgaggacatgttactctatgaataatatcattactctctaagaggtttgtaaacgatctgaactccccaccccagtcatatttttattttatttttaaattaagttgaagtgcaatttgtgttttgaactttttaaaggtaggaagagcctcatcttttattttaagaacataaatctatgtgtacctaaaaagataaatccatgcgtacctagaataagcatcaacaacgcttatgtaataatatatataaatatatataatatatatatatagccattgaaagagtctataggggtaaagccccatagatcagtatgtaagagttgaagtggagttgtataaactgtttttgagatagaaaaatgtagtttatgatgctttccaagatagcaagcagtgcaaagataaaaatcaattttcttaatgttggatttttctattacagacataatagtggatttggatgggtagcctaacctattattccacaaagtaaattttgacataggtaaatttgaaatagaattaaaacattgaaagctaatgtcattactaggagttgaggagtgatgtgatgacttatcaacatgattaaggctggactgagatgaaagagtaaggtgataaaatttgtaaagtcttttttcaacattcccaaccaataaagttttcatattgacatgatctttgacacaacagtgataattatgatgcaattcaaagaagacgtggttatttttaggaaactaattaacactaataaggtttttagtgatagcatgtacatgaagaagattatgtaaatagagaggttgagaattgaaaggagatttaataggagaagaaccagtgggtataatacgcaatcctgagccatttttcatacatatggtttgaaccttggaattatttagcactttgcagattggtgacatctagagtgagatgatgagttgctccaaaatcagggtaccaactcgagtcattgactgtctcatgagtagcaagcacaacctgcatcttagcaacatttacagatccaccattgaatgattaaggactcaaggcgagtgaaaattttattgaatttgtagaaacacttgttgaccctttgaccttatttgtaacatagttgacattagggtttaggattgaaggatccacgaccaccaggacgtgtgccgcaaaaaccacctcgagaaggtcagaatggctgagagaaaggtggatagagtggaggaggaagaaattcataactgttgtacaaaggactaggataagatccaaacataggataaccaactcgaggaggaaaatgcatacatctaccaacattggatgttggaaaagatggaggagcagaggaagaaaattcaggttgggacaataaattctttgattgagctgcaagatttacttctggtttggcaatgttgtgtatagagtcattaatttcatttcacacttcttgagccatcagcaaacattcaaatttagcaacagaataagcatcttttcaaatcgagagtgaaattatgaatacactatagcttcgatatgatcttgagtggagagaacatggctgattgatgctagtgagtctacaagatgcttaatcttgagtagatagtcattaagagaacatgttagcttagttttgcaaagtttagtgcaaaattggccgatctttgcacgattttaagtagagtagtactcttcaagattggattggatctcagcagctatgttgcagccaaccattcaagtgagtatcttctcggacatcaaagataagagccaataaactagaaaactgtcctagatgtcatattcaatgaattcttcagaaattcaattgctgagttcatcttcagttgtgaggaattcaggtggaccacattttgtatcaagaaacttgataacaatggcttttgatggctacatagacttgatgacgccatggaagaaagttgttttcatcgagtttgacaaataacgcgtgattgaaagtgagattggttgtttttggcaactaattggaggaaagactttagagatttaagctagaattagccacggaggaatgagaagaccagtttaaatatttgatactatgttgaactagaagagcaagagagatcaaaaccaaaagtaaataaaaccagtgaattgtattgatctgaattattgattacactaattctataagttagcttttatatacaaagctaagtgaaaagaaattagttacaaaaaaaagttagttacaatcaagagtggaggtgagttggagtgacaacttattgtaacagaaaactaactaaagtacgtaactaatctttcatctaacaaggagtagtatcggtcctatgttatctcaatctttaagcaaaactaaaaattagagcccaataaaaaaatcaagttgccggaatctgaactctaactttcagttattacttcattcaaattactattaaggtgcaacatatatttagtaatatatgtactattttttattttaattctatttttgttattttaaaaatgtggtctgagtggtcctctcattttttttacttcaggatttccttgcatgtgagactctcaaataagaagtgagagctttttaaaattcgagtgtcttttttagtctaactaaaagtttggttagatactaaaatctagaaatatttttattttaatttgattaaaaaaaatttacttctctttacttatttttgttggtttgttgggaagaaatcaaatcagaattattctaaagttctattctattgtttagtttgaagtataaaaggttgtaaattttatactaccgtttgtggattagctatagaattggatgtttttaatttttttatgtcaggaaaataattttattttttttttctaaaggaaaaataatttttgttggagaaattcatttttcctttacaatttttgacttaataaagccaatgtctaattaagatttttatcataaatttaaacatcattcaaattatattttttgaatttttaaaattatttaaacatgacttaataaaaatttgaatattgaagagacacaatttaatacatgtaaaaattt

SEQ ID NO: 45281 - DNA, 1111 bp, Cannabis sativa
cttctcaatcaaacctgccacgtatgaaatccaaatcgatccaatcaaaatcctccacgtcatcaccggaccccacaagaaaatccagctagacatcttgagtgccactattactaaaccaaaccaaataccaaagcttctcaatcaaaccctaattctcttacagaaaatcaaaactcaaagagctttgaattcttctcgagccatgtccggaatcggaaacgaacaagctccgttcaccgccaacggaaacggcgtcgtttcaggtcacgaaaccatcaggttgagagtgaagcctagtaaggatcacaagccggacagttacgaagacttgcaacaccacctggaattcagtcccttgctcttcagctcgctcgagcggtatcttcctcagtctatgctcaatgacactcgtgaatctaagctcgggtatatgagtactatcttgcgtcgctactcgtctaatggcgaacgtgttcgtgtatgtagaatttccttccttctttcgttcattctttcttgtttgctcttgaattttttatttttggtttttagttctgtttggttaatgagaaaatggaatatcgtttaatgtttaatgtacattatcggacttgagaaattcgactcagcttttgtttgttagttcaagatttttctgtttggttactgagaaaatgaaaagaattaaatgagtttatgattgtgaggtggaatcttgtttgttgtttaattacaatgcgggacttgagaaattcgcttcagcttttgtttgttggttcaagatattattctcctaagtgagcgatttttttgtttggttactgagaaaatggttagaattaaatgagtttatgatcgtgaggtggaatctgctttgtagtttaatcattaatgtacattgccggacttgagaaatttgcttcagcttttgtttgttggttcaagatttttctcataagtgagcgattgagtttttggattagtcttttttgaataattcgcccctgtatttttttttttttaatttttgtttggttagtgagaaaatgaaaggaattaaatgagtttaatgtttaatgtacattgtttgttgcttgattcgagattt

SEQ ID NO: 45282 - DNA, 3393 bp, Cannabis sativa
agttcgtgtaattttagctcacggaccttaaattatgttacgccatgtcttcaaggtacaaaatactgaaagatagtatgagttggattcaagttattgaagtttaaacttccatcctagagctcccaaagtcaacctgggggcatggctagggtcccctcccaggtcgattgtaagctccgtgatgtcatcctctttgtcacgtaagctctccactttccatttggtttaggcaccagaataaggttagatacccaaaccgagtagaaagcttccctaatgaagtttttctcccgtagtctttcaactttttccttgagagctttggagcgctccttgtgaaggagcctgtgtttttgttgtacagacttgaagtttactttgtctatgttgagggcatgaaatacgacctgggttcaatctctatcgtgtcctcatgcgactaagcaaagatgtcttcatttctcttgaggcaagccatgagcatctcgctcaaaacctctgtcaggtttgttccaatcttgacaaccttggtcgggtgtactgtgttgagggaaagtttttgagttcctcaatttgaccaactctcgagtctatttccccaaaataggggtcaatgttgtcctcatcttgggtgcgtaggtgtcgtctccatcttttttgtagcttgggctccaaaggtctttgtcgtttctctagctttcgcgggagaggccttgctcgtccccctagtgccataacagaagaagagttcttgttcgtcccctttgatgctatagtaatagaggaagtcttcttggcaagtgaaaacagagcgttataacacttgtgggcagtcccttaatttttaaggagataatcaataccagtcatcattgggaacttgacggacaaatggtacactgataaaatgggtcgaaggtcgtagagggctagccttccaagcatcacattgtatggagacttcacatcaccactatgaacggtggtcttcttcggggtagtgccggtagtgagtggcagtttgatcttaccgcatggagcaatgttggttctgttgaaaccatacataagctatttgcatggctccaggtcttctaaggtcaaacccattctgattagtgcttgcttgaacatgatgtttgaaaatgctccttcgtcgatcatcaccctgtactttggctgacatgataggagtttgattctctgaaggtaataggttcacatctgtagcgttgagactttggaggatgttctgcaatctctaagactttggctcttagctcatgtcaaattaatcttgcataccttttaaggccttccttgagtttctggctaggcgagagcctctaatcacgatctctagcctgcctgcaattggcttaggctggagaggtgcattttcctcagttggagctttaggtcatacataccactgaagagcagcatgtttttgtctgatgagaaattctatctcgtccccaactgattacactcattagtgtcatgaccataattattgtggtagtgacaaaatttgttcatgtccctcttccttgactctttgaaaggaaaaggtttgcaatatgacaccgttgactatgtagccgtatagatctcctctcttggtgtcaaaataatggagtaggtggtaaagcgaggcccatactctcataagggcttgcccctagtcttgggctttattccattaggagagtttcctggcttaccaccattgttttctctcttccctccattcgatatgtactgcaccttagtagcaggggtttcagagtttagtgacttcttcttgccaccttttaagcctttggctcgggtgatggcttcttttagcttgataaagccatctgctctatataagaagtcattcgtggtgtatactgcctcgatacgaaggtcagaccacagaggactcatctccttgagtctagctacaagtgccattatccttgcatcctcgctaagacttttggccttaatggctgcctctaagaaccgttgaatgtagtctttgaggggatcgtcttcttgtcgcttgacatccaccaaatcattgggttcaatttcgcgttgttggaaaggatcaaattggttgccaaaagcatccactttccaagagacgattgatctaggagagagcttaagataccattgttgagctaggcctatcagtgtggcagggaagattttgcacctgacgtcgtctctcacaccttgtagatcagtctgcacttcaaagtagtgaatgtgagataacagatgttctttctcggtgtattgatgtcaggaagggttcttgaacttcaaagggataggaagagctttgattcattcaaatagcagtgagcgccactctctatcaagtttgaattcaaataacttaggagtcgtgatccccttcactaaagttgccaaggtatatatcaaattatgcccatttgaccccatgagtgatggtctgcatcctagttggaggtttttttacccgagtagggtctcttctagaagttcccacttccactgtccttttcttggtcaagaggtcacgcaggactcttggtcttccaagtcgatcttgcactttggtcaacttgggtttttttgttgtctcctgaccacagggtcatgaaggcaacactggtgaagtctccggaatgaaatctagattgtctcgagacgacccgctataggagtgtccatttagaccattgtagtggctatttccctcaaagtagtcttcaataggatcacaagtgtgaagagaattgaactggttgttcaagttcaactccactccatgtactttagggaagtactcataatgttggccatcggggccatgggcaaagtaacaacataattagccctttcatattagaagcatttttgagtgtgaagtggtttgttggtccttacacgtcaaatctcgtagcctccgatttcaaagtagtgtctcatactacctcttttagtttcggtagcaggtccctttccctttgtagggtctcggggcttggtgtcatgagattatcgagaaggacttggtggagttctggttgttttcttggtgttgcaaggttgttcaacagcaagtggaggtcccattagttggcgcccacgagcttgattcttttcgggctcttaatcaaaggtactttccctctaaaaattctccatgcctggtgtttgcttagtgcctgctcagttaccaggtgtggtagtggcattctgagcattaagggtctcctcttgagcataaggtcccacgtgaccagttggttgacatggagtctctctcagcaactcgaaaagacccatatggggagtagtttcgcgattagagcaataagcttctctaatctattgagacaa

SEQ ID NO: 45283 - DNA, 1249 bp, Cannabis sativa
gttcctatattttatatataataatgtgtaggaacttagctggtgaagatctatcaaatttgggtatgaaagagttaagacaactggaacgacagcttaagattggggttgaacgagttcgctgcaagaaggtaggtatattattacattttctaataatgaattaataaagaaaaaaaaaattatatgtataattagttataaaccataaacttatttacatataagaaagatagctaggaatttgttttactttttatgttattaattattgaattaattagcttatataataattatgaccgattgacagagaaggatcgtatctgaacacatcaacttcctcaaaagacgggtaagatatataactaattttattactatatcatattgcttatcaaataattatattaatataatatcacaaaagttaatttcttaaattgataatatatatagttacttatagttataatttgtgttaacatgtactatatatgattccatataatatatgtttgacgaattattattatcttgagagaataaatattcattaaagttgtgataatatataatttttattaatattttttttgaacagtaatctttattaatatttgatggatataagaatacatttcatgagtttttaacgagctaaaggaaacaatatttagggagagtatggtttgataatacttttattttttatttttgtgttctgtaattacttttaattttaaattttaaaaataaaaataaaaatgttttgtaaattttattttttgtttttgtttttattttagttaagtgtgggtccaaatcaggatttggagttgagtttaagtctagggtcggggctgaagtttgggttcaggtttcaaactccaaaatattgatgaaaagaaaataattttaaactatataattaaaaaaaaaaatgtgtttaaaaaaatttaaaaaagtaattttttttttattttcaaaatttttaaaattatgattctcatgtgaaaaatgtatagaacacactttctaaaagtattctgacttttttaattaaaaaaataaaaaattaattaaaaaaagtattacaaaatgcatcctaattaccaattaagtttgtatatattaatttcaacttattatagtctaataattttagctagaatcttactcataatacatataaatatatatttagattaagcaataaatcttaaaataataacaaaaatgaccgttt

SEQ ID NO: 45284 - DNA, 906 bp, Cannabis sativa
attattttgattataataaatattattttcactaaaataatatatttctctctttcatatgacttatgaattgttatcttaaattttgtctatctgatgtggcatgtccagataagccaagattgaggacatgtggaatatagccttgtcaatagcagacaaagtacccttacaatgcatgacaaaaccgtcagcgagaggagttaagcaagccatcaagaagttggataaaaatgtttggccagccaaagagagtggataggtcagccaggaggagcttgtatggccggccagagtttgagcacaagctggccagcaaaaggtgactgttagaccaatggacccgtttgaccaaggacacctaacctttgcaaggaaagttgtacaaaggttgaccaacacatggaaaggctggccaacacttgccaaagctggcaggaacatgacttgctaaaccctggtaagaacatgacctatcagacccctagtaggagcatggccggccagaccctggtaggaacatgacctactgaatccttacaggaacatggccggccagacccttataggcacatggctggccagaccccagcctacacttggtgcgcaaccttcatcagagacagcaagctaagctacaatttgggcttcaataactcacggatataagggagaaatatcaattattcctatattcttgagagataattaacatatttactatttattatgtaaataatactttatagttcctattttttagggatattaggttattatcttgaggtaggctctcctatataaagagcatctaattctctaagtctaagaagctccctaaagctctcaagctctaagtctgaaacgctaactctctctctccctctcttctacaagagaagcaaa

SEQ ID NO: 45285 - DNA, 718 bp, Cannabis sativa
tttttgaaatgtatgattatatatatgtgacaggtgtcatatatgattctacaaatggtatcgcctgtaactcatgcagtaggaaactgtgtaaagcgtgtggtgctcatagtatcctcagtcatcttctttcaaacacctatttcacctgttaactctcttggtatatgactcacatacgtgtatactaatatattgacttttatatattcatatctaagagtgtttttgtgatcataattgtaggaactgctgtggctcttgctggagtcttcttatactcgagagcaaaacgaattaagccaaactcaaaagttgtataagctattatgactgaattatatataaaagaaaagttgaaaaaaaaactatagcttcactttccctaaccgatcgatattttgtaaagaaatgtttttgttctcaaatctttatgtctttaattggtttttgttttagttgaaaaggagaaatgttaattaattaaaatgagaacaccaaataataataatttcatgttgaagtgtggtgataaattataatttgtaatcgatcatacactttatcactttaacgtaaaccaattaattatagtttgaagtgatgcattatcttaagaggaagactaaaggcaaaaaaagttttatggctctcaagctagatatgagtaaggtctatgactgtgtggagtggaattatcttaggctcgttatggctc

SEQ ID NO: 45286 - DNA, 1099 bp, Cannabis sativa
  modified_base (35)..(44): a, c, t, g, unknown or other
cgctcttccgatcttaatttatttattttaaatannnnnnnnnnattttttataatattttaataagtacgtggaccactaaaaatttgtcatgtgcacatttgtgtagacgtggatagtcaaatgtggtacttaattgaaatttttggatagaagtgtgtagagcaaaatggaacttgaatttagtaagttttgccgtcaaaattttaatttttgtgattaagtattaaaaatttgaaattcatatagtttagccgccaatattcctatgcataatttaatatatagaaaaaatcacataaaatttaattttttgttttaaaaaaaataaacgagttgacccgaccaacccaaatttacatactacgaacttgcgagccccaattatttcacggatagagtttgggtataactttttaaacccgaaactcaatatgtttaatcttatttatgagtttatatatcacaagatgaatttggacatgatcgcggtcggtattcagtattaggaggtaggactgaatgcgcgcatgaaacactccctcactcaactaatcaaatcttcttcttctaataacaataataataaagaaaaacagactaaaatttaataacgtaattaccatcgaaataaaataagagagctttaatggttgaaattcatatttcaaagccaaatttccaaataaataaataaataaataaataaaaataaaaataaaaatggtttcttgaaataaattggaagatatatatatatattgaagttgcatcatcgaaccaaaaatggaggccccctactgccctgcttcttcccagcacctaaacccgagccctagctattgtcttttactctaatggcatcttcttccttctctctcaggcattttcctgcctctctctactctgaattcaccgacgttgtaagcctcttctcacactctaattttgctttttgtttgcctacatagaaaatgaaaatgtaggaacaaaccaatgttatgctgcgcaatgtcatgctactgtgtatatacataggagttgcattcttagtatagttattatacaagtggtttaatggtttatttattttgcttta

SEQ ID NO: 45287 - DNA, 656 bp, Cannabis sativa
taaataaaaagttgacctataaccaaattataatcacaacacactatacataaggaacacaacataatatcatcaataaaatcataacataaacacaaaacaagaaaatagatctagaggattaggttagaaatgctcattttagtggtgccctaattcatccaaaaggtcgggtatagagaatagggcgatgtgtttgcgtgattgaaaagggcaagcttttagaacaaaatcccaatttaaatcacttatacatcacaattgttgccattacatatatattatataacatacttttcggtctaactttatttaatgcaatgatatcacgtttattttcaaaaaaaaaaaaaaaatataacatactttcctcccacatcaattttgggaagaaaatttgagaatgtgaaccctacatattctatgtaataataagataactaataaatttggagagaatatattatatgggtgggtggggattgcggttgtaataaaattgggtgagcttggttataattatgaataaattaatatgtggtgaagttttatataatcgtcgtcatctatattttattcaccacatatagtgtttcattaaacccccacaacccaaatttctgcgggtaaacccccaaaaccacgaaactgttagc

SEQ ID NO: 45288 - DNA, 1506 bp, Cannabis sativa
aaaactatattcatattattttttttttattattttctttcctaaaaacaaaaaccattggttttttaataaaaaaaccattgtgaatcagatctagaaacatatacattttctttgatggttttttcacgagaaaagttttcttataggtgcagaattagtttgggaactttttttggcctgagaacttccttaattggatttcttagagatgatgggttctgcttccacccacttgttgaagtaatcaacaatggctatgacatatttgagtcatccttttctagtcgtaagaaaacctactagatcaattctccaaacaacaaaaggcgatctattgttcataatggcaatttctattggtggagctcgtgggaccttgacttagcgctgccattgttcgcacttacggacatactcgatgcaatcttttttcataattggtcaaaattatccctattgaagaattttcttggacaagcttggtctagatgtgttgtctccgcaaaaatcgtcgcgaacttcatgaatgacagcgattatctctgttctggctatgtatctcaaatatggaacggacaaccccctgcgataaagtcttccatctagaatgacatatctgagagcttgatattgaatcttttgggcagaatccctgtcggtcgaaagctctccaaaactcaaaaatcagaagattgggcctttccaggagcttgaatgatcgatgacctttacccttgtgtttcaatgcttagggagttcaggtggtcaatgggcatgttgccaatttttctaacatattcgcaaatgaattctaatcccttgggatctagcaaaagttatatctcttgaaatgttgcaatagttctttagatcgagacacgtagacaaccattctttcacctttggtctgatactcttcgaatatttgatttatgactagccaggagttgctgtatacttcaatattatgagctcctacttccttggctagttgtaggccagccatcatggcttcatgctctgctttattgttggaggctgggaattcgaagcgaagagcactctggagctagtgtccctgtggagagaccaagattattcctactctagcgctcttttcattcgacgctccatcaacataaactttctagaacagtagtctagaactggctcgtccgaatcatcattcatcctagtgcacttaaccatgaaatttgctaaggcatgacctttgatggaaactcgaggctgatattgaatgtcaaattgactgagctccacaacacattttagtaaccttccaaatgactccggtttttgtaaaacctggcggagagggtggttaattaacgccttaatgtcatgggcttgaaagtaggatcacaactttcacaagaaaattagcaagcaaaaggacaatttctctatcataggatatctagactctgcgcccactaatcttttgcttatgtattacaacggaagttggaccttcccttcttc

SEQ ID NO: 45289 - DNA, 1010 bp, Cannabis sativa
ctttgttgaaagttaaagcccataaaataaaggacaacaatatgcattcatcctttggattttctatgaaaacacaacctcttaattcagtagaatactaatgggtctagcctttaccaagaaaagaaaagaataataataaaaaaagcttcttgtgcctgtataaattaataatgacagaaataaaaaatgataattaaaaaaaactcatgatttaaacagtaagatttattagtgaacacaataccgataatgcacaacagaataacaactgaggcacccacagaaacttctattgtacctgatagcgaagatttgctgagattccaagaaagcccgagtaaacaacagctgtttttagtattggagatcttttagtttgttctatattgacaacttctggattaagaactttgcgaaatccatacagaacatttgagaaggcaacagccccaatactggaaacgaatccaacactagcaagctttaaaccaccaaaaacaactgatgcaattctatgattgatattccagtactttccaacaggactcttttgaaatgcattatcaggaatggatccaaggaggtctgtaatagtgtccatgctatcaaggccatttatttcctttgctggcgaaaggaatgatagagttggcgcaggaagccatactgtaaaaaaatcaacaactattccccttacagtatctgtaataacgtaatccaactcttgaaagaaattttctttccgcttttcgtattgtgctataagagctgtagttatagagatagactcttctatagctaatctgtgcaaaaatttaggatctgccaacagtctttccctgaaaccctgcatagaagattaaaagtaagtcaccttatgtgctataaagcactacatctatcatatcaaatttaaaccatgaacacagtttagacatgcgcaggtttttctttcacagaacacaatttaacttcaaaatcacatacacaagtgacttttgttttca

SEQ ID NO: 45290 - DNA, 4288 bp, Cannabis sativa
atcacttctctgcatactcaaaattttgtaaataacttgagggaaaggaagattcatatttttcttaatacctttccgaaaactaatgatttgaccatagatgactgtggccaaatcaatatcatgcctagttctaaccttgtacaagaatgaggccatatcaaaggagatggttgcagtgtgagaagtcggtttcaatgtagcaaacttgtgaagcacgaaatacatgaaagtgagattgtgaccgagataacaaaattttgaggtcacaccatcttttgatccacaatctcaataagaacctcatccttgtcaagaggttcactctcctcttcatctggaatagcaagagaaggaaggtgcaaggcttttgctacatcttgtggagaaaaagagaaccaatgatctctcacaaacactttacaaaatattgtggagttagagtgaacaacttcattattgagatttgcatagaactctttaacagtcctatctacagaactagaaaaattaaccaaaaaacctgcccattttctctcttaaagaatgttaagaacaccatatggacgatgatcattcaaaatataatttctttcaacaagaaattttctttgcgaatgaataaccatgtcacgagcattatcattgtagcaaaatagagaagaatgtgttttaaagtgtacaactttcatcctttgataagaaataggttcagtgactggtttcttgcctttaccctttgaggacaatggtgaaggaactggtgcaggtgtagatactgcttctggaacaagaacagcaacatcttcagactcagactcatcagattctagtacagagtcaacacaagcaagaaaggattcatcagactcatcagtcttggactcagattcttcttcctcaagatggagatggaggataagcctttaatttcttctttgcagcagacgcagaagaagacggagaagatgatgtgcccaaaattaattttctttttggggctaactcatttttctttgatcgacttggcttcataggaaatttgagaagcctaacaacaacaccaacaaccttcgacgaagatgaactagatttatcctttgccctagccactaccgaaggttaaattgaaaaagagccaacattttttactcaagatggcgccaccacttcagatggtggtgcattgactccaatatctaaagtaatgtcgggaaacaccattggatgctcattggagagagaaaaaaccttcttttaagccttggtcttggtggtgcgaccaacagaggccatcagagtagttgcacgcgacagtgtagtcgaaactgaagccaaaggtgatggagatggtcggacttgagatggggcaggagccttggatgatgatcctatttgggtcttcaccatttttctctttgcagaaaaaaattgaaactcaaaaacactcacatacaattttgtgatagaaacacaatgaaaaagaagagagtaagaaatcgtgtagacaaaaaaaaaaaaaagaaaaaaaaaaagccaaagcacaacacctcacaagatcagccaagaaaataccccttttaaaaaagattgatttgcaacttaaaagggaaacatgaaaaaaatctctttttttttttattcagaaaagagaaaaaaagaatccacaaaaatattatccattaaaccctacacgatcagcccaagaaaaacttccccttttttagaaaaatcaaattaaaatggcaacaaagataactaattgatgacaaatattaaacataccataaaaagattagttaacaaaaataaatgccttgatgaccaagaatattttaaaataaataaataaaatgctaattttcaccaaatctacaattaatttggcccttctttaaattctttgattttttttaaatgataaacgagaaagacaaaatcccaaaaaaaattacctaagatcaatgagcattaccctgtaaaagaaataagacaagcgaaataaaaatagatgttagtgtatgatagagataaaaatacttgtgatttttgaaaaaatagaaagaatattcgagtaaaaaaaagcacaattcagtcacaaacacatattctttaaaaaaaaaatcaatcagcatgtaagagtctgacacacattttatttttaaacaaacggtgtagtatttttcttgtaatgtttgaagcataaatgtgtgatagtgtatgcaagagaacattacccatttgacaagaaaatctttttctaaatgtaaaatttataacccatgaagacgttgtcacactacactagtggtagcccttttctatggtagtgtatcctcttcataactccaaattacaatgtaccaacttactcaaaagacggctttcacccgctgatgcaagtagctctattcttacataggagcttcaaacaatgatacacaaaggatgctcaaacattaactattgattgattgactcggatatgtttaggaggaattgattattttttatctcaagtaaaatctctaaaatttgaaaaacacaagtcaatttatctatcagaacacaaaacaatattttcaataagattgccagatttcttaaactagaaataaacatatttgatcaggcatcaaaaataaacttttgacaattaaagagaataacccccaaatatttttggaagaaataaaagcaaaccgaatcaagagccttagtgaaaatgtcaacaatttatttatgtgtttcaatgtattccaacataagaaataatgacgaatgtcaatatgtttagttcgtgaatgttgcatagggttttttaaaatatttattgcactagtattatcacaaaagatagttaaagtatcaagatcaaacccataatccatcatcatttgcttcatccacaaaagctgagcacaacaacttccagcagcaatgtattcggcctcatcagttgagagagagattgagttttgtttcttgttgtgccatgaaactaaattgtttcccaagtagaaacaacctccactggtgattttcttgtcgttagtgttacatgcccaatcatcactaaaacacacaagatcagcattagtttcctttgaataccaaagaccataatcaacaatcccatgaacataacaaatgattcttttaatacctattacatgagactccatgggattttcttggtacctggcacacacaccaacactataactcaagtcaagtctactagtagtaagataaagaagactaccaatcatgctcctatatagtgtaggatcaactttgacaccattctcatctttgaacaacttcacagttgttcccattggagttttggcaatctttgaactttcaagtccaaactttttcaccaaattcaaagcatatttgctttgagaaacaaatataccatcatctaactgcttgacttgtaaacccaaaaagtagttcaactctcccaccatacccatcttacattcctatttcatctgtttcataaaaacctacacctcattattagaagtagaaccaaaaacaatatcatctacatagatctgaggaatgattatgttagatttattatttttgataaatagagttttatctactcctcccatcttgtaaccatgagaagctagaaactgagttagtctctcataccaagcccgaggggcttgtttcaacccataaagagctttctccaatttgtaaacatgatcaggtgcatgaagctcctcaaatcccttaggttgttcaacatagacttcctcattcaagattccattgagaaacgctgatttgacatccatttgaaataacttgaaaccaatcaaacaagcaatacacaataataatctaattgttttaagtctagcaacaggtgcaaaagttccatcaaagtctattccttctacttgtatatacccttgtgccacaagtcttttgttattccaaaaaatcgtgccaaaatcatcaatttttttcttgtaaatttattttgtaccaataatattgatatataatggtctaggtacaagaattcgcactttgtttctaaaaaattgctctaactcttgaggcatatctttaatccaaaattcatcagttaaatcttctttcacatttttaggttcaatcaaagataaaaaaaaaaaaaacaaacaaacaaacaaacaaattgagcaacactactaaaccttcttcttgttaccaagccatcttttgaatttccaagaattaaatccgttggatgattcaatttaactctgcttga

SEQ ID NO: 45291 - DNA, 2453 bp, Cannabis sativa
attttattgaacacccctaatgtgtgcaaactgaataaatccatctatggcttaaaacaagctcctcgagcttggtttgacaagctcaaacaagcattacttcagtggggtttccataattaaagagcagacacatccttattttttctcaaaagacaatgcaaactcactcttttactcatctatgttgatgacatacttctcacaagtgaagacatcaactacattcatcaattgatatcccagctacaccagcagtttgcactcaaaaaccttggaccagtcaggtactttttgggatttgaagctacaagaacctccactgatctctatctcactcagcccaaatataccacagatttattgactcgtacaaacatggttgctgttgctcccacaccaacacctatgtgtcccaacagcaaacttgcagccacaatgggtactcctatggacaatcccacactctatcgtagtgtgattggagctctccaatacctaaccttgaccagtcctgacatctcctttgttgttattaagttatctcaatttctgaaaactcccacagatgaacactggtctgcctgtagctccttagatacctggctgacatagtcgattatggcctacactttaaagcagcatctcctcccactcttgttgcctatactgatgctgattgagcaagctcaattgatgacagacgatcgacttctggttattgtatatatctgggcaacaatttgatcatgtggagctctagaaagcaaactgtagtggctcgctcaagcacaaaatttgaatgtcgtgtcattgctcttgctactactgaactaacttggattcaatccctgttcactaagattggaatgcaagctctcaaatgtcatgtcctctggtgtgacaatcttggtgccacttcttttgtatccaatcgcgtatttcatcaaaggacgaaacatattgaagtggatctccacttcattcgtgacagggtccttgctcaagaacttgacatcagacacgtttctgccactcatcaaatagttgacattctaactaagcctcttcctcaactttagttcgacacttttagagacaacacttagggaacctagtgtaacttgaagggggtgttagagttagttaggaattcggttagttagttactttctgttaagtcggttatatttggcattgtaatactgtacaagttctcaaaatatataatgcataactctactcaattcttaggcagagcttctctttcaatattctctatttctctcttttgtttctgctcttacaaaaataactcaagcccattgtgttgccaatgaggttttttttcttcatgaaaatcttagttttgatgccctgttgtgctaggaattgagatccatcgatttctgcagactttaatgtttcttatctaagaaaattgtgaaagaaaaataaaaaagtcatgtttaaatctattctaaatgtataaattaatacattaagggttcgtttggtacgccgtattataccgtattgtattgtatagtactatattgaattatattttatgcaatatttttatataaaattatatgtgttattaacttttattaatacctaaatatataatattttagtataaattaaagtttaacatagtattataaaaaatatgatatataatctcattcgatataatacaatataatacaatacaacttaatacgacgttataaataagtcatatcattcaatcataaaataatatttaagttgatagaataagatatgagaaagaaaaaaggaaaaagggaaaatgttttgtaattctttaagtatggtgtcacacgaaatatagaagctaatattatgttactttagttattttttatatttacttttgagttgaaagttgtttatttatgtttttaacgtaataacgttttatcaaaatcaatggtaattaatctttagttttgttattgaatcatttatatgtctattttttttttcattttttaatggagttcaagtaattgttcatttaattttgtctttaagaatttttctcctatcaaaattctttgttaatttactgttatagttattgtttttcaattatttgatatctttactcaatataattttgttggtgtgatcggtagtttattttatatatgctatagtgcatttatagaatcggttttgttactatccatcttgattaatagtaatatacttttaagtattagtgattaaagtttcattaatatttgatgatctttgaaactaatgttaatatttatggtggacagtttttgggtaccagtggtatctagtacttctagacatattgcaatgattggctagtgatactctctaaaaattattatattaaattgagaaatgctaaagggcaccagtggtgccttgcaccctcctatgtgtca

SEQ ID NO: 45292 - DNA, 3316 bp, Cannabis sativa
  modified_base (1420)..(1422): a, c, t, g, unknown or other
gtcgtcggttatataatattatgctgaaaaaagggcctctaaaggcttggtttgtagtagtgccacctcctttagtatttttcttatcatctctaatggataatgtataatttgagctaaaaaaattgaaccaatattatatttaacccaaattttataatagtgctctaatgcattagagtaaaattattcatttttcaatagaaatgtataaaaaaaaaatatcaacagaaaaattacatttttattaaaagtatagaaaaattctatcaaatatataaataaaaatgtaaaaaatgattaattacattaataagtggcaaaagagtaaataaaaataaaacatttattgtgtctaaaatttagttcatgctatattttgttccaaatttgacataatttctagcatgtgctaaatttcgactacattatataccaccattatagtttatttttataacgatggactaaaatatgtatatacacaacaattttagctctccattggagatgtatatgtatgcatccttattcattttgacgtagtgattagaatcactcatgaatttacaatgcagatatcttcaaatcgcgcaagaacctcttctaacaaagatagcttatcgtctaaccggttttggaagattcccgaacaattcatttcctcaattcgtgtccatttcaatgccttggttgggtgattctctatttcctaaggtattatagttccaattagtaatagcagaaccttaagttggaggttcagatttcgcgaattagggttttgacgtgtgatttacccagttatgttatgtgattagggcatccatctagcacgagactttccgttcaggtcggccaactcacttgaattaagaaacgaggtaagaatagtgtataacatgtgatatatatgcgaatgtatgtatgtgtgaaatatatgtgcatgcttgttgtgatttgtacactaccaacacttgtacaatagtggtacagagtacattggtaaagtgtacaatgtttgaagagtatattacagtgctaccagcactagtacgagtaggtacgtggtgtacgcggtacaacacttagcagtactcggggtatggttcataccctacctacactggtatgatggtggtacttagtgctgtggtacaatggtacatggtcgtatcttagttaagagcgttcttactcatttgtttagccttgtaaataggtgtatgcgtgcctagatacaagttgataatatgtgatatgttataagtataagcttttgcttttctcttactgagtgtcgatgtcgactcacagttctactttcatgtgtagataaaggaaagccgaaggctgaacagaagtgagcttgagctaggatgaggttatccatgtcatggcagcgcgacctggagtgttnnntctcgggacatctggggttttcattttgtagtcattgtacgacctgacttttgtatttggactattttgtaaaaagtttaacaaacggaatcccgacacttgtaaatgtttatataaagtttataaagtttcatagttaattctgtttttaaatttgacacgatttttaagaaaatactttgattagcaaagatagcacttcggttgaaaaattacggtagcgtcccttagtacgtattagggcgttacatatgaatatatattcatctgttttattatatttcagttaattatatgatgaatattatgtttgcgtaatcttttagatatatgtaaaattttatcgaggatgcataatctttaagatatatgtataatttatatatattctctatcgtataataatttatttaattttctgatttttgttatttatttttctattattctttttttttggtaaatcagtgtaatgcattactctaaatatctcttttacatcgtaataccatctccaatttgaagacctatatatattttttctagctatacaatatttctctataagcctttctattatattttgtgctcctataactttacaatatttgaaaaccattctttatcacctgtagagacatttttaggccaaacatggatgattcttctcttaacttcttctttagtcaggtaggtcacttgtgtctctttcagcacctttgaattccacagcaggccgttcctcgatctccatacctggtatacaagcgcaaccataacaacatacaatacttctttcctgaatcgacttagttttgagcgctctatccatcttagtatcccattcacttctgttgactccatcatccaatccaaccactctttaatctgcattaaacattgtagagaaaaggggcaggagaaaaagggtcttagtttctggttgttgccagcataacaagcagtgatcttcaacaatgatattaaattgtttcagtctttcccttgttctgagtctgtcctggattgcagtccacaaaacaaagtatggatccatactttatggctccaatttactttcctttgaggaggacagacttgtattgtgtgtttatgaactgttgtacattcattagagtatttttttattatttaaatatataaagatataatatatttaaatgatgtagagagaaatagaaaaaaaattaatgtatgtaaaagtatgaattaaaatatatagaaaaaatagggctttggtgatgtattatttgtgaaggatatagaattaaaatagaatctattgtgtatgagatatcaaatatttaatagctaaaaagacaaaaatataaaggttaaaaaatccatccaatgaatgatgtacagaaggatttataaacttaacatcttttatatatatgcacaacgttaattcttaggttaattgtttattacttttatagtgtcttttgttgatttttgtgtaaaattatatacatatagaatataatatatataatatttgattattttttattattaatctattattaaaatgatgttgagagaaatttaaaagtgtggtttatggtatataatgtaagagtgtgaggtacaatttaataaaaagaaaaagtttcaataaggtaatattttaaagaagaaggtagaagagtacaaactaatatgatatatcaaatgtttaaaaggacgtaacaaattgatataatgatgtattttttattttttattttaaaaaagatatcaatataaatctcagttaacatttttcattattcatgactcaaccttttatataaccttttatatgtagttgttataatattacggggaattactttatatactgttttattattagtttttttttttt

SEQ ID NO: 45293 - DNA, 2290 bp, Cannabis sativa
cttatttacaggtaattattgctcaacctgtatatttatatttatactagttttaatagtgtgacaataacactttttacccttttatttttcatgtactaactaagaagatgaaattaatctactttagtataaaacatttacatataaatttaatttacttaatttgctatgtaaatatcaattatcttagattaaaattttaagtataatttattcgaaaagaaaaattaagtatgttatgtaaataaaaaaattacaaaataatcagagtacgtttatcaattaattgtcaaaattttatgaaattttcttagaaaaaaaaaaaaaaaacaaaatttagaaaaaaattacaaaaataaaatcaaaataaatatttaaattaatataaaataatgtgtgaaaaaaaatttaaatgtattaagagtaatttttaaaagttattttaagtttatttatttttaaataataatgtgtacttctcattttatggggtgtaaataaaactcctcttcaataaaacgtataaccttttaatggatttccatctatatcccttttttttttattgttattatgcttcttttatttattttttttttttagggtaagggtctttatttattcttttgctcacaaaatgataaataaatagggaaattttaaaaaaatttgtaaaaattgtactaaaaacatgataaaagtaggaatacatatttttcctatagtgataggactctctggggacccgccccaaataggaaggaaatttccaatctaaagggaaacggggcggggacggaaattattttttgtctccgaatgttaaacgaggaggggacggggatgacacttcctgctcaaacagggacccgtagtattttattatatatttctaataatattttataatttataatttatgtttatatttttttagtatattagtatcctttttatgaattttatgttgtgttttgaataataatcagtttattaaatagtaattaatgtgtaatattttaatttttatgtagtttaatatgtttatatattgaaatttttattataaactttatttttttattacgggatctcccactccgtccccgttcctattaggggattttccgccccatacttgatgaaaaataagcaaggattaggattaaaatccttaacggggatggggacaggaggagcactccccactaatttcccgtacgtgtatccctaactacaatagatcctctaaaaccatctttcattttaaagtttctttaaaatacaatattcgtgctctacatttatagaacactatttatttctctaaatatatatatttttttagattttaataattattttttttatgaggatatgcgtatatattaatattatatatttgaaataaataaaatataataaaattttaaaaaataagattttggtgatgtattttaaagaagggggtgtatggtgtaatgtaaaagtatattgtaaaataataaaaaaaaaaaaggttttaatgatgtattttaaaaaatagaataaagaaactcttgggagtgttctatatgtaatagtaacaaacaatcttctactattatatttatttccaatctcattcttgtacttttatacttattactttcacttagcttaactaattaatatgaactttaatttactttaagaaaattgacatttagctttatttaatgtaacatcaatcaatgtatgcttataatttcttaagtaatttattgttatttttaagttgataaaaagtttcatcaaatctcacgaacatatttatattataattatttttttggacaaatatttaaattataattatatataattaggtacaatatatatatatatatatatatatattcaaaatactgaaaatttctgaatacaaatacatccatcaagttaaaaatatattttttaaaatatatatgacaaattattttataagcatcaaaattctttttaaaaatttataaaaatgggaagtacatgccttgcatgtacattcctactagtaatcataaaaactaaagagtaaataactaaacaaatagtttctttttctttcaataaatgacttcaactatcaaaaaaaaaaaaaaaactaaacaaataataattgaatacattaaacatgttaaattatggttgcttagatactttttaggatatactagattaaagttacgtgcctcgccacgtaaaatttatttttagttaaattttagtgatttttttttttaaaaaa

SEQ ID NO: 45294 - DNA, 2772 bp, Cannabis sativa
  modified_base (45)..(81): a, c, t, g, unknown or other
  modified_base (2738)..(2741): a, c, t, g, unknown or other
cttttatgcgtttttatttatcgtattagaagttcatatttaggnnnnnnnnnnnnnnnnnnnnnnnnnnnnnnnnnnnnnctggtaaaattaattccaacagttacttcatgaagtgatatatttggcttgtctttttgtgcgattgcttgagtgttattgtttaatcatgttatcttgtgatgtagttatatgtttgttatatattttattatttacttttcttgttgagtctttgtgattcacgagtgctttgtagtgccagtaagggcaaaggaaaactagggcaaccatgagatgatagttttctcaagaaaatgtacatattaacttattggcttgtgtagtcgagttgtcaggagttattttgggctgtacctaatgtgtattttgatttaattttgtatatagctctttttgtaaaacttttgtaataggggatccccaaaacaaattttcagcaatgtcatcctattcgttgctatagttttatcttagtgaagttttttactactatcacagatttgactaaatagttaatctaatattactaaattatgttccaaaaacacacacgtgacgtcgctattaattagggtgttatagttagaatatgttttaagcttaatttgttttagctagtgagttgttgtagagtgtttgttgttggtttgttgagagcttcaagtttgagttcatggaaatcaagcttaagctctaatgaaaaatttagattgtggatctaattgtagtttctattggttaggatgtgttatatggatgacattgagctgttctttgaagtttggtaggatttggttgagtttggaaaggttggagatgtttgaaactcagagttcttgcttctagcaaaaaacaacagactatttatgggaaaacgatattttgcctattgccacgctatttattaatagggaaacttctggttatggatttaagatctaaaacaggttagatcaagttttgatcaatttatcattgttgtgacatagggtcgagatcatctggcatttctccactgaggttggccagcatgcatgagtttggattaaaggtaagaaaagtataattttactacatagcatgtcctattgggatgcaattattattgtttataagatacaattattatcatttttataagacacagttattactgttatgtgagaaaaagtcatggctataaatggaaactatttttaggtttcttacatgttagttatctcattaggtaatgacaatgacatatggatgccgagattggtatcagggttatcttataagacaacaacatttatgtttcaatgtcagattaggagttaattagggttgtcttactagacaatgaagaatttgattactttataaaataacaggtatgacttgttattatagacaagtatgacttgttatattagacaagtacttctgtattattaaatatttatatatttgtaaatatctgattgtgattatttgagtttgaattgatattatttgtcatctaatttgagatattatgttatttttttttactaagtctttgtgactcacgggtgctatgttgtgcaggtaagggttagaaaatgtttgggaagccatgagtcaagaatcttctccaacaaatgtacataccagcttatccgacaagtggagccaagttgtcaagattcatattttacgatgtttagtactttgatgtgttttattaaaaataatgtaatggcatcttttgtaatattttaaaaggggagtctccatcttaaaagtgttatatcaagaaatttaatatttcaaaattagacagaaagatttaaattaaatcacaattttacttaaaccgttagtttattagtataaactaatttgtaaaagcacacacgtggcgtccctaggaaccattaactttcactttgacctctttttttttcaagaatagaaatacaagtaccttgaatacgataactataaatcgaaggtcgcatgtacttgcacttacactatcattgcaaaccttaatgtctgaacaatgtatttgaatattgctaagaaaatatttaatgaactattattaaactgataaacaatgaattgtagagtttgaggttatttttgttagaaaccattgctttaaatatttcaatatttttatgtaacaactataaacaaacggtaacactacatgcaagtaagtgacacaaataagatacaaaatattattttctaatcgattagacaattggttatagcgcaatctgattaaagaataaaaattaaataattttgtagcaaacctatcaaatatgatatcttaatcgtattaataatattgtatctaaaaattggtattgcaattttgtatcttcaaattcttattactgtgctttggcttattattgtaatgttcaccaaaatatatattgaccaaaatgtctccattccttgatcaaattgttcaaaattggttttattttctgaagttttgaaatttcggttatggacagtcaattattagaaatctataaagaaaatgaaatacaacaggaagttcataatacaggcacatcaactaatatttaatataatacattttttgtaagaaaactattatacaaattgaaaacaatgaataatctccccttgttattataaacaaacttaccataatagagttttctatatatgagtcctgcatttaggggtgtgcataaatcgannnnatccaatgagaaccgaccgatccaattacaa

SEQ ID NO: 45295 - DNA, 1737 bp, Cannabis sativa
attttattaataataattgatatttaatagtaatatccaactaaaattacatttataaacaaaactaaaggaaaaaaaaagacaaataatgagattaagtatataaaagaaagataaaattgagttttacggcaaataaccaatttatccgaaaatgaaatggttgagtgagattcacattcacaatggaaagtaaacagtacaaagaagaatgaaaggaagccgtgtggggccaagcaatgtctaccaagtaccaaccaaaggagagtaacagtaatacatattctgtctcaaacacaggttttttcattcaaaaaaatcttttcctgctctcttataaactctcttctcctctcctgccactcttaccttaattctcatcaaaacccaaaaatacaatagaaaaacataacttccctgccctttcttacacacccaaaagtctctcaaactcaacaacgccttctgctactttcacaggttgacatcttcttggatcatcatctgttctacgccttcgtccttccacgctcgctccctccctccctcttacttttattaactttcatataattgattcagtttcagatatttaagatgggttactgtaaacacgacactttttcgtatccgattctatttttggatcaatcggattagatttatatcgaatcccccagattctttttcttttacacaagtctctcttttttttaatccttgactattattcggatctgggtattctctttttgttttttcaactcgaatttactttctttcttttagtgtgtgcgtgtgtttttgcttttggtcgaatctcttagttttttcttttttttacgtgtctaagttttggtgacccatcttaaattctttctcttcaatctctttcgtttctgattctgtaaaaccaagagagcgagcgggatattatttatagtgagtggtggaaaactctcattaatatggccgcaactaagaacagtggtaaatccaagaaaggtgtcgacgaaacccagatggatatggatcttcgcttcagcttggagaggcgtcaatggaagccagttttagatgaagcttccatgtcacccagaccttacaagaagattcgaagcccagaccggcaacaccaatcgtatttctctgttgctgttgattcagctcagccaatatccccaggtcctccgaacccctcgcctacctcttcctcttcatcttcttcagcttccagaattgtgtttcctttcgcttacgacgggtctgagtctcagactcatatcaacaaacagtttacgggcaacaattatcccctgtttccaccggtgtcgcttccccaaattccgcagaaccagatgatatcattcggttcgcaccaacaaaacgccatgaactaccacccttccttcttcgcaggcaccggagacgtccaaaatcaacagcagctgcttcagtactggagcgacgcgttgaatttgagcccgagaggcaggatgataatgatgatgaacgggttgggtcccgatgggaggcctattttccggccgccaccgccggttcagcccatcaacacgaccaaactttacaggggagtgaggcaacggcattgggggaaatgggtagccgaaatccgtctccctaagaatcggactaggctttggcttggcaccttcgatacagcggaggaagccgccttggcctatgaccgtgccgcctacaagctcagaggtgatt

SEQ ID NO: 45296 - DNA, 2566 bp, Cannabis sativa
atgaaaaaaatgagcaaagattctgtctatttggggctgcctctttttagatcaaggaaaaggaccaaagatctccatttcctagttgataaggtgatgcaacgggtcaacagttggaaatcaaggttactttccaaatcgggaagggcgtgtctaatccaatcagtaggttcatcaatcgctacttatgtggcggcttcagatgttattccaaagtctattgcccggaaagtagataaggaattgagggacttttggtggggagatacaagctcaaaaaagacggtccatacgatctcttggaacgctctatgccttccaaaactgagaggaggtcttggttttagaaaggtagaaaccattaaccaagcctttttgttgaaatggggttggaaagctttaacggatgatcaaagcatttggggaggtattgtacaagcaaagtatctcaatcgcagtcaatttctggatgtcgagagtgcaagtggtgactctggtatgtggaaagctattgttaaagctcgctctcttctgtcagaaggtttatgcaaaaagattggtaatggtaaagagacttcaatatggtttgacccttgggtccctcattcgactaagtgtccgactccccttctggatgcaacacatggggtagcttgggttagccaatttatcgatgagaaccgtaagtggaaagtggatatggtcagggagtggtttgacaacgaagatgccagggccattcttaatattactctgccacaagaggatattccagatggatggatttggctgggagaatcgactggggagttctcaatcagatcagcttgtaagtttatcgtggggtggtgccaacatgatccaatgcttgcgacttggaagttaatatggaaatctcgaattcatccaagactaaagcttatttggtggcaactggaaagagatgtcttcccaactagaggtaaactagccaattttattgaattatctaatgttagttgtccaatctgtggtgagggaatggagactgctttccatcttttatgggaatgctctcttgccaaagctttttggtttaattctggtctgggaatgagggtcgacagaattgttgttcttgattggcaacattggtgcacttggttcaaaactttgcaaaatcggcctcctaatgtctcttttgaggatatattaatagttgggctatgtatagttgaaacaatgtggaaagaaaggaataacataatccatggtggcgacagatctattgtgaggaatcttattctccatctgaaccgaagaatctccgaacatagactagttgattctggggatgtagaggaggtttgtgtttggaccccccctccggcctcttggatgtgctgtaactgtgatgtagctatgagtaaagacggggctgtgatcgctgcggtagctcgtgatgagaagggatcaatcctaaccataaaagcggaaaatattctggtttcagacccaaaagttgctgaagcgcaagctgtttgtatggcagcggatctatcggtggaaagaaatatggggaaggtcattttccaaagtgacaatctgagggtggtgaatgccttttcgtctgaattcgaaagtgcagctgacttcaacttagctaaccttcgcagtcgattccgtagcatctgcagcgcactaattgagtggaaaattgtccatgtgccgagggtgggcaatttcatggctcataacatcgcaaagtgggcatgtactactggcactgtggggatcattcagctggctcgccttgacagtaaagttctaaacgattatgtagaatggagggaacatgctgggtattctaggcactctgtggtggaggtgttgtgaagtggtggtggtgtagtagttatttgctttgtttagtttatgtagtagtttttattcctactgttagtgtgggttcttttctttgtctgttgtgtttctttgaacgattgtagctatgctactgtgatgtagttcttgtttttgcttattaatcgtctgggtgcgtttgcaccctccttttcatcaaaaaaaaaaaaaaaactttaataatgtaatttggtgcatgttctttaagttatcaaaaaaggttacaataataatgagagacaaatcaatataaaaataatcccaaagtcctatactaaccataatttccttttctttatctttgtttttattttcttaatacatgtccttactcaatggtggtggcctaagaataaggcttctttgtcctttactaaagtcataatacatctcttttataccagattttatccagtgtaacgactacgagatctaactttttagtgattctatctataaaacgctgattttcaaaaaaaaataaataaataaaaaatctgtagcattcagtgtactaatagcaacaaatgagaactattattctacacatctatataagtgcctaaaaattataatatcactattaatatttaggttaattagtaattttttccccgaactttgacatgtactagatcggaagagcggttcagcaggaatgccg

SEQ ID NO: 45297 - DNA, 1536 bp, Cannabis sativa
  modified_base (1128)..(1128): a, c, t, g, unknown or other
tttgtgtgtttacattttaccacttagatatagttttggcttccgcacacaacaatatcaataatatttatgtgcaaaaagaaatcgcaataatttaaatttaaattttagttattattattattatttttattaaatattttattgcaaaagagttttaattttagttttaatatgctcccactcttgattattaaaaagattcaccctcaatttgattgttttttatttttgataaatctcaattcgaaattaaaaaccagaaatactttaaatataatttagggttaatatcattttgaactctgtattttgtaaaatgattgaactatctgttttgttaagtgacaaaatagtataaataagatcatcagctcaatttttatcaattttttttcttatataactaacttgtagataattcttaatacgaacaaatacagtaaacgtaactatttttgtcataatacctctagatcgggttattagtaagttttattttaacaggaaatcagttcataatactattgaatactttttttaaaaatacaaggtccaatttattatttatcaaaacagaaagttcatttagtaattttataaaatgcaaggtccaaaatgatattaaatctataattgaagacaataacaacactacacatgaattttattactttacaatatcactgtttcatgtaagaggaatttaaaattactacacacaacagaagtaatgcaattacgtagctagctatgattgtaaataactcctaactacaatttaaatttactataaagtccccactatcagtaaaagtaaaaatacttaagtggcgttaagtggcgtttggttgggaggaatgaaaatataggaatatgaatgggaatggaaattggaataggaatggaataaaatttaaaatgcataaaagattaataaaataaataattaaattttttccaatcttgtattagaatgatatttccttccatttcaaaatggactagttattccaccaaaatgataaaaagatcattctatcataatggtattctaatagttttaaatgtaaccaaacaaaagaataaaatgaaaactattttatttccattctatttcattacctncaaccaaacgccacctaaattaaagtttggtatttcattaccaccacaaggaaatcctaccacttttgttatgataagcagcccacgtagccaacgaatgggtcgttcattacaagatttggggatccaagacaacaagaaagaaaccagttctgattaaacaaagaaataatacagaaaaataaaccagaaggaaagtcaatattcttatatctcttcatttgacaaatggcaaaaaaatcggggcccacataggagacttaaaatctacacaggaagaagaataaacctttattcaataacaatgtttaagattggatttttatttcttttcacatgttacagaatattctacagcagattaaaaagattgaccatgaaacttcatcgttgcttgttgtcagtctt

SEQ ID NO: 45298 - DNA, 1209 bp, Cannabis sativa
  modified_base (161)..(161): a, c, t, g, unknown or other
agagagagagagagagaaggtgttggcggtttgaaaaacttagggacgttagatatataagaggttttgattaggatcttttaagggcactacaaaaaatagctacttttagtgacaactttttagttataacataaatattttgtgactaaatgtgactnttagtcacaacaaaaaactacttgtgactaaaacatagtatttagacataagttgtcactaatttatatttagtcacaagtattgtgactaaaatcacatttagccacaacaaattgtaatttttgtaactaatacctttagtcacggaccttttaggcataacataggaatagtaattaataattaatcacaatttttttatttttagtcacaagttttgttgtgactaaaagtaaaaaaatttatagtgtggaccaaaggccattatagatacctatttgtattttttttaatgacttgttgtatcggttgtgtaccgacacaacttagattcagtgcacaatcgacataaataatcttaaaaaattgacgcaaatattttgtcaatgcataagaatgcaaacgtaaccagggacggacccaattgttttaatgtgggtgctatagcccccactaacaaaaatattgcttttaaaaaattaaattaatttttttaatttaataattatatactaaaatagtaaaaaaaactccacaaaattaaataaatctagtaagaatgattataatatatgtataaatattttttaataataaaaagcttccaccgagaaaaaattatgggtccgtcaccgtcactgaacgtaacccaccctttaattacatcagttttgcaattttactaacatcataaccgatgcaaaattgtggttttgtatgtataatagtgagcacaacggccagtaggctgtagcgaacttactctataaaattgttgacacaacacaaaatgactcatatttttacgagatttccaaaataaattaaggccgaggcacacacatatttatagctcttggtcccatatatatatagtttaatttaataagtaattttaaaaatggttaacaacttttttagtttcagaaattatgcgcgatattatttaatggaaaaaaaaaaagataactaattggtgatgattatgataatttgattatttatctatgtaaatgatgataagtgtaagattgatgaaaacgaagt

SEQ ID NO: 45299 - DNA, 1508 bp, Cannabis sativa
caagaaaagagaaagaaagtgtgagtgaagaagatggattctcgttattgatcttgaaagaattacaacattttataccagtaatctataatagaatcagtcaaagcttaactaacacagctaagcttaggacaaataactaactaaacagttagttctaacaaactcctaacttcccaactaactaattgtcctaacatgcaccctccctcaagctcataattgaagtgtctttaattgtgagtttggaatgaaattggctgaaccttaagctcgagatgtcttttattaagccattagcaagatgatcatgtgttggaacatgtttcaccctgactaggccttgcggaacctttttctcacaaaattaaggtctagttcgatattctttgttcgagcatgaagaataggattttgagtcaatagtatggtgctcaaattatcacaccaaaccattggagccattggcggatagatctttaactcattgtgaaggggatgaagccatgaaatctcagctactacattggttaggctcctgtactcagcctttatgcttgatttagagacagtatgttgcttcttacttttctagtttaccaagtttgatccaaagaagacagcaaagccaaaagttgatgttctgccatctggggttgtagcccagtttgcatcacagaatgcagttaagttcaaacaatcagatttcttcaagtgcaatccatagttcagtgtgacgattatgtaccttaaaattattttaactagtagccaatgattttaaagtggatcctacataaactgataaactttgttaacagtgaagctgatttcaggttttgttatggtgagatactaaaaagcttcaactactgatctatacaattgcacattctcaacaagatcactaccaaaagcagacgaccttaggccacttgtcataggttttgagttgggttttgcttcctgcattttttctttgcaaagcaagtcctttgcatacttggcttgatttaaaaccattcctcctgtggtatggtgaacctctatcccagaaaataactcaattctcccaagtcttttagagaaaattccttgtgtagacaatttatgagagtagaaactaggtttgaaatcactcacagtaactagaatatcatccccattaactaggatgattgttgttgaggtaggggtaaactggataaacagtgaatgatcagctcgagatgattgaaaagcaagcttactaagacactgatgaagcttgttaaaccatgccctgggtgcttgcttcaaaccataaagtaccttgtttaaaggtaactagtttttggactagagaagcctgaaggttgtgtcatgtgaacctcttattggagtgttcaattcaggaatacattgttcacatcaagttgcctgaccttccacccctttgatagagcaacagtcaaaactactttgattgtaacaggtttgaccacaagactaaatgtctctgtgaagtc

SEQ ID NO: 45300 - DNA, 1225 bp, Cannabis sativa
catgagaaatatgaaagcataataatcaggaaagttaaaggcaagatggagtatcttgcacatcggcagaagcctctgcccaggcaagacctgatggggcatcatgatctgacgagtcttctcgctccttcaggacagctttcccctttcctactacaagagtggacgaccgagcaggtaaactaggctccttgatcttaatcgtatgtttgatagcattgtgctcggtcggaagttttttttcttacttttgagcggagtttcttgctcttgctcaacctcatcttcctgctcaaaatgcacctgtgcatattgcttggcattcaacttagcttcacgtttcagttgaatggattcattctcttgatgagctccctcagcccgaccggcacaggatttcctcttcatctccttcacaggctggggaatgaaatcctttggataaatcccgtactccacgaagttggccttcgaggtcaacaatgtgatatttctggcatcattcggtagctgagtgatcctttgagctctatccctaagagctagcgtgaagggtggacggtaatatatagggatctgctggaaccgagtataggtggggcccatgccatccaccatgtaatactcgtcaacaaattcccaattttgctcacggccttgtccccagtgcccgtcaaccacttgaaatttggctgagaaaaatagaagtatgccaattagggtggacatatacttgaggcccttggagtaaactgggtcagacagagacggaagaacataacatccccttgtttggaatgagcaccttaccaggcacacatccccttcttcaagtttgtggctcggttgtttgaggtaggaacataacattccagctcacccaagtggccggactggtctagatcccttaggcgtgccttagttaccttggacggagggctcaccaacctggcacccaaggcaccttgcctcttgtgaggaacagtagcagtaagctcctcagtgacgtagtccactctttcaaccaggacatcgccatccgtatctactggctccccagcctcgttatatcccccaaaatttggaggtgcagcttcctcctcttcctccgcgtcaaaagggctgccaggacggacatcaccctgttcctctatctcttggactttagcgtccccttcatgtgttgggaatttattttaccaggattcctcaacttgatttaaaa

SEQ ID NO: 45301 - DNA, 3481 bp, Cannabis sativa
gcaacgagctgcatagtacgtttaaaatcacgtcaacacgtctatgctagttagggtgttacagaggcggtgatgtgacactttaaaattactttaaacacttctaattattctctccttaattttcttatttttttagtttttttattaaggtaaaataatttaaaatacatcaattaattttatccttaattttctcatttttttttaataaattttcacatttaggtatataattagaaaaattatttatcttatttttaaattttttttaataaatttataaatatttatctattttctcttatattttttttctaattttttttaaaattattaatctatgcatatttgattttaattatatataatatacatttaataaatcaatatagtaaatttgtgtttttcatatcgaaattcttaaaatatcctttctattaattaagcaacactactaaataaccctaaaattatatatgttttatctctttggctgctctttctttctttctttcatttttttttcatttctttagtaattttatagagtatacattcttcatctttttcattctctaatcttatattttttttttttaaaatattttttcttttgttgtttagaataccataatgagcatagcaatgacatcaatctacaacatcaagaccttgattttttaatggtatattttctttctataatttataatattttttttttttttgtaaattactaattattgtcaatatgatttatttattcttaattcctcactcatcaaatatttctcaatatatttggagacatagcgacttttgtttttatgtcgacaacttcaatatcgtcataacattaaattattcatgatttattcattaatctcgattttctaatacaatatatataattatttatcgttaagattaattaattaattatatttaaaaacttcaacacataaaaatcaacaatggtttgactagatacatgtatggtatagtatcttaaatcttaatgcaataataattagaaaagctcaatcaaaaaaaaaactgataaattttttaccaatttgacattctatgataagttttttttttatagaattatctttttatgaattcgttacaaagctctcaatttttaataatcattatattatatctctttttcttttgtagatctaacattgtatagtgattatttttttttttcttttatgagttttagattcgatattctatagtaagttttctatagatttctttttccatgagttcctttacaatttttttaaatttttagtattttcatccttattttgtatgttaccccttgataatctcacggaaactcatgaggttaatagattatctaatttttagtgtttttaacctatgataagattttgataatttgataaatattatgtttggtgtgatttgtaaaaaaaataataacattgtatatatgataatgtagtgtggtagcaacaatatatgaatgttttattaatttttttattctatgaaatttgatcacgtttggtcaaattttgatacggtgataataacgaattcaaatataatgacgactacaagtaaaatacagtgatgacaataactttaaatgttcaggtgactacaagtgagatacagtgataattaacaagggctttgaatctggcagcgcgacggctaagttaaatacaacgatgacaataattttcaactttttttcgtctttcaacatacatacttaaaatatagttttctccttaattatattgttatgttttaaattttgtagtgtactttaacactctttttttttaaaagaagaacataactattttaacacattttctaataaactacatttaaaaatagtggctccttaaaaaattttaatttaaagatttaattatgtttccaaattaaatttatataaaaaaatctgaaatatttatcttcataattaatatattctgaattttaaatttaaatgttaaatgttatttaatcatatatacaataataatctattgaatatatatatttattttaaaatatctatttactaacaaattgattttattagttcttttatttttttgatatataattttattttattttattaaaaaagttaaatcaataataatatataattagataatttgatttcaaaatttttatacatcaaaattattatttttaaattaatttgtattaatgaagttttcttttcctttttattatattgaagtttttttttatttaaattcgccgcacgaatggcgactaagttatctagtatatctataaaggagaagtatgatccggtgacgtggcggtctaaaatcactctaaaactattattctctcctctccttaattctctcaattttaatattttattaaagcataaatcaataaattaatattttattattatattaataaatcaattaaaaacttaaatatctaactttaaatcttctctaatttttaaaaaacatataactctaaacctataaatatatattatacatatatctctttctctctctcacgtgttctcttcttcttcttctttctttttatttttttttatttttttaatgaaaattattttatatatatctctctcacacactaacggcaggtgcactacggcttgattcactaatctcgaacccttccttgaacattgtcgtgagtctagcaatttcctcctttgcgatgttgtagtgagttgttgattgtgatgcgtagtagtttatcatgtttgcatctgaatttagggcaccatatctagcatactcacattgttggctatttaggtctaacggagggtttaactcagtatcttcatcaatagttttagcatcgatgctccaccgttttagaagaagtgaatttggaattattcttacccaacagatcttcatcattgcccaaatgtgacgacacgggtacccattagtctcatagaataagcacgagcattcgaagtggtttgtgccaagtgtacgggtcactttgtgctttgactggccatctctaaaattgcatacattgaatatagtgcggttggcgtggtcttcgtgaccatttgtgtagtaaccattttctaactcaatttgttcagcaactttgaagtacatctcccttgtgtagaattttgcgcattgctcgtagtagacaattaatgcatttgattgttgtactccacttggttcggtatttctgctgttaaaatcgttaaccttctctgtgtatcgaatcttagacgatgcttggtcaattgccatccatccaactcgtcagtatatatgtacttagcaattttgaacatgtcctctgttatgcctgcttgaagcttgaatgatcctacttggctcccctccgtgagtctatatacttgataagcattcacaccccagggcttacttgagtatggtttttcatt

SEQ ID NO: 45302 - DNA, 6593 bp, Cannabis sativa
  modified_base (5524)..(5531): a, c, t, g, unknown or other
gtgtaattgtaattgaaactggaaagtgtatcttttgattcatagtgaaagttattaccccggttcaagagaatccaagcactagtcgcctgaaatgagttttcagggtccgatgaagcttgtaaatttgagtattttctggttagtttcatgcatgttaagttcattataaaaagcattaaaacatacattaagaattcaacactgctagtcttttcagtatcgtttgtgttgagttactgagttggtcaatcgaagcttacatgcataaagtttgtttcgttccgtgcggctcaaatagtaaaagaaatgaaattttagtaatatttagtttaggatttgtattcatattcatagagctagccttaagtattttataatttaattatcttttttgtatatacatgaaaaaatctcatattttaatattaaatatatataattatttaattattaaaaacttaaaaacaaaaaaaaaaaatagtgtaacctacaatttatacgtttaattatttatagtgtgcaatagtgtgaaatcacactatttttggtgttttaagccaaatggagatgacctaacttgcgcaactatatcatctagagagaaaaaatagactaaagagagtcgttcctttacttggagagtgaaagtttcatattacaaattgacattgacttatctgtgtatcccatgaaccattttttccctttctcccgctaaacacatttatatattgaacgttaacatcagatgggaaaataaacaaaatcaacaaatagaacttcaaacacctcaatccagccccaacactctttacagagcacaaaagtaacgaaataccattgacaaatttatggtgcatcgtttaaatacaagtgttgatttacaaaacctttctctctagttaccatgctcatctttatccctgcaataattaaataaaagaattagactttgcttctgtggggattttgaagattttgacttaaaaaatcttaatatccttcataatatctcaaatcttctttttctttagaatactcatatctaagtagattttcttagaagcctagtaaatgacatgctatagaaatatactaaagggcactcatggtgcctaatacccttataaagtgtaatatcgctattggtgcaactcaatatggaatcctatttattttactttaataaatattatagaaaatcgttaaacaattataggatgacccttcatcgtggtgctagtcaccggctttgagaggaaagatggcggtagaaaaaagatagtagatatgacattcggttcttaatcttacgcattggttttaactatcattataacgtggggtgtgaatttaggtgtctagaaagagtgttgggtcttcttttgggactactttggccattttggattgtgagatgtgtggtaccttgcaattgcctgactacgactagtgcattagccactttcagcatgattatcttcagtggctcttactataaatgacgaacttgcctcatatgatggtatctgtatgaatttattatgttttacactcactatgaggattataatatacttaattaatactctctattttataatttaaaagatttggtaccttatgtttcatagaagcaaaaaacaaaaaattagtattttgtgctttcaataatgcttatttggtacttatattttgaaattatagatgtttagtacactaaactcaaatttaatcaatttaaccaaactacatatatgtaattaaataaacaattaaatttgaatttgaaactcataattgaaaacatttttattgatcaagtttgagttcaaaataacaagtataccatttaaaaaatacagaataccatataagcattattgaatacgaaagagtacaaaaattatattttgataaaagacaagatacctaatgaacagacagccctgattaggttaacaagttctagaatttcatatggcaaatggaaatttatgccaacataaacgccgctttatttcacaaaaatatattaattacaatatttaacattcacacagtattcacatgatattgatcactcactatataatagcacatattagaacgattagcttctctagtttgatggttttttagctatagtaaatggcctatttatacttcaatagaactagtacaaacttttggaagtcatttagaaagggactaaaccacaacgtttttttaaattaaaacatgcatattttcattggtctacaggaatccagctttgttgtgaagtctagcacaattccagaacaaccagtaaagattaatgaaaagaaatagttaagaactgaccttcgacataaaccacagagctaaacgagctcctattcattctcgctcagcatcttcaatttcttcatcctccggtactccacgaagataaagaacattgttacatctgtagtacaaagtaacaaggaaatgtaattagggaccttataagtaaaacttgggtatttatgaacagatcgaatagctatagttgaaaatttagaagaaatgaaatgagagagagctaccggatcaaaatttcaccaagatttccagtgaattgtccatcaatgtactcttcagtattggccaactgcacgtaaactccaatcatcatatattgaaaattattgaaaactgcacaaacgtatttgtgagctaacaaggtaaatagtacaaaattgtatttaaaattacagaagaattgcaatagttcaatgaaaataaatttttcatctataattaacaatgacatataaagtagaaaaatatacaaaaattagtgcagactatatacaacaatatcacttaagacttgaaaaaggaaaaccaacatagttcatgaaaaatacaacatacaaatattataatgagatacaaacatatattttaatacacaaatgagtaagaaaaagaatacctgcaaattcatgtacgaatcgacggagaccagaaaacctgaaaacagcataaatgaaacatgaatataatgccaaccttattaaatgggaagaaaaaaaaaatagctagagccaaaagcaacatacctttgtactccatcccccattttagctttacaaaaacagtctttccggtcaaattgttcaagaaaggttttgggttaactggtatgctctgcaaaaaagtcaagatatatgcttatataattaaaaaaacaaaataacatgagaaatcaaacttcattgttatttaaacacaaaagacaaaaataaactaagaaaagaaaagttcttgataccttattaattgaaatcacactaatttggattactctctgagaactttataaagaaaagcaaatccaagaacagatcactttatgtaaaaaagaatgtcattcaatacctcatcattattatgatttaatcaatataggctattgacatggaagatacaaaataaaagcaaatataacaagtttgtttaaataataataatagtaaagcaaacacaaaaatccattaaaaaaacatgctttgaaacgagccaccaaagaaacacataaaccaaaatttatgtaccagaccaagcatcaaaatgaacaataatatctctatctctcaataccaatgtctgtatatataatatgtttcatttacaagacttgagaacattattcagtttaacaaattaacccactaaccaaaatccacaaattgagtttcagatgaacattaacagaaacaacctccattaaacagaaaaattacaaataagcaggataaatccaaatgtctaaattccaaatcaaacacattctaaggtgctgcccaaggaaggggcaagaaacactctaaacacttcattctaaatatatcccataacccctgttacagttccattccttaatataactagaaaaatgattcactaagcaacaacaaatatgtaacaaaaatacaaaaactaacaattttaaaaattcaatcattatatatatgggaaatgtcgtaacaattttatacaacgacattgttctcgatctgaagtgaagcaaaactaaactgaaaatttaggttcgtacaaacactcaaatcaatttcaagctgaaaattgaagtttatggcaaaatccgtgtgtgggagaaataagtgagaacgaatgaaattacgtgattcaaaacataatcccttaccatgttttccaagccagaagagtgagagtgactgagtgaggaagctggggtttcaactctcgaagctctagtagtcccctgcagaaaaccctagagaagaagagggcactgaaagactagaaataagacatgtttgctgatatgatgtaacgtaattgggaatggcaattggttatggtaaattatttagtatcgcaatcaattaaattaacggagaaatgtaataaattaacggagaaatattagagaacaaataaagaataatcagaatcaatatttataatatgttatttattaaaattgtttagaaatggaatgatattaatttatcttgtttactttatcagaaaacgtaatttcagtatttaaattgattaaattacgcttttgagttaaactttttaatatatagtagttattttgtaagacatgttttaaagaataaaattattattataaatttagtattaaaaaaataaaataaaaatcattacttttatggtattttttaaaaaattagtgggggaaattctctatttttttctcttttatttaaccaaattcttcattttttaaatttaataaattaaataaacaaatgtaagcaatgattctattatcattgattctcattacttaataataaacatgctataatataaataataatataatggaataagaattttaataaaaatgtatcatgatttttgattaaacactctaattaaataaaataagttgtatattgacaaaaatacctttaattttattatttttaatatttaaaatttaaataaaagtaacataaaagggcaaaagatatattttttaacaatgtaagcatctttacattagttttataatatagtggggattacaatacatagtctaataaccattacaatgtaaagtcattacaaaactttaaaaatgaaagcaaacaaatgtaatggtaataataattccattacaatttcaattacactaaatcaatcatgctcatcaaaccaccacttcgcacaaactgctcgcactaacgcacaaaaaaaatgaagtttgaaattctttgtgttgcagttgcggtttgtatttttgtcaaaccgtacgctgagatgcaatttgcaattttaaatttaataatagcgattcaaaccgcattgtattatatattacaaaaaatactaatttttacattatgatttctcttttttatatataaataattcatatacttacgaagtctaagtcatacaattaaacttaaggaacatccatataaattatatttgggctacttataaataagaataacctctnnnnnnnnattagttatacattttctaagtcttaatttaggtataacttttaaaatacctgatttcgatttatgtaaagtttattttattttaattaaaggttaattaagtaaaattttaattaaacacaatttctaataaacctattaattagcggcgaattacacagttaactttaaatcactaaaacactcctaaattagtagagtattacaagtaattttaggagataaaataaattattttactttatttctttattattttctttattattttgctacactttaagtttttcatttttctcaaacacttgcatatatcattttgcttaataatatacgtatacaactcttctttttctgtatatataaatctaaatgtatgttcttatacaactttcaacgtgaggttttttttggtgggggaggagaaaatggtttacggttattctaatccctataatttctcatgttacaactcacaactacccacttcccacgtctctcgctatctttctcttctttatattatatacatctcacactaatcatttgtttgtaaaatcattactctctatatatttaatattcttctactcttctcacttagttagtataatatactatatagctcctatggcgttaaccttttgctctaataacttcccacaaaatctcataaacacagatactgtcctttttccacaaacaaagaaacaaagatcatcatcatcatcatccacattgtccttttcatcaaacacctactctttcaccactaatcataatgtggatcctcctcaaccattattgttcctctctaacccaacaaatcaaaaccctttcttctcatcaccacccctctattcctctttccaatatgattattactacgatcccattaccaacactaatctcgattattctgaacctgccttttcatctcatcacccagaaatggaattcttcattgatcctaatcaacacattgatgatcaactactactggctcccttattgccccaacaagtagccgtacctgaaaattatcttgatcagaatcaacaa

SEQ ID NO: 45303 - DNA, 2010 bp, Cannabis sativa
tagcataatctgactgtcttaatccattttcagtgttcttaaataattttacacttgggtcatatggggaacaaaaaggtttacaaagttaaagtaattatatttctttagaatcttcttaatgtagtaatctttattccaaggattacacttgcttatccgaggtctttcatatcaaagttcgaacacaacattgatttcacggtgttcacgtcatgaatgttagaaccaaaatgagcaagtcatccatgaatagacatatgattattcatatgtcattctcagatttgtaatagatgcacttgtcactttcattcactttaaagccatttcaaatgactaaagtgtcaaatttctcatgccactgtttaggtgcctatttcagaccatacagagatttattgaactaggagaccttatgttattggctagggctcacaaacccttcaagttgatctatgtagattttctcttctaatattttaccattgagtaacgcaatcttaacatccatttggtgcacaactaagttgtgtatggtagctagtgaaattaaaactctaatggatgttattctagtcacaggtgaaaaagtgtgaaagaaagctacattctctctctgtctaaaacccttggctactaaacgagcctcatatttatcaacagttccatcgagtttcaatttctttttcaaaatctacttgcaacctatggccttccagtaaggtggtaagtctacaatgtgtcaggttttattggtcacaagagagtccatttcatcatctatggcttcttgcaaagatccatatctaaggaagacaatgcttcttggaggttagcaggatcctcctctaaggtatcagcacagaaatcagaactaaaatctttagctaccctcactatcttacttcttctaggtttagtttctaaatcctcagtatgttcatcactcctaatcactagaatgttgctagttgatgcgtccccactatatctcaatttaaatagaaatctatctctaaaaaaattagcatcgttagatttcacgataacatgcgcatttagatcatataacctataggcttttctatttacaccataccctaaaaataaaaattcataggctctacttgctagcttaattctcttaggatcaagaatacgaacataagctaaacaactcgagcttctaaaataggatatgtttggttgtctatttttcaatttctcataaagagaaattttcttttattgatttaggtgccctattaagcacatagcaaacagataagagaatttctcctcaccaataagaagcagcaccaaaattaagtaaaatggcaacaatagattcagtaaaagttctattcttttagctttttcattcattttaggtgaatacggtgcagtcttatcatgtataattctatgtgagttataaaaatcaacaaaaagcagtataatcatatctagtgcctctatcattatgtagcttcttgatcttccaactaagttaattttcaatttcaaccacaaataatttaaacatattaagagcttcacttttatttttaattagatacaaagataaaatcagaacaatcatcaatgaaagtgataaagcaacgttttttatttcttgttaaaacaccatctatttcacaaatatcaaaataaattatctctagttacagatttatgtggtgtttttgtgatcttagcctggctacaaaagtcacaattttcaaaatcattcattgataatttaggaattaaacctaaactactcatatttttagctattcgtttgttaatgtgacaacgtctaacatgccaagtattaaaagaacacaacaagtaaatagaaacattaactttattaacttcaacattaaatgtaaacattcattcaatagcataccctttccccatgaaaatctcagttttagtttaagtaaacaagtctgcccctatagtctgtgtgaaccccgctttgttgaggagataacc

SEQ ID NO: 45304 - DNA, 1523 bp, Cannabis sativa
acagtatctgagtaatgcaagagaatattaactagctcaaccaatactcaatcgcagtctccactacttcaccattaaaccatttcaaatctctactatccactacaattacttcgaaaacctaaaaagatagtcaaagaatcgctactcatttatccataaagttcgatgaaaaaagagaaagaaagacgaacctccttacgatcctccattagagttgagtgaatagagctttgatctttcaagaaaaaaaaaatgcaaatcaagagaataaatttgtgaagaacaaattagattatgagagagagtcagagagatattatgtttatattgttatgtgggtggaacagttacagcatatgacagcagcaatcagattgagattgggattgtcgtctaatatatatcactaataaaaattgtgttgaatttgtgtttttaccaaattggagatgttttatgaaggatttacagaaaatgccactactactattatataataaatttcaattgagaagaagaagtggattgaagtgacgcgctttcgctttcaatgattcggacttttattttttttttgcgccatttcggtgccgtgtgtgttgggtgttcccttcccctgcttttacctcctttcatgagctgtcttctttatttgggaaactgccaaaccaaacgatgccttaacctgaaacctgaaagaaaaaaacatgagatatgatagtattttacaatttcagctagtgctttaaaagattttgacacggcgtgaaactggtatgagtttaggagacacgagtatgatctaatacaaaaaatgtataaattttaatataaattggcacaacattacacgaacaatataagcttcagtacaatgatatcaacttaagcaaaacacgacacaacaaacccaaaagacataaaaagtatgcacaaataatctattatgaaagcgtgacatgttaaaaactttatatagtagaacctgttaaaattctttatcactcattaaatatgtagtatcataatttaattctatagataaatatatttcatattattataagtatgaaaaacatagatctaaaaaatacatttattgattcaaagagaagaagccaaatagcggaagcgtacctaaatccatagatagtgatgatcttaatccatcttgtagagataatctttatggtgattttgggatattccaagaaaacaagacttagaattttctaattttctctcttgatgggaaaagatgagaatagaattggatcttgtttcttggggaccagtaccaatttataatcgcatagctaggttattaattttaagtatttctaatttagcccctcaataaattagaaatattgcttagggtatctacacatttagtcaatgacactttaatacccaatgacccacaattactaaaatgatcaatttattttaggccaaactgatcatttagcaatacactaatatacatatgagcccatattaaggattttaatccaaca

SEQ ID NO: 45305 - DNA, 1291 bp, Cannabis sativa
gttattgtgaatgagtagtaattactccctcttgatgaaaccgcagataagtttcttacttattagatgctttattggacaacgatagtgacatatcctccgacgatgccaatatcctccaacaaattataagaaattcttcaacttcatgtttatgaaggagcgccatacaaccaacaacaagatcatagaaagaagtagccattccaaccttattcaaacattgaattccccaccctttctgaattcctttgagagagggacattaccaaagagcatgaagtgtcgtttgattaaatttcaagcaaatcgagcacacatccagggtactcataccatgttgagccaagttagcataagtagggataaaattaagaaaggtcttccaaataaaattcttcaccttaggaggaagattgagagcccaaaaatacttccaccaccaagaggaactagtggaagacgtctcatgccccccaacccaatcgagaaatagtgctccaatacctactcttcaccgtataacaaccataattatagaagttccaaaaaagtctgtcctctcagccaacagtaggagtaggaatagatataatagcctttgcctccaaagagtcaaaatgagccaaaatgtagggaacattccacccttcggactccaactttaaaacaatcaccatttgaatctcaacaccaccattgaatgagaaagcacgacccacatgatccttggatatccaacaatccttaatcctaatcatatcacctttcccaacaagccaacacacctcttccttctataattcatgccccaaaggacacttttccaaagaaaggaagccgattttgttacctcaacatccacaatagatccatttgggtagtacaagcctttcaactctagctggcaaagactccggacaatcatgcagacgaccaacatgtttggcaatgagcgactgattaagcaaaaatatatctataaaacccatttcaccatccgctttgtgacaacagagttaggaccatgtagaccaatgggtcttgcgcttatcatcattactccccccatcaaaattgtgcacacatcctatgacttttatttataataccaataggaagccgaactaaactcatagcataggtaagaattacttaaatggcgaaatttaggagaacatcgtgatcttgaaaagagaatagcttagacttccagtcaaataatttattctaaattttatctttgatggattgaaaaagatactcttacccttatcaaaaaaaaaaaaaa

SEQ ID NO: 45306 - DNA, 2246 bp, Cannabis sativa
ttgtaagtttccctttttttttttaagaaaaaaattatggtaaaaatctaaaatatgatattcttgaatttgatttgataagtgtcactagatgcaacaaaagttatagattctttgaattttaggatgttaccaaacttttacaatatgttcttacaaaaagaggcttttctatctaatattttgttatgactcctaacataattttttttgttatagtttttactaaaaaaaatataaggaatcttaatttaagagagccttgtgttgaggagactaaatctaaaacatctctataagtatgtgtggtgttagtttccaataaatcttaaccactttgaaaattgaatagttttcatctcattctttttgaagtattttttttggaaagagagagaacatcgatgtgccgttcgacggaaaatcatagattctgcatgcaatcaaggtgattaggcggccattcttcagagagcgccctacccaaatcgacttgagagtaaaacctcattcttttgaagtaaagctttggagaagagcaagaagatagtattgtgaatggttggatcctaagtataggtgggctaagtctgtgtctaagcccacccggtccagagccaaaaaaaagaattgctattttttaaaaatacacacattcttttactgattttgaaaatactacattcctaaataagggcttaaatttttatttcttatgacccactaaaatttaggatcagccctatactgtaaaagagttgaagggggttctaaagtattttgtattgtagacgaatatgcaagctcgggtgagcgtgtaagatagagaaaaacacttataagactgagtaatctttagtcttgaaccagtatattttttggtatcgtttttactttactactttttatattttcttgtccactaagtgtgatttgtgttatatttgtgatttgttatttagattttccaacaaatatgattgttttgagttgcattgtgtaggtattgcgcttgcaaaagtgattaacattgcaaagatgatgatgaaggcaaaattcaatggtaagactcactttgcggtaatgggagtgttgatacagatggtgattagggtcggccttaaaatattttggaccttaagaaaaagttaactactcgtctcttgttttaatagtatgtaatattttttaaaattattaatttttttgtatattttttaaaagaaaatattttttagagtctataggctaagcgggccctaagtgcaagtctagtccgtcatagcccaaagtcggccctaatggtgatgttgttgaatttatccttcatgaaacaaattctgtccatgtaggaggaaagatcttatacactttccaatttggtttgaacaagtgatttttgttttgtactagtcaaaggtagttggagataactagaaatctcttttgaaagtataattttgttcttgaaatcattaattgcaattcaactaagaacttttatgcataataatcatagttatttcttgtttgttaatctattttgccaattttgtagggcttaacttctatattttactactcacatcgatttggtgacgatttggtaaagaatcaacaagagacgatcatgttagaatttttaagtgatgagtattacaccagccataaaatatatatttttcataagaattgaaacataatgcaacaacttatgtaatatttttcaatgatcaaacatctattgtaatggaagttaaattatattattaaattaaaacctataattagattttttactgcttgcatttctatgtatgaatttactcttacaagaaaaaaaaaagcaatacaattgtttaaaaacaaatcaaaatcaataaataaataggtgaggaattagtaatgaaatgtcatcctatacttaaaatgatatttttaaaaatttgaggtctaaaaaaaacccttaggttttaaaaagacatacatactattttttatgttttacaattcatatttattgtgcaaaatactttgtagtaagaaagaacaaaacacattgaaatcgattatcatttagttaaagaaaacattgaagtatagacttcacatacttcttctctaagaacaaatgacaagacatgtttactaaggtataggttgttctctttgagggtggcgtataagtctattattatcaagggtcgttggggagagtctgatcagatttggaatcggatttggaa

SEQ ID NO: 45307 - DNA, 4055 bp, Cannabis sativa
gttaaagaacagtaaagccaaacaaaaaactaaactaactgaataacagaataataactaacttgtaagtgtaactaaaggcttatcagtaacagcccccctcaaactaagtgtggatagagaaaccacactgagtttgtccctcaaaaatggaaacttgctgcttgaaattgccttggtgagagaatcagccaactgatcctgtgctggaacatgacaaacacgaagctggttttgcagaaccttgtcccgaacgaagtaaagatcgatttcaatatgtttcgtacgagcatgaagaacaggatttacagctaacattacagtgctcaagttatcacaccatacagttggcgttgtgatggaaacaatctgtaactcagagagaagagactgcagccatgtgatcacggttcaacagcagcaaggctacgaaactcagcttctgtagaagatctcgagattgtctgctgtttcttagatttccaggcaacaagattcgaaccaaacaacacacagtaacaacttgtagacctcctatcattagggtccgatgcccaatcagcatcacaaaatgattaaacatcaaaatgtgaggttttgtgcaagttgagaccatagtcaagagtccctgaaagatatcgtaaaatgcgctaaactccaacccaatgagactctaatggagattgcataaactgagataccttgttaacacaatatgcaatttcgggtctacttattgtagcatacggtaatgctccaacaacagaccgatacagtgtagggtcaagaacagagtcacttgcaaactgggagagtttaagtccacttgtcattggtgtgctgcttgatttggcaccttgcatttgtgtcctggacagtagatcttgcaggtactttgtctgagacagatgcagccctgtagaagtatgtgtaatctgaattcccagaaaatagcttaagtcaccaaggtcttttaaggcaaaacgagtgtgtagttgggaaattagattggagacctcaatgtcattgctcccaatgacaattatgtcatctacatatacaagaatatatgtagtgtggtgagtagtgattctgagaaagagagatgtatcagatttggtatggtgaaacccaagactgatgagagctgtagacaacttggcaaaccatgccctaggggcttgtttcaacccatataatgcttttaaagtttgcacatgaaatcaggttgttgaggatccacaaaacctggaggttgacacatgtaaacctcttcctctaagtctccatttagaaaaacattattaaagtccaattgtctcaatttccaacctttagaaatagcaatggtgagtaaaactcttatgatttctagttttacaacagggctgaaggtctcattgaaatcaaatccactttgttgatggaagccttttgcaacaagtctagcatgtactgagttgtacttctatcagcactttctttaactcttaaaacccacttgcagcctatacattttctcccaggtggcaacttgagttaaatccatgtatgatttttctttaaggcatagtactcagtgtccatggcattgtgccatttgggatcagccaaagctgatttaacagtagcaggaacaaaggtggcagtaagcattttaggctttcgaattcctactttggctcgggtttgcatagggtgttggtttataacagctgggttgacactagtttgagttggagttgggtttgcaggggaattaggagaggctaaagggatgacaggtgatgtggtgatagctggaggatgagtagaggaagatgatgtagtggtggtaagtggaatgttgtgttgaggtggagagataagaggaatggcagtggaggatggtaaagaatggtcaacatgaggaatgacagaactgagattgtgaaatgggaagacatttatattgaataaaacatcacgagacatgtaaatgcgaccatctttggctaaacacttatatcctttctgagttagactatagctaatgaatgtacatggggtggatctatagtccattttgtgcctattataaggtcttagattgggaaaacatagacacccgaatgtcttaagagcagaataatcgggtttcgaatgaaacaaagtttcatgaggtataaaatcattgagtacttttgttggcattctgttcattagataaacagaggttcgatatgcctcatcccagtatttaagaggcatggatgcatgagctaagagagtgaggcctaaatcaacgacatgtctatgttttcgctcaactagaccattttgttcatggaaatgtggacaagacactctatgaactattccacaagactcaactaaggaagtgaatgctctaaactccccttcccaataagattctaaggatttgatgggaagatttagttgaagttctatctgtgttttgaacttaataaaggtgggtaaagcctcatctttagttcgaagtaagtacagccaagtgtatctagaataagcatctacaaagcttatatagtacctatatcaattagaagagaccataggggcaggaccccatagatctgtgtgtatcatttgcaaaggtgctatgtaaatagtatgagagttcgggtaaggcaacttgtgatgtttaccaagatagcaagcattacacaattcaaaagcatttttattaatggaagagatattacatttggtcattatagattgaacaatatttttggaaggatgtcctaatctattatgccaaatattaaaatgggaaataggtacattagaagaagactgttgacattgaaaagcagatttagatgaggaaacaccagtagaaactgtggtgttgagactaggggaggagttggattgaagaggctggtcaaatttgtaaagccctttgtcaaccctcccaaccaataaagtcttcatagtagcctgatctttcacaaaacaaaaataggggtgaaactcaaaatacagagcattatcttttgcaaattgagagacactcatgagattttttgtgatatcaggaacatgaagaagattttgtaaaaccaagggttgggaagtgaaaggagaattaaaggtgttataacgagtatgatagatatgcaaacttgagccatttcccatatgaatttgatctactcctagaaactcttgaggagccatcagaatgtgcagatctggggtcaagtggttcgtggcacccgaatcaggataccaggactgatcattcacagtgtcaggggtggcaattgaagcatgaatttttgcagtagcagttgacactatgttttaggattagaagtacccctggcaaaacctgtgtaaccagcacgatagcctcctctaggagcacgaggagtattagaaaaagatggaaagtagggtggatagaacgagatggacgaagctctctgcaattgattggaaccagtgggacgaagaacagagtcagcggaagtagcgtacgcccttaaaacgaaggaagctctgataccatgttgagtttaagagagagaatgaaagagaagaaagagaatcttgatttcattgaatgaatacactgatgcaaatatcagtgtttatatacagcaaaggaaactaaacaaaacagttacagagttgttaaagaacagtaaagccaaacagaaaactaaactaactgaataacataataataactaacttgtaactataactaaaggcttatcactaacacttgagttgtgaccctactcttacattctgtcctgcaaggcaaataaagtcttttttgctaagatacatgaccaatagaaaattattttggaacattagaccttgttgtatttttgtcaaataaatacaatgtgtatagaataaataagtatactatacatgaaaaaattgtgctctataaatttattaaaagtaatagggaaatttgcggtaaaagtccccaaaaagttcagtttaatacagataagtccccaacctccaaaaatagcggcaatagtcctcaaggtcatgttttt

SEQ ID NO: 45308 - DNA, 1779 bp, Cannabis sativa
tttttttaagataaaatgttattaattatgttaaaataataaaagaatagataaaagaataggtacaaggggaggaggtatttttctaaccatgaacatttagcatcaatcgaaagagtaaatttagccaagcgccattattagtagatataaacacatgagacatctaagctcatgagaaattgaatactgaaagagtaatattatttaacaaacaatggaaactagaaactagctcttgtggagaaggtaatcctttaacagctaagagggtatcagtctcaataaaatgcacaggtagttgaaattctttaagccattgcaaattatgcataagagccaaagcttccacaacttctggtttgaaacatccacaaaatggagcagacatggcagcaacaatctctcccataatattccgtaatatagtacagaaaccaaaagtttgattcattgtgtggacatcaacatcggtgttataagttttaggcgacctaaagggggattcgaccaggggacatcccgtgaaattgccaactgtgaatctgaagcaatagttgtggctacagtaggaaagactttttgagcagccttgaattcacccaggtaggagagagcgtagtagagaattacatcaggcggttttggcttggtaccatgtctctccttgttttttttctgtccgaacactccacagaatcgttgcaaactattcaagttgtaaagatgacctatagtggagacatgaagcaaaaattccttcagattcatatggcgtgaaagtaactcattaatcgaaaaagcagaggaatgtcacactcgtcttggacgtttacagtagaaaagagcatgagaaattgtctcattttctttagtacacaaagaacaacgagctgagtcagagatgtgccaagtatggagaatatcaacgactgaaagacattcatgaatagcacgccacaagaagatacgaatcttcgtaaggagagtcaatgcccagaatttttaacaccattggagagattgaagactgcttgcagaaggatgttgctcttcgattttagttgccaaagaataacctgatttaacagtataaataccgttcgattcatgatgtcatattagttggtcttattgatcaaaaagtgttaaagggatactttggaattttgtaacatcggaatccaaaaataaagaagttaactgagcatgatcccattggcgagaatcaagaagaagatatgatactctcatagttaagcctttgtaatatcccaataagcctaatggtaagtaattaggagttgtaattatattatgagttaattaagtaataagtgagattatgatcctactaaatttagttcaacataaattttaaattcgctataagtgggtaaataagcataatttataaattacagagatttatatagcatgtgtgaatgtaatatgagttatatgtggaataaaaatattttcaagtttagcgaccatggagacttcatcggaataaataaaaattagatacaaagttttattaaattattaaagttttattacaaacaaaagtaaaattaaagctatatagaggaatcactatcatttccatcattaactaagttctcgttttcatcctcaacaagttcaactagtaagtcatcgatttcctcagctacataatcttcatcaaattcattgtttttcccctcagcacccattgattggctgcaaggttcaacaattacagctgtttcatcctattacaaaatcaactcc

SEQ ID NO: 45309 - DNA, 1848 bp, Cannabis sativa
attaattatatatagtatatttttatacttataagctagataactaatgagtattcaaatatcataacatatctcactttattctcaagtcacatttaaaaaaatattataaattgtattattaaatattttaattttttataattaaaagttcaaatattttataataaaaatcttacctgttaccagagcaaaccaaaagaatcaaactaatatcaaaataggttagctaaaggaataatttggttgtacatgtatttcctattgtcccaaaatcacgaagaagaaagtatatctttcagaatgattggttgatgctaatgctataccatttttaaggtggtgggatgttagtgattatagtaaagttatgaagaaaaatgctaatgaattggatgcattgattaatgattagtcttgaggaacataaatagaagatgccaaaatattaggcacaaataaaaatatccatgaaatatctttgtaatatgagaggccaattcaaagattggaaagtgtacctgtaaaatataaaatctcaacgttcatgtgaataggagtctttttctcagaaacatcaaaatacaattcttaactaaagcatgtgagtccactttttcttaactttctcaccctcaaatttcttggctttttttaagaatttgagaacatcactaaattcaatttaaactacaaacgtgatggtgaaactaagatcaaattaagcatttatgtgcatcctttatcttggtcccaaaatctctcagtaacttgccaaatccaatcctaggaatgacaaatataagatagaatagaaaaattcagatattgcatcaagtaaagcataaaagaaactgggaagcaaaacctaaataaatgtgtagaaaattaaaatctccactaaagcatgtgagaccccattacattcaaaagtgagctaaaggttattttgcaatcttcctaaatttattaaactccaaaaatactcatctatgatatgcttgtaactttaaacattgatgacagaacaacaaatcagtaattcaacaatagtgctaataaaagtctctgtaaacagaaaatatgaaatattgccatgaaagagtatcacgagaaagaagagaatggtgaacactatagtgaaaagattgccactgaaagaagaagattttgcagcttttatcttcttaaggctttaactttgataattcttaaaaccaagacaacaattacaaattctcaaacatacaatttggaacaaaataaaataactaaaaactcaatcataaaaaagatcaaacattatggatttctatcaaaagttgatgagtcaatcacaaaatgataaatgaatgagaagagagtcaatcgcatgcccaaatcgactcacctatagcttactctggtgggcccaaatcagttgcaccaccaaacccaaatcactacctctctcaatcgcaaagcttccatcctcaattgcaaaatttcctcattcagtcgcaactttatatagtttactttcttcaatccttcttgaatggcgaaacttcctcctcaatcgtttaggcctaaaacttctatcctcaatcatttaagagagaataagcatttaaaaatacattggagatttaaccccgttaagccaaaaaaaactgttattttttaatagaaaatttttttgacctaataatttctcataaaccaagaattatgttatatagacacatttagatatactagcaaaaagttatgtgtatccaaatattatagtttataatgttgtcaattaaaagtgaatatcgaatgtaatatagtttaagaaagtttgatgatttaaatatgttctta

SEQ ID NO: 45310 - DNA, 912 bp, Cannabis sativa
tccaatgcaacaagaatattttcgtagcctccaattggaaatacttgagaagaaaaggtgtacaaaacaatgatctgatggtgtaatggactcatgattttgagaagtgaaggtgtacaaagtcaccattgaatggtaaaatgcagcaacttttgggaatgcttatctgttaattttttgtgaaactttgttttgtatagaattatcaactatgcacaaactaaagtgtaatggggggttacttataatagtcttttgtttaggacacaaaaacaacaataattttttgtatagaactatgcacaaacaagaagcctaatgcaaggttactttttttcttcacccattagttgttgattttgttggattggtggtctggctcttgaaattattatgacatcaacaaggaaagtaaaggtataataatagacttagcatagtgaaatcaaagaaataaatttataatttttatatttagctaaacacagtaaaattaagattatattttcaaatttcaatcaaaataaaaatataataacaaagcatgatttggttattgtatttatgagcacatttcttgtatttttcatttatttaccaacaatagttataagatccattttttatgtatttttatataaatatatatcataaatgttaataaaattcttaggattagaatgaatattctcataatatacttaattacataaattttttttgttaacttcgatttaactctaatatataaatttaaattaatttaaaataagatatagttatccataaatattgtaagaatgtaaatatatgaaatattattggtggttagttaagttagttaaaatattttaaataaaatattttaaaaatataatattttaatgttatagagaaaagatagagaagctg

SEQ ID NO: 45311 - DNA, 2105 bp, Cannabis sativa
cccaccaaatccacattttttgaatccatttgaacttgggccttattctttccttctaaattgtcttcagaaattacaccactgcccatctcagctctacgcctttttgaatcaataaccataaggcaatcttcctcaacattaatgtccttattttccccacaattagtgccagtcaactctcctattacttcaattgttgatacacccttctgtctattagctgcctctttattacttgattcgtgtcccacgattttctccttcatcacagctgcttgagtaggatgaggatacgacattaattgtcccaccggagctgttctggaagcatgatctgagctcggctggtctgaatccgtctggcattcctccataaccactctgaattgtttcagccatttcttgccaatcatatggctggtacgttttggtttgactctcatccaatccccataaggtttaaccaatgattcggtggttatatcaaaacgtcgtgggcagaaattttcagagtgtcccataatcccacatatgaaacaaaaaatagggagatgttcatatttgaaattcgtccaaaactcgaccccagcagtattccgaagcgtcatacgtcttttgagaggcttattgacatctatagtgactcgtactcgaagaaagtccctccaaaggcccaagaaatttttctcatcagattccacaaatttgccaatgtagttcgctacatctttagccactgtagctgttcgaaaccccgaccgtaagtcatgcagttgtacccaaaaatccacctcattcagagctaccaatctgggattctctccaggcttcaatcttgtaaacaccagaagaaacttattgaaagtccatggactccgatcaattacgcttttgatgtcaatttcgtgataaaattgaaacaaataacgatttgtatctaattccttaacaaacataccttttcccggttgccataacgaggccaatagatgttgcatagcatcaaaatcgattgacctctctgttaaaaacctccctacaaggcaccatcggtcgtcatagtctttctcagtttggtcattagtgtcataatccaaaacaacctctgattcttcatcaagccatatattgtatccatcctcctcttccaccagtccttgccgactactagaagccatgataaacacaaatgctaccaaaagatgacaaaaaagaactttttcaataagaaacagaacacacagaataatatttctctagaagaaagagaacacaaccatgtttaatttttctaacatgtggtatcagattgcctattgtatatgatttaaaacttataatttgtataataattaatatgtatatgttaattttcttcaattacatattaatttcgttaatattttatgttcaattttttatttttcaatcttaaaaatttaggggttttattcctcattaaattctctttatatatatatatatattacttgcatacaattattgagtaaattaagagaattttaagattaaatttttagggtttatgtattttttttttatgaaattaattttagactgtttgattatattgattattgcctaaaattgattggataaatttcattaccgaattatttctaatgtttttacataattaattttttaaattgcatgagatacattggatattcgggtttgttttagttcttagtttttgggttgaatttcaattagatctattctcttttagttgttcttacttcaagttgaatgaatagaaggattagaattagaattttaagcaaaacccctcaaagattcatcggtttcatcgtatttttggccggaatttcatcccgacccgatcggatcttaaccgggtcggacttgactggttttggggctgctggaggttgaagataacctgctgggacgaagcccactcgcggctgccggagagtgagagagagtgaggtagtttcttaactcctttttcgactattcttttttccagcattattagaatttgatttatgattttttggtgatttttaattaattttttgacgccattgaataattattattattttaatgat

SEQ ID NO: 45312 - DNA, 3674 bp, Cannabis sativa
aatcaatttatttaccaggacatacgtaaatatctattgcagatatttaatttacgttggactacaggcatgacatctttccagaatgcaaatatcttttttgtaatgtttactcatgcttgtagatttaatcaatttattaacctggacatatatgttaatggcaaatcagtattcagcgcatgtttttgttattctgctgaggtgcaaaatggtttgaatacgtttagtcattctcttacaccaactcattgataaggatgtatacattacgtacttctgaataagaaaatacatgaatgttaaattctcaaaattctttatgattgtttactagacaatgccacttgaggctaggttgggtaatgtattgggtttgggattcaaacctcacctaggactaaaaattttaagttttaaagaaggagtttagcagcaaatgaattagaagtatagatactggtactatattttactagcttgttataaacgataaaactgacaaaagcctcaaaaaagatgggaggggaaatcaggtttttcttagtgctatctgatttcttgaaatttgattgaaaattacttttggagtatagttgttcaacactttgaccttgtgaaaaggtaatttgtcagagggcaagaggttgtttggctggaccaaagttttggtctcctatgattggactaaactaaaactagattgctcaagacaaaaagtgctgatccattttcttgtcgattgacttgatggttctagcttttgatttaatttaagataatgtgatttatcattttctaagataacagtgtttctgtatatttgggttttactagtgtgaatgtaacatcttaccagtcactaatgttacttgaaaactacttgtaaaactgaaatgcatcatggaacagtataatgaaacaaacataatttgtatcgatctaaaagatcactattatttttcttgttgggcatgtgttagatcctgaatattttttttgaagggaaaaaagaaaaagaaaaccttatattctacataaaggtaccattagcaaaaaatgaaaatctagatgaaataagctgaactcaaaacacagcttactcatccatgaaatagaacaaatgtatagcaaaaacaaaagctgttgaccactgtctggtgattcaataattagtttaagagctcaactcaaattgtgttcgatatgaaaaatgatgtgatatatgacctatttggtcacaatgggcactacagaattataatgctcaccaaggccaaatgcatgcttgtggtatgaaagcctaatagaagtatcagtcccactgttggatttgtactccttccccatctccacatcaggaaaggacccagagaataccatgatatgtttcctaaggtagtgagttagagcctctaactctagctgacctccccaggcagctgtcgtctccacttctttacagtaattctcgaacttttctgccagagaatcatcagaaccatcatcttctactgcattttctgagaggaaaaatgggagaaaatcagatgcgtttttcctcatataagaagccaccagttctcgaagttcttgatagttgtgaggtgatcgacctccagaaaggacagctagttgatcttcaacggctcgatagagacaatgcccatctggctttatttcagctacagccaagccaagaggttcaagctttttctctagttttgcatcttcaataacacggtcacttacaatgttgctttgttcttcctgtattctctgttctcttgctgcttcttcctgagccctctttcctcgcctccttgaactcttgctagactttacctggtcaggttggttgctcacagaaactcctgctattgccttcactaaattctccagtttacttttctcatttccatttttagtgtcataccccaaggaagcaagttcttcagcatgtttttctttaagttcaaaagaacgtttagtaatctcttcctcgacctgttttttcttggctttctgctctgctttgctgcccttagcagctgccttcttcaattcgatttccttattttgtagtgttgatatctctttcctgtattcacacaagtatattaagcaaaataactcagaaaacataccacttatgcaacaagtcgataactactaaactccttttaaaataactagaatctccatctaaccctataataatatataagtaaccacgagagactcgaacctcagaacttgtgagagcaaactacatgcctgaccatttgagctactacctcttgtgttaagcagtacaatgtttagttaattagagagactgccctctttcaaagactaccaaaaaatcatactctgccaatatcttcctcatctaacaaccagacaaacttctagcagaataaactttgcaattagtcactcactgccaaccctttttttcttaaaactcttcctaactaacataagtcattcattggaggcttataactagcttaagatgaaaagtgacttgtttgaagtaagaagcctctcaatgaccacccaattgaagaatttaaaaaagctcttatgctaacacaacaatgctaacaaaattcaacaaaacttatgtctataatttcaataatcattaaaagaaaggaaattttttacttaaaaggcataaaatcatcttagtctaatggtgctccaaagagtcatttaaactttgtggaggcaaatactctagcatattcaatggggaagcaagcccacaactctagatactaatacacaaactgaatagcttgagcagaactgaagtggtcttttgatactaccataccttacaattttacaaagtagccataaaaatgtaggcataaccgttggctctatcaaataatgaattcgacagcaatacaaaaaaaattcatgaacagaaaaaaacggaacaatacctatgcctagaaagcatttcatctcgagtttcccccttgtttagatttgctttttcagtaatttcttcagaggacttgttatccagttcttgagggtcttccattgaagaaaactagaaacccactacaccgatgcttgaaacttcgcaggaagtcctcttcacaggtttggggttgtgcggctggggttcttcaatggcctgggctctgaaatttcttggagatcgttggagaagacgctttattttgtttttagggtttttcaaaaactaaaataattaatttttcttaggcaaataaattattgttcacaataaaattacatcaatgaacaatctatatgacgtggcagtccaaaatggagccaaattgtctatcccacattcatgtcccaaaccctgtcccaaccacttataacttgacaactcaattatattgtcaactatacaactaaagcatatttgacggggttgtctattggagtggtattgtcacatatgcaatgtggtctaattttcaagaataattttatataaagtgttgctcaacaagtcaacatagataatgactacatacatgacattttattttaatttttttttatttagaaaagttattttgtatgtaaaaaattattaattcaatgtgatatgagactatggtggacaacttttaaacttgttaactattagagtatttttttataaaagaaaa

SEQ ID NO: 45313 - DNA, 1375 bp, Cannabis sativa
tattatatgggcctgtggaatcaatttggcccattttagtgtttgatcaataaatgtagtttgagtagggaggtgagtgagagtgagttaataaagtaacgcagcagcggcgccgctctaccctacgaaatattttcagttattaaaccttgacttcacttgacttgacgtgaacgtttaataattcacaaaattcaataaatcgattctcgtgactattaccttttcttagataatagattgtttcttcttagggtaaaacagtcattatcctagtttttgaggtcacgaattttaatgagagaaaacaatttattaagggaatgattgtattatcaattttaaagtgaaaaacttggaaaaaaaatcaacacaatagaataaaatttggaataccaccattccaaactctagttcattgtctacccctaatgatctttttgccgattatgagctattacaataatatctcttgagggacatactagaaagaaacattaaacactcccttttttactttattctttaaaatatcagcttctctatatatttctctatatcatttaaatattatatttttagatatattttattaattaaaataaaaaaatatgaaaatgagtaaaaataataataaaaaattaattaatttaatgaaagagagaaagaaaaagtataaaatctgttttacctcttcaatattcatgagctaaatgtagagaaatttttttggagttttgaatgagttataatagctaagagtttaaagcatttgttagagcttaattttaagatcttagctattttttttagcttttagctattataactcacttgttgtgagtgctctaaacagaacaaaaacaacaaacatgtaatttgttgaagcacatcttcaaaagaagataaatattctatgtcatctctaatactattaaccacaacaagagaatcaatttccacatgtgttagaggaaaatgaatggctcaatactagagaaggcctcttattatggcttgtggttcaacaatttgagaagaaaatttagcatgagatcttgcttaaatccctcctaacactttcttctcatcattttgtattgaaacaccaaaccttacctttaaatgacaactctaatagaaaactaaaatatcaaatttaaggagattttacactaaattcatttcaattacagtatcctatttattacattatttatagtgtctcactattattagtgtgacactctagagtctagagtatagatatagagtatagattacaccaaatatttttgtattagtttttaatatttatacttaaacattttgtatttattatttgtatttatttataatttaataaaataatata

SEQ ID NO: 45314 - DNA, 556 bp, Cannabis sativa
taacataattggtcacttaattttgtatcacactttataatagcatatacattatacatatgtgcccacaataggattttaatccaacatcttgttctctttgtggggagaatgaggaaacgatggatcatcttttcctcgactgcaactttgcttttcacttttggcgatcatctccttggggagttccttggggagtgatgctaattttggattatggcgttcggatttgggtttggattaaattcttgtggcatctaaaatctaagggggttgatgttgacaagttatttctctatgcctcgatttgttgtagataccatttggagggctcgcaacgataaggtacacaataatttactgagttacatttaaaattgtattgactctatctctatctgttacgcagaaaatatgtcttgtttatttgcttcattaaaagttgtcgagtctcttgtttggtcccctccgcctgatgattgggttaagatcaactgtgatttgagaggtaggtgctaatccatgtgcgttgtggctttggctagggatcacacgg

SEQ ID NO: 45315 - DNA, 1128 bp, Cannabis sativa
aagttgaaaatggggttagagatgaattccatagggtaaagggtggcaatacagaagaagtaatttcacaagaacagagcccacaaggtgtgactaggctgaatctaaacctatgtattagcaactcctttgacccattatcgaatgagggggatgagaatgtgcaattgagaagcgaagcaacaaaggggaaaggccaacaccagggtacaaaggagacaaacacgctgcaaacttcaataacagagaggcctcaacaggaggaaaccgggttggaggaaaatgctatgttgcaagatgggcgtgggaacgaagattgctggagaatcgagaagtagtgggggctggtaaactttaaaggacagcaaacaatccaattgtgatgaatgaaagccaaactctaattgatgtaccgattagtttctcaatggacatacccgggttgaaggaaagtctcccctttgcctttggctcgggtcagaactctatccccaaagagcaaagaagaaaagtggttgtgaagaaagatgcaaagaaaagaaagggctggaaagatgacaaaccgattaaagtttctcaaaatagagattcgacaattgctcagaatttggaagaggcgaaccctgcgagtcggggtcgccttcagccatgaatgccttattatggaacgttcaagggatggggaacccttggacgatccgtactttgaagtccctagtgaagcgttggtgtccggatttggttttcatatcggaatctagacttaataaggtgagagctgaaaattcgcgtgttgctttgggttttgttggttgttttgttgtggaggccaaaggcaaaagtggtgggcttgttctgatgtggtctgaaaaggtgacttgcaatgttctttctttctcctctttccatattgattctttcattaggaaagaggaggatcaagggtggaggtttacaggctattatggagacccggatccaagtaaacgatgtgattcgtggacactttttaatagggtcggtaggatgtactcgggaccatggctgattgggggagattttaatgagattctgaggaaaaaagagaagatgggaggacaaccaaaaccgggatatctcatgaataat

SEQ ID NO: 45316 - DNA, 717 bp, Cannabis sativa
tacactgaataagaaaataaatttgacaaaataaaaaatgaaatgaacaaaaaaacttaatcgaaatatttaattacaaacaaaatgtcattgttacaaaaacaaaataacactttgaagtggtttggacgatttttacaaatcgacaaaaacagtctcgctcgactcagatcggcaaccacaaaccttagctaaaccagtacaatcaacgacaaacaaacatcattgacttgaatttgacgttaattcggaactaggaacggagttaaaatcgacttgagcttgcaccattggcccctgctaaaattagagagagagagagagagagagagagagagagagaccaagagaacagaaaatagagatagacaatattacttactttatggggcttgttggggacggggacggcaacgactgtccaacattttgtgcacagagacaaagagaaaccgatcaacgtggatgagattaaaaaaaattaattaaaattgttttgatccgactaatgtcatttggcctaacgagcctcagagcagccagatttgggctgtttggcttcgaatccggcaggcttggcttcaaatgcggcggtgacagatactggggacctcagattctggcccatcatcgtcactgcaaaaaaatgcaaaaataaaaaaaaaaagtcagatttgggaacgaagaagagagagcggagagagagagagagagaga

SEQ ID NO: 45317 - DNA, 1012 bp, Cannabis sativa
tagattccttagtcacaaaaattttcaatgttcaatactttctccaaagtgatttcctttggactgatctagaaagaaacctaagctttggctagaggagtatctcgagtgctcaatacttcgttttttggggagctagacaaactattggcattggtactttagtcaatattttgaacaatccttggcctcctaatttcatcaatacatttgttacttcttctcatgtaggactttcaagtcatcgagttagttctcacttctctattgatgatagagtttcagatatttatttagtttgggatatgttcaatgtgcaagatgctaatataatgttaagaatcctattatatttctcgccatcatttgatttctagtcttgggctggtgaaagttctggccacttttctattaaaagtgcttaccttcttctttaggattttatggatccaaggattgccagcaacaattcaagtttttggtagaatctttggcaacttaaaatcccacctaaagtcaaaaaacttcctttggtgtgttgcttttcaaaatctaccagtctgtttcaatctcataacaaaacatgttgacagcttccctttttgccccatttttaatgccttttccggaactatctctcacatcctcctatcttccagttttgcttctcgttgctggtagagcacgggtctgcctgctggtgcctctctccatctctcttttgcaaactggcttgattacatattccagtgtcttgacactgacagtgtttgttatattgcttattctgtgttgggccttgtgttaagcaagaaactctattgcttagaaggataaaatgctcactgctacaaacattttaacatcagcccgtgtagctcttgatcattggctaaaagctcaagataacatatctctgtcatccttttactttggtaatatagatgacaaagctgagctttagacaaaactaggagtaaatataataaagattaatgttgatggtgcttta

SEQ ID NO: 45318 - DNA, 2648 bp, Cannabis sativa
  modified_base (1578)..(1581): a, c, t, g, unknown or other
ggtaaaataattccaacagaatattgtactccccctctcctttttcatgtgtctttttaacaatagtaacactttattttgtttttcagacatgggaggttttgaagatagcatggatcgaaaagggaagaagagggaaaccaatccaggagtctccacaaatgctgaggttatacctcccaaaaggcaaaggaaaaccactgcccacaaaaagaagtcattagtcgagcctattgacctcaaggtctctgataccgagacccaagaacaagtccctcctctagtcgctcccaaaaccaatgctcctcctcctgagacagctcgtgcttctccctcctcgagccaggtcattaaaaccttgtcagccgttgcgggggaggctagatctgaattcatccaagcatacgagatttcttgctggcacaaacttaaggctcttcttccccctgattgggatttaatcaatcttggcagtccagaagagatgcttttgaagaacttagactacaacttcatggtaagttggccgtattattattattattattattatttctctcttttctcatattcatttgtttgtaattctccgtgcttctttcatctcttttacttccaatcgacgactttttgagcggctcaaatatcttgagggcgagatccaaaaattactatcccaatgcgtggttgtgattaagcaacgggatgacgcttagcaagaaatcacccacctcaaacaagaagctgaaaagtcaaaagaagaagccgagaagaccattaaggcccaagctgatgaatttgagaagaagctcgctgagaaggaggtcgagaaaacagaacgatgcaacaagggttgccttcgtactgtatatcgagtttggatggtgaataccaacatggacacaagcttcctggaggagaaggaagaggaaactctagctttctgcgagaagtccagtaaagaggaggaggagatcaaggctgaagaagaagaagagctatacaagtctcccaccatgtagacttggtttttatttgtcttcctccttttttttttttgaaaatgacctttcagctaagacaatggtttgcccctggttgcactttttgtaaagatagattggcgaagttggatggccaactttgctttttaatgcctcatgcttttatgtttaaacttcaacatgtggttgtttgcttgcatttcattcacaatttaaacaatcatatgcataaaatttattagaggtttccattgctcgtatttttctctaacgttaagtagttaataacctactttacgtgcgagcagcttatcttctgccttaccttcgatttgcgagcagtcattgattccgcctcacgatcatcaaaaaggaacttatttcaagcaaacttaaatatatttttaatgaccttgtcactttgtatatatctttacaagagcagttagatcttcttaccacatgttaggtttaagtattttttcaagacactttgatgtctcgtttaatactttcctttagcgcgagcctttagtatttagctttatgtgcgagttatgagttatatctcatnnnnaacttttgattttcctttctcgttagataagttttaaaccaaaaattatagttgtttgatccttttctcgtcagaaaggtttgatcagggcgttatagcgattcgaccctctctcgtctaaaaggtttggtcagggagttataacagtttgacccctctttcatcaaaaagcttttgtcgaggacctttcaaaaactttcgatttttttttattttcgaagtgatgggtttgcattgtattatgtatttccagataaatttcgttgatcatacatatatgcccctcaagtaattttaaagagttatgctttacaattacttgttgaaagaaatgattattttattcacaactgaagtttaaaatattacatcagtgatgcgatttagaatcattaatctcataagaacttccccaatttaattgtttattttatgaatcttccagaagcatctagttttgatagaatgggttttgatgttcagggtcaatccataacatactcccacaattttttcaacatccagggccaatccctgtcatatcctaggattctaggtaaactaatcctggttttaactgtatgtctttaactggttctggttgacgaccaattttccctatagcagctgttgtaaaaaattgtatacgcaagtgtacgcaattgtaacaagtaataaagtgataaatcgagtatcgtctctacaaggattgaaaattaaaaattaatttataaaactaattactcacaaattggtttaaacaaaaataaaataaagtgttgagaatatataaaaattaacaaacaaaaactatgataaaaataagttagaactattaaattgacttaaaaatgcaaagttgatataatggtgcaaatgagtattgttgtaaattgataatgtcaactaagaatttaaaatcgcataatcctttttccaaagtattcatggtttgattctctaattaatcaacatattcctatgcccaattaattttaagaataccaatttaagcacaattccttcaagtcatacatagtaaataacatattcctatgccatttaca

SEQ ID NO: 45319 - DNA, 1847 bp, Cannabis sativa
catgaggcatacacccaattctattattttattctctctttcacaagtatacgttatttcacatttataggctgttttgcttaaatattcatttattgtttcacggattcgataatattaaatttatcaattactacaatacactcttgaatttttgggttgatataaggaagtaatgtttttacggtttaaattaagatttcttaaggaattcgttttgaataacattggagaaattattgaaatcgaataatcttttaagaaactaccttttgtagtcattttacctttctttaatgccttttgtagtcattgatgattttactaaaggtaaattttgttattattaaaatacattaatgtttttatcaaataaataaaatacatcaatgtaagttcaaataaaatataccttattatttatatttatttttaattttgaaagcccttatcatttactgtttttttttttaaaaaaaaaaacccttattatttttaatttaatttttaaataagaaaattgggctgtgttttcattgaacagaaaaagaggagctgagaagatgggctttacaagaacccggttcagataatattgaaccagaggcccagcccaagaccaagcccaatcagataataaaacagcaacaccgtggcccaagatacgcctacgccactgtccttcattcttcggaatcctacgtctgtggcgccatagctttggcccaaagcattcgccggaccaaatccaccagagacctcgtcctcctggccgacaaatccatcagcacaaaatcccgacgaggtctccggtctgccgggtggcagatcgtccccattgaccgaatccgaagtccattcgcgaaaaaaggctcctacaacgagtggaactacagcaagctccggctatggcaactcgtccggtacgacaagatcgtcttcatcgacgcagatttactggttctcagcaacctggattacctcttcttatatcctcagctctcggcagccgggaacgacaggtttttgttcaattctggggtgatggtgattgagccatccaactgtttgttcaaagtccttagcgagaagacatttgaattgaaatcgtacaacggcggagaccaagggtttctgaacgaagtcttcacgtggtggcatcggcttccccgaagtattaattacctgaagatttttcgaaggagcagtaatggagactttttacatgaggtgggtaggggtcaaaaaattggggcaattcattatctgggattgaagccatggttgtgttacagggattacgactgtaattgggacatgccggatcacctcatctacgcgagcgactcagctcaccggcggtggtgggaagtgtacgattacatgccgaagaatttgcagtcgtattgtggattgacgaagaagatggaccgtaggattaagaagtggagagggattgctaataagattgatttgcctagtggccattggaaaattcagcctaaggacctaagacgacaccgtttggtagattagaaagaaaaggttctacaaccatgtgagaatatattatatagcgagtagtagttgattaattagtaagtgtgaaattctttctttctttctttctttttaaaagaaaagaaagaaacgaaatctcaccatcctttctggacaagatgatcaaaatgttggatgttttattattcacactatatttaactgtacattattcaagcaaacataataataacattattttttaatttggattgtaacaacatttatctttttatgaagttgtttaaaaagattagttttcagattaagcagaaattagttttcag

SEQ ID NO: 45320 - DNA, 804 bp, Cannabis sativa
attcccattcccattcccatttctattcctatattttcattcctctcaaccaaacgtctccttaaagttttaagtttgtaagtggtatgaatttgacgtttatttttaatggcataaatacttaattttgtcagtataaagtctgttatttttcttaaacaagacacatattagactcaaattttagattattagatcaagacagaaacatgtagtatcagtgacagttacttttaaacgtttttttaataaatttaaaataaaaaacgaagtctgtactaaagaaactagaagaaaattatagttttacaaacattgagtatttatgtcattaaaaataaatattaaatttatgccgcttacgatcataagaatttaatatttatatcgctatataccatatataaaaatatgcaggaattgataatagagattaaaacaccaatcttgagagattagttttggcacaatggagttatgtataccaatcttaattctcttgtttttatactttcttggtttgttgtgtgatactatttatttacaagttacaagtgactcttttagactagctttgtgactaagttaattagttactatataagagtggcttctctattgttttagactaagtttctagtgtactgaaagggtttgatcataatattcttctctattgtgtgattcaatcattttcttgatgatcttgcatttgacattgctgtgattaatttgaaattctcactattgtgttgaatgaggacagtttggtttataagtaaagagttacttaataatgaaagt

SEQ ID NO: 45321 - DNA, 1766 bp, Cannabis sativa
ataaaatatagagataaaatcatttacaaaaagaaaaaataaaatcatcatcagattagacaaacaaataatgtgatactagttatctatatgaaaaaaaaaggaaaagaatcacgagagaggcctggggaagcaaaagtattgattatttgaacttttaaatgtgtagggaattaagacaaagacttaataagaaggaaaaaaatgtggttctgatagaaccatcacctccagtgattggttggggatacttctaccttcttcacatccatgttatttggatcagatttatcatctctttcaattattattactatattattatgtccgcttcatattttatccaaaaaatatttcaataaaaaaaatcataacaaaaaatatatcattatatcattccctaagatatttatgtgtcacaaggacaaacttcgttatggaccttaatggtctcatctcatcattatcagcctgaaccatcagctcacattcacatgttaattgccattattttgattctaagaaataatgaacaaaacttgaagttttctggttttgacattattaattctattgcattttgtaataaaaaacattaatattgcactacaacaactcactttagtgcatcttaaagtgactcaaattaaccattgtaataactcaatttatagtttcatgacagtgatcattttgaatttaatttgactacctaatatatttctacttttacttaagtatactctaaaaatttctcttcataatgtggaaattttccaagttctaatatagttcccatcatccttctaaaaaagagtattacaaaagtggagcatgaagggggaaacatagagtgagaaattaataattatgcatagtacaacagtggatggatggattatttatgagactggttctttaaaactttaaagattgcaatatttcttttatacgatattagtgctataaaataataaattaatttctaaagagaaaaggggaataaattggtatgggtctcaaactttttggactgtttagaacaatcaaaagtttttcattgtattactacaaacaaaagtatagcataatatttgggaccctaagttttgtcatgtgctttgtgactctactctactctctactctctaccatcattttgaatatattatgcatggatcccattaggtgacaaaatattaattaagtcgccccacaaagtttattagttgttgttaaataaatagttgaaaaaaatagaaggggaatgaataaagatggtgggaactgagaactgatcatctattagagatacatctaatcttgttggattgtttgttgtaggtataatgattgaccctataggtccaaaacattgtttttttgtttgtgcaaaaagtactaaacatttgattaagaaggtggttgcaacatcttgtaataaaataatatattatattaaagggtgattgtttatatgagaaattcaaataatctataattatataattaaagtgaagaatataattatttagaaatttgtacttgtgtttagtttggttgtgaatgagaatatttatttagggtgtaatttttttttaaaaaaaaatctaagcctctaaaacatttaaatgatatggtattaagaatattgaaaatatatgaatgtattctaatgtttttaattatacgaaatatgtatatattaactaaaaatacactgagggtctgccttcttttattgctctatggcagttaaatttttt

SEQ ID NO: 45322 - DNA, 1033 bp, Cannabis sativa
tgatgggagggatccgaatttactggctgctcagttagatataaatagtgaggtgcatcccccgttatcaatgatatcttctttgtggatgcatcttggaaagagggtgtcgcgggcttagcagcaatgtggaggtctcaagatagggtctgctggtattcaaaaaccataaaaaatttcattgactctgctattgaagctgaactcatgcagtgctaatggttcttcagtgggttagagacaatcatctcaagaaaattaccatacgttctgatgctcaggtggtggtccaggctttcactaaaaagcagaggattcactcttagagttgttttaatgtttctattttagtattaatgctattaaaaattttgaggtttgtaactttgattttgttaatcgtgcggataatgcgattggagatggtttggcaaaaagagctagaatttctagccaagatgctaatgtaattcagagggagggaccccctcctgtggttcccatctttgtttcctagtttatgaacacatagttctttcaaaaaaaaaaaaacctaattgacgagttctcactgttaatagtaaaattctatcactaatacttttatataaatctctcatttttctatcttaaaaaataaataatattgtgtaacactttttatagttgtcctacattcacctttattttattttatttatttattttttgaagaacattcacttttattgaatagacattccaaccacaccacaaaacaaaatataattatttctttttcttattattattatctatttcttctattttattttacaaaacataaaatttatgtgtaacttccatcctttttctttatttgtcaaaaagtacacatcactctacctaatttgaaaataccgaattatagtatttctaaaatcttaaattattacttttttaataattcaaacatcatagctcaatatatctattctatataaaatgtgcctatataacagaatttttggtttttgagaaattcatgggtgac

SEQ ID NO: 45323 - DNA, 2702 bp, Cannabis sativa
cctattttattttacccttacttttcctttttaatacataaattaagggacaaatagctaagggagtttatgttttatttgataataatttagacccatatttttttaaaatgatacataataggctacgagtttgattttcgtcaaattaaaaattaataataacttgacttggatgtattataataagaatagttacatttttttggcattttcgtgataaaaattggttttagattggttatatttaaaaaaaaaaaataacgaaaaataaagttagggtctatcttgtactgttttgaaaaatataagatctaaatcataatttaataaaacagaggtctaatctgtaatttttacaaaacacgtagtcggccaaatggtattatacattaccaaaactctacttttgctattttacatcaatcgtttacggcacaacatccattagctcttctattttttttctatatcttttctatatcatttaaataatatatttttaaatatatattgcgtatttatacaaataaaataatttaaaaaatagagaagttctaaaataatacatctcctttgttctttattttttttttttgtaaagattcaatattttgaaagagctattgggagtagaattgtaaatatgagtctagtttcttgacacagcccgaaatcggtacgagcacaatctgaggtgaaaatatataagtttgggcattttatgaagtatgctttagttgattaacttcattttgtgtagaattacgcttgtaatctacttatttcaggtctaaatggtaaaatttataatatgaattgaaaataagaagaaacatattaaatgagataaatatgatgaatttatcatagaattgagaattctaagatataatagggtgaaagattctaaattttggatgctcaacacgtaccgtttgtgatcaaaaatcaagtttgaagctttaagtaaatttttgactatgatgagttcactttgaggaaaaatattatgcataaaaattctagatctctcgtttaattttccaaaacatcttgaatcatccaatcttgagtaatatttaaagagttatggttaaaatattatcagtcgtcgtactaagaagcttgctgccgaaaaatagccttcaggggtcgcgacatggagggtcaatgtcgcgacctgctatggtctgaaggcaaaaattaaggcttttagaccctaattttcagatttaaaagacacttttgacactttttgaggacagaactttgagagacgaaaattagaggtagaaggcggctctggagactttcaatattattttttcggcgaggtctttcttttactttattttttatgttcttaattagttgttatcaattgtttacaatgactgtgagtagctagacttttaattaatgttgttaattgagattgtttgacactttgttatagttttaacatgatatagttcttccctaattatttatgtgcatctatttcattcgtatttaattttttttaattgcatgatcactaattaattgtttatgatctcaacgcaaaatatgagaagtgagtattgactatgctgtagtgaaatagacacaaattttaatattggaggaaaatacatgtatagtttgtgtagcatttaggattttaatgcttaatgctttctatatatatatatttatcacgaaaacgtagaaagttacatataggtttagatttatatgtcctaaccagaatataagttctttaataaattcgctatcacacgaaaagtagaatttgtgaattacattatagtaaaccatagaaagtaggttcaattgaatttaatcaccttaagccttgatcattattaattatattttaattatttgtcttctttttagtagaatttaaacattcttctttattgttattgtcaccaaataaaaattaggaatttaattttttggtaataaactgaagtctttgagggaacgatactttacttattatcatattacttgatttgactacatatacttgcatattagaattttcacaacacacaatacctaagcacgaataaattaacccaaaagcacaacacgttaaaaattcttataattttataataataaaataattataatacatatgtatgtactaataaatatttaaattttaatcattctaattaattttttatatgattatgagtaaactattgttgaacaattacataaaaataattgaaactataaaaaatacatataatttaatgattagtaaaaaaattagtaaaaaagtgaagcatgaattcaactcgtatgagaaaatgggttaacccatttatgaaaaacatgtcagcccgagcaaagcacgacccaaaaatgtgggttacgtaagggtattcatcgaatccaattcgcactattttgatcatagtgcatccaatctgcaccaacgttagattttgtattttagatcaaatctaatccaatccacataatagctcaaattcaatctaatttactgtgcaaaagtacgtattgaatctattattttaaatttattactttttaatatttgttaaaaaaatattttattttacataactaataacaaaataaaacgtccctttataaaataaaacgctaaatctaaatggataaatgatggtgactcaaacaccaaaattttc

SEQ ID NO: 45324 - DNA, 3458 bp, Cannabis sativa
cctcttctcttggccacgaggctgaagtattcaacatcaaaggtcttgaaacttcctgggtccatctccactaatgtggtctgatcagcaggcttgcacttcatcttaagtttgtcaatgtactcagaatccaagctggggtcggtatcgccgtttccggtgaagttgtaaagacggttgttgaaggcagtgcagtgtgaagttccaatggtgtgtccaccttaatatagtattagtaataattaattaaatataagaaaaatatccaaactagctaagtctttaatattatttaatgtgattatttattattttattcgtagtgtagtattagtacctgagagcactgctaagtcttttacgcttaaacctctgcttgtgaagtcattttttagcgtagtaatgtttgaaaaaggtgcaggaaggccaaagagggcctcagttatattcgaaactacaccgtctcttcttccagtttcaactgcccaggttggtccattcaactagtgaaatacattttagatgtataaataaataaatatgtgagtgtatacgtaagatatcattacatatttaatatacatgttacgtacgtacttaatttatgccatatatttggagagagagagagagagaattaattaattaattatatatataggctattacaaaagccttaccgcagccaccgaatccctggctgctaaggccaatacatcggcgcacgaaaccactccaggacactctttttctaatgcaaccttaattttgtcaataatttggaaaccacgaaggctcaaattaggggtggcaaatttctcggactggttagtggcggaattcaacagcactgaaccttcacaaccctgtggtaaaaaattaaaaatagcaattatattaatctgtatgtacatatatagagcaatatatttaaaaatcattattaaactcaccctaacaaaacaatcatgaaaatgcattctcattagaggggcaccaagtgatggtgctactgccatagtttgaaatatgatttgcgttacaatagtctctgcttttgggcatgtatttgcatagaatccaactttcaatccctgtgcttgagcgtttgcagtgtggtgaaaggcagagagtacgaaaatcaattgtagagaaaaacataatagaactttttggctagccatcttattaattactcaaactgagaaattaaagatgaaaactatatttgtttgatgactataaatgctaagctagtacatgaaacactgttgaacttaggccccaatttatagtaattggaccaaataaactaacaagcatgtgtaataacatcaggcatagctgtctatgcatggccatgtggcaatacttatttttatatgtgttaattctctgtcatagatgattatgaaataattagccgaagttcctgttcttttagtattatctgttgttggattgttcagaaaaactatgtatatattagctaattagatgagaaggatgaatattttaattataaaatgattagttaataatgtatgcagccaatattatatgtcttattggtagcgagctacttccttagcttaattaatgagatcaagtggttatctctagcgatggatatatattagctaccaacattattgctctttcttaggtgagccggcggcctattaagtgagtttcttctttctttcttcccagaggtaattaattgacagaaacaattatatgtgtgtacatatatattaattaattttcccatgtaggaaactccaaaagataagttgaccttgctagtaataaattaattcaagcgcatatgttagttgacgaatgtgagtcataatttaaatcttaatcattttgtcacatatttggaccaattatagttacagacacttgtacttgttgtacatgtgaaagtgaaagtaacaatccgaccttatgtaaggacagtccatgtctactttatatttattttttgctcaatgtatattttttaaaaattattactttaagtcagcctaattgtaatgaaagatataaaaattatgttatatttagcacaataaattattttgagataaatttaaatcaaattttagcttggtacttgcacacaattataaaattttgatgtgaaattgaatatctcattaatgttttattaaaaaataaaaactaataatcactttataatcaattttattattattttaatatgtaagatagtaaaaaaaaatataaatatttcataatttaatgtcatagtcaaatatactaataaaataatacaaatgacataaatgtaaatgaaaaagtagtacatttattgtggcagggcagacccacgaataagcgaggcgggcgtcgaaaagaaaatatatatacattttaattagttacaacatatatttataataaaagatgatttttataaacataatattaactttggtgtaatggttaagctacttagcatataggttagagggcaagagttttaatcccaccaaaagcaatttttttctttttaaatttgcttttgcccccctcactttgaattctaggttcgccactgtatagtggtgtaaattttacatcatagcaaatgttgtgtcaaaatatttagcacaaaatttattatgtaccaaatttacatcactttttcgcacaccattgaaacacatttttttattaaatgagctatattttagctttccaccacttatttacatctccattggaggtgctctattatagataatatcgaggagggtactagcactactaaaagctggattaaacaatcaggtaaaatattaccatcggtcaccaacaagaaaactaagtagaataggcgacgataaaaaattatcgaaaaaactttttcctaacaatacaaaaccgtcaaaaatactgagcaatatagacgaaaatttatagtatagacgatcgttttaaacagacacctatattcttaaaaacattataatttgaaaccatatctcaccgatggaaccagatctcaccacattttggttcaatacagtaaataaatatatatattcattacaaatatatatatatatattaatttttgcacccatccattgacggtgaagacaaatctcaataattatactacgaagtactcaaccatatatatcgctcctttgtcatggattttcaaaagattagcgagattttcacaacgaaaatactaatgtaaaaggaaaaaatataacaaactctcacctatttttcactgtgaacgagaagagaagaggaggagcaagagagagcgaggtggccagttggtggtacgattgggtcatcgactcgaacttgggtggcggtggtggtttgattgggtcgtcactcgtcagctcgaaggtgggtggcagtggtggtgcaaattggaccaagagagagagagagagaga

SEQ ID NO: 45325 - DNA, 947 bp, Cannabis sativa
aatactgtgagaaaacttgatcattgtggtggtaccaagtttgaatatcttctctcaaaagtatatgtataatgtttatataatacatattatgagtagaaatataatgttatgattattatcactttaattaaattagccatatcatgaattaattaaaagaaaactttctcacaaagtgtaattgtgttttaaattaattagatcagtgcagtgttttacttgcaagtttgtaacatatagaaataaacgatatacaacaataaaaatcaataccacattagtcttctcttgttgtataaagggtaaatactggtataaatacctaaagttttaagtttgtaaagggcataaaaccaataatttttttagcggcataagtacccaatgtttataaaactgtaattttctttcagtttcatcagtacagactctgtaattgtcttcaatagggcacatataagactcaaattctaaattatttggtataaacagaaatatgtagtatcagttacttccaaatcttcttttaataaatttaaaacggagtctgtattgataaaaatagagcaaaattacagttttacaaacattgggtacttatgccactaaaaaaatcattgggtttatgctacttacaaactcaaaactttgtgtatttatgtcgctatttacccttgtattaataattttaattctattaatatattgtgtatgcacgtttggtaataactttttaattagatttttttaaaaaattagaaaaataaaaatattttctaaaattatgctctataaaaaactttttactttttaattttttaattgaaaatcaaaattttaaaaattttgaaaacgataaagaggtcactttcaaaaaaaaaaaattaacagttttttttatcaatattttagattcctaccccaacttagaccttggaacccag

SEQ ID NO: 45326 - DNA, 3696 bp, Cannabis sativa
aattttcattgtagcttattatctgtcagtgctttgactgattcaggtgtttattctttcaatttccaaactaaacattttgtcatttacgaaaatttgaggaaataggtgattggaatgggtgaaaagattggaagactttactatttgaagtctgctgctgaagcacgaactaaacagaaaccctttgtattttctgttttttctaattctaagatttctattgatacaatcttgcattagagatttggtcattcttcatgtattaaaactcattctttgaataaaattttgcaatttcataataaatcttctcatgttttctattgctctatttgtcattatgctaagcaaaaaaggctttcttttatttccaatcataacatgtctgctaatgtgtttgatttaatccataatgatatatgggcccctttctatactcttactctagatggctgcaagtattttataaccatagttgatgaccattctaggtatacttaggtccatttcattaaaaataaagcagaagcacaaattgttattcctgagttcatgcagcttgtaagaactcaatttgatgttcaaatcaagggagttatgcactaccatttttgtgtgcaaagacttgaacaaaattttgtggtgccgaagaaataccaatatttgctaaatgttgctagagccttattatttcagtcccatattcctttggaatattagaatgaatgcatagctacagtaacatacctcatcaatagaacacctactccaaattttaaatttaaaactccctttgaaaagctcaaagttaagcctcctatgtatgaccatttaagggcctttggctgcttagcctatgcatctactctccaacatgccagatcgaagttcactcctagagcagctccttgtgtgtttctaggatatccttaggcatgaaagcctacaaatttttagacctcgacaccaacaaggtcttctattttagggatgtccattttcatgagacaattttccctttgtcaatttttatacattacctcctcactataatcatttttcctctcttcctgctaggcataattcctccactcattttgacacagtcactgttgaggacactcctccttcctagagtgacctacatgacacactactaaacaatcctacttaaataactatcattgtttcttatctactaacaatgtttctatttcatctcaagacaacatgcttgtcactgcacattctttaattgcttgattattcaaagctttcacctcatttttgagcttttgttttggccatttcaagtctgaaagagccaacctactttgagaaagcacaaggaatccttgaatgggataatgttatgtcttctaagattattgctttggaagcaaatgagacttggatcattgttagccttccaccacgacagcatgttattggttgttggtgagtttataagatcaaattcaatgttgatggattagtagaaaagtttaaggcaaggttagtggcaaagggatataatcaacaagagggggttgatttttcgagacttttgctcctgtcactaagctagttacattcaagttagtccttgctcttactgttatgtatggctggcatttacatcagcttgatgtaaacaatgcctttcttcatggggatcttcatgaacatatttttatgagtctacctcctgggtatagtcttaagttggagaccaaattgccaccaaatgcagtatgcaaactcaaaaaatctctatatggattaagataagactctagatagtggtttgaaaaattctccactgctcttattgaagaaggtttctctcgttcagctacagatcactctatgttcatgaagttctcttctgaaagtttcatcattctattggtttatgtagatgatgttattcttgcaagtaacaatattggagttttggaagctctagaaaacagcttgaacaacaggtttaaacttaaagatttgggtaacttaaagtactttctaggactagaagttgctaggtccagtaaagggatctttattacacaaagaccttatgcacttcagttccttgaagaacttggacacctaggatctaaacctgttagcacacccatggaagtaaatttgaaactgtcacatgaagcacaagatgaaaaagatgattttgcatatccaacattatatagaaagatcattgggaagttgtaatatctaatcgtcaccaggccagacatagcctaccctgtaaacaaactaagtcaattttcgactgctcctagatctagacatctccaaactgctcaaaggattttgcaatatgttaagtcaagtccaaggcaaggaattctctttcttgcaacatcaaaatattgctcaaagcctacacaaattcagactgggtagcttgtgtggatactaggagatcaactacagggttttctatttttcttagggattcaatcatctcatggaaaagcaaaaagcaacaaacggtttcaaggtctgctgaagcagaatatagggtaatggcaaatactgtgttgttgtcattgctcaaagaactcaggatagaacagaaaggtccagctttgatgttctgtgataacaaggctgctttgcatattgcagctaatctagtattttgtgatagaacgaaacacattgaaattgactgtcttgatcagacaaaagatacaagaaggattaattcaaactttacttgtctccaccaaagatcaacttggagatatgttgacaaaagcacttttacttaatcagtttaatgttttaaaggactagattggagtggtagacatataccatccatcttgaggaggagtatcaagttgagaagctgaacgagttagttagaatcccttagacaaattgttaggtgtagactcaattagaatcagttagttgttagttactgataatagtaaccaaattgtatctagtatcaacaagctatatatagcttgcttattgtactctgtacactttcattaatgaaaacagagtattcttctttctgttatttctctcttctctctcaatctcataaactgagtacctatgagataaatatcaagtggcaaaggttgtcctcacattttagacccccaaagagccacccagattaactcatagcctctagctcaagaaacatctcatattcatatttgaccatacaattcttacactttcttttttaaaagctaaaataaataatataacccatataatataaaaatacaaccgcgtgtgcgtgtgcatcttttgtaattttacacacgtggtttaaaaaaggttcttctctcttcattctttgattgtattctcataacaaagcgaaccaaatcaaaattctgtctcaacttatatcttaattcctttgtccctgtctgccagtggcagtcactcaccataatataatcactttcttcttctataaaacccaattcacttgacttgacttgacttgtgttcaatttagttaccccctaattctaataaacaaagatcaatttcatgatgagaaaagctaaaggttttaagcttaaagggaagccaattaatgtgaagaatatctacaaatgggtcattaatagcagaagaagaaaaacaagaaccagaagaagaacaagaacaacaacaaaaagtatt

SEQ ID NO: 45327 - DNA, 1034 bp, Cannabis sativa
aagataggagtttctgaccattgtcagacatttaaaagatttattagcaaccctatggggaggtatttcataatcaagaagtgtataataatatctgccagcaataattcataatcattcactctttcttagtttgctagttaccctttttttttcttattttccatagccggtgtttgggagaggacagctgggtaacagtagaggagccctcagtataaccaatgaaaaaattattacctcggtgctggatagaccacgtagtgagtctgtgagtccatctcctgcattaataacaaagaaacaaatcaaggaagtaataatcaaacatcaagatagtgcaccaaaagatgattttcaaagatgctagttactaagtgtgctgttttcatcaagcgttggggcgtctgcatcctgttagattaggtgcaatgatctctagtggataatattcttctattcatatatgcgtacatgttttaattttatgaaatgaaaataggataatgaaaaacaataagcagaggcttggttagtcctgagactctgttatgaagtcatatctgaaaaagaaaaaaaaatctacaaaatcagggctaatttactaatggcctcaagaatattttactagtatgatttagagtgactctagcttttttgatttctataccaacttgctacaagacttctaaatctacagaaataaaaagttgaaaaccatgactcgaacaataatagagtacacctacaagcatcaaacttttgtggttcacaattaacaatagcaactgacattcttacctgaaaagtttcctgaaacaaatgcacgggaagcatctctagattgcatccacagaacagaagggaaaacagcggtcagcattggagtcaaggcaaattgtcacacttgatgaaatgtaacatagtaaaggattaagttaataacataaaagtaactttaaagcactagtccacatatggtagaccattgtctaacaaaacaatagtaaagtttcatagtgtgccaaacatgt

SEQ ID NO: 45328 - DNA, 3618 bp, Cannabis sativa
  modified_base (2524)..(2524): a, c, t, g, unknown or other
taggtatataatataattttcttattatataatttatatttctatgtattaactgataattcttgatttaaccatttttttaaccatttaattattcaatttaagcttagcataacataatatatatataaataaataaaaatatacacacgatatatgtacgcaaataagatgcaatatacatacataagcttttatatatatatatatatatataagaccatactgctgcatgtggtgaataattatgggcatttattatgcatatgttcgtgtacatatatatatatatatacaagtgttatataaatatatatgaattaattaatgtgatgatcatccctcacatggcgtgagtttcgtttgtcctcgtaaacactacgtactggaagtttcttcaggcacttataattaagcgggaccccaatatatacagatcaaacatacactaacacctccatcatgatggagatatatatgcctatatatatagtatatatatagactatagactctatatataaatacacccgtaagtatagagacatgattgtttttattatttcataattttccgtcccttaaggcttttgacccccccttattctccttaactataatttgtctatatataacatattatataaatatatatatatatataaaagcatcatgtttccatgaaaaatatatctatatatattcattaattatgtttacaattgaaattatcattatatagtaatatacattactaacaaaattagaatattgaaaccaagaaaactaaccaaacaaattatgcgtacatttatgatttctactaagttgatctatagcaacatataaatatatatataccaattaatatattattatcattattaatttataacactacacgtgatttaatttattgtgagaatttatattataataaaaaataaatagatgtgtagtgattgaaattgatcaagtggattaatggttgattatttgggaaataattaagggcatcccatgccatgtgattttgccaataaaattaattaagatatggtcataacaactttagcgtggccaaacataagaggaatgttttctttagatattattctactacccatttaattaattagtttaactacttacttaccattttctattaattattacaatatattacaaaccctaaaagtagccaagaaactttcaatgaacgcaggtgccactagggcatgccccccaacttttttaatttttattttaaatttataatatgtaaaaagtgattaaaaaatacaaaataaataattttttttataatatatatttacatatgctaggcccgtttaattttgggtttttgccattgacactttattttatgtaagtattaataaaattttatcatataaaaatgaattgatttttttttttattttaatagaacttcttaaaatgagccctacactcagatcttcttcccaaaaagtttcaaaattgtcaactctgatcatggtctatatatctataatcaacattttatataatttatttatatattttgaatttgatatcctttgggagagatcatcaaaatgtgcttagcatgtggaaccatttccattacacaatctataaagaataattaacgtacgtccatatatcatgatgactcaattgcatattatatattatatatgatcaacaatttccgaaacatattgcataatgaattaaatataatatatatatataacataaaattatatatatttcatcatcatatataaggcatgccacgaggttatataatataaatatttatatacatatatatataagttggcaaaatcgtgaccatgctgttacgatctgtttctacattagtttttttcattaacttttccaatcattactacccaaacaagaaataatattttatatatatgtacatatatatcccgatcttttttttaaaaaaaattatgattaccttcttagaaattagagatctcttaattaataattttatatataaaagttttgtatatatatatacatttctttatgcagttgtattgtggacaatatcccacatggaataaatggtagagaattgagccatatataagaacatgggctactttactcattaccaattggttttgagatggagccccatgattctcaacatggtatcagagccatatcccttgcggacaagtcatgtccactctgatacgattggtagagaattgagtcatatataagaacatgggctactccattggttttgagatagttccaagtcaaatccatgttatgccagctccaaacaatatggaaccaacgataatctattccacactaaatctatatggagacatacattaattaactcttctataataataataataataataattattgctattaagtattttaatggacccaacatatatcatactgatgtatagtgttttatgagtggttaataattttttatattatttantaaattaaaatatataaaatctaacattaaattacatcaataataataggtcatatatatatatataagataacttaagatctatctcttaacatttctaaaaagacaatccaaatatattatttaaatatatgatataaatagtgatctatgaatgaaaaattaaaatagagtttgtcaatgaagaaaaaatctctcttatatatatctttttattgtctatatatgtttcttttttatcgtcttatatctttaataatggtgatttatcactgttttgctagattagaagaatattaattgtattgaagattgtagagtttgttatctttttggaaattagggcttcatagattatgtcattatttctctggttgatttttagatctggctatatattgacccaaatctcaatcttttggagttgactacttagttggatatttgattatttcgtttatttataatttaaataataaaatcgtcattttttaatttttattagaagattattaattagttgataattattaatggtatggtaagtggattttgttatgttcatttaatttagactatactttacacactcttttgatatttgatcattagtaacttattgtatttttagttgagagatattggtgttagaattttttttctttatttttgtaaataatttaataagatccattattgttgattctaatatttgagcgattaattaataatgaactttcggaagatttatttatttatggacatttccatttttttctctgaaaaaaatctgtaccacacataaaagttaaaattaatgactactttttttttttttttatgaaagaataatgactacctattatatagtactagaatctaatttattttaatagaataaaatattataaacaaatttatctgtgatattcacaaatctcacaaaagtgtttacaaattaaaccaatggcgattttagtttttcatgtatcggtgaatatatatatgtacattatatatttatatatatatatagggatatgattttgtcccgtgattgtactttcacggaatgcattccgtgatgtacgaca

SEQ ID NO: 45329 - DNA, 1802 bp, Cannabis sativa
acaatgacttcagattagtgcttttactcaacttctatcatcattttcttcttttaatttttttttgatgaattttcttctttaatttaaccaaattctgtagatttataatttaaggttttctgagtgttttataaatcttaacaagatcattatagtaacattagtaaagattctaaagaaacattaatcaccttttgaatcagctaatttttatggcctctctatatagtaaacttggtcaattgtggggtttactttcatacttgcaaattgtcaggtattaatgactgacaaacttacgtttgataaggataaattacatgtttgctagcgtttctgtaatcttcaaagaataattgaaggagaaaaactgaaaaatgtgtgtgagagagaaagagggagagagatcgttggtgttggcacatacaaagacaagactgtacagcagaatgaaaggtaatccttggctgtttcatttcgttccatatgcatttcaacgggctgatgtattatcatgtgtttatatacacttggagaagactaggagtagagatcgattagacgagtgagatttgcttcaaactatctgtataatttaagtcactgcagactgtaattcttgagtttgagcagattagttgggcattttgcagggtgaagccatgaatgattggtaaggggaatccttttccgagaattccattggtgtatggtaagaagacagtttgaacaaaagtccaaatcacaggctgcaaaataataggatatgaataagttaataaaacatacttataaattacattttgtatcaagtaaaccatgtcaaaagaagagtacctgtattagatacaagtgtagattaccaactttactccacttcaatgacattgtgaagtcgttcaatctcacactcccagcaaggttattccctataattttagttgaagcagaggtacgaatcacctgtaagacagaagtgataatagtttttagggctggggtagagggagatggagcatcatgatcagaaatgatatcaagtagagtagagaaatagcctccaaaaaccaaataagaaaacaccaaagctgctcaaccatgaaaagggtgcatacatgtgacaatatgaagctgcagagacaaaagataattttgtttgaagagttcaaaatacttctattgtgtgctcaagaatgtttgaaactttaaaaaactttccttgctccaagaaaaaatttgtagaagaaccttaagtctttctaaatgctgcatacttcctaggctcttttagtggttcaatacctcctccatcaagtcgaagaaccctttttgcacaatgtccaataatagtaagggtaactaaattaacagcttgtgtattcttagtatgggaagtaatatgaagaacactagagatcacatacaatttcaattcttcaaatacgacaatatatgcctaatagacagtattaatatgtatacttgtgaaaataacattactattaatagcaaaggtcacttgtgtattacttcttctagacaacctttagtcaaattgagaccagtgatggtaacatgttttgaacacaaacgtttttatgttgagttgacaaccacaccaccacaatcatcatagcaggtttatactgttgatggaaaagtggaaaccaagaaaaggtacacagagacatgtttatatgatagaagaaaagaaacgacataataagttcagttctaatagaacattttaattttaaaatcataatcttaccaaagagatacatgcaactggagttatt

SEQ ID NO: 45330 - DNA, 1287 bp, Cannabis sativa
acccaaacccacccgaaaagaccccttatatatattatatacaagagccccctctttaaagacaaaaagatgtatgtacttttattaaaaaatgtaaaaaaaaaagtgatatttttcaaaacaaaaggccgagcccaacccgaaatccaatctcaacccacccagacctgtcccaacctacacccgacccacttgagcctgacacccaaaaacttggtccctaacatgggcgggttcaatacctataaagcacaaactcaaaacccgaaaacctgaacctgaacctgaacctgaaaaactcaaaacccgagaaaccaacccgatatgtagtgacacgtgctcattcacaaagcaaaacacaaatctaccaatattttttatatatgaggataaatcatgaagaagaaaaaaggattgaattttattttttgaccaaaaaatgctaaattagatatttgtggactttaagattttctaacctatgtaataagtccaaagtcatagaacgaacagtagttgagtgtagttaacaatctgtaattggggcccttggaagggtgggccgtgggccggttcattagttgtaaatgagggcccataatataatcttaattagtagtcctttctaattaatatctttcttaattgtaacctctcacatggatgtggaccaaaataatcaaccaaattatacacaattactatttagaactattacaacaacacatgatatgttcactttaataacagtgaatgttgccacacgtgggaaacctaatatgatttttcttccttattatgattaattaagaaaattatggacaacaacaatttgattttgtatattagaataagtgtttgtttatgcattaaaatattattattacgtcacatgtttagagttctttttgcccttttttttttatagaaaattgttaaaaggtagtgtacctagatgataatgttattattgtaattaagtatggggtctatataacttaaaaaataatatttaagcaatatcgttaaccaatcgtgaagcactacttataaaagatactggacactactggtacctaatagtaatactcatgagtgtaaatattgaataagttgatatttcgtataaatgtgttatgtttatgtattgatacgttataatattgtaagattaaaacaaattcgaacataataagaatactaattaatgtatcaagaatctaacacaaatacgatctatttaattaggagattagatgaatatgaaccaactcatcttcatttata

SEQ ID NO: 45331 - DNA, 850 bp, Cannabis sativa
cctaaacaagaataacaaaaccccaaaattgaatgaactgcactgtaacagctgaattatcagaatatacaatttattgatggaataatacttaaaaagaagttcaagtttaaaagaattagatccttcttcaaaattacaaggaagaatcaatattgagatgatatatatatatatatttatatatataaccttggcattgcaatcgattgggcaagccttgaccggcagcaggtccaagaactaaatgatcaaactttgtccttttggtgggcagatctacaatggtagtgctttgatgcaattccctaactaaaattcacaccgtaattcgtgagtgtcaagtaaatccagaaaaatactagtaagaaacacagttagaagaagaaaaagaggaagaggaaatttaacctgagaaaaaatatggaagaaagcatagaataggaagaaggataaggaaacgacgccatccgccgggggttctcatcatcaaatgggcgataccatgtgagaatctctctatcgaatcagactggtttggattggaaacttaaaagagttaccaagaagaagaagaagaaaagaattatttcactggcttttttttctttttttggaataacttcacttgctctggatttcagactttggaacgtttcaaaacgacatgtcgtttgtaattttccactctccaaaacgacatgtcgtttgtaattttccactctccaaaacgacctgggaattctcattttgtgcactaaagcaatcatgtcgttttcttttaaaggttttttctttaaagctcaaattttataggttttctctttgcttgctttgctcaagcaggtac

SEQ ID NO: 45332 - DNA, 2644 bp, Cannabis sativa
  modified_base (63)..(63): a, c, t, g, unknown or other
gtcagtcatcgatccaggaagcagccagagtgtggcgtacccgtgtataagagccattagtcngtgggtgtaagggcccaatggaagcttgaagcggggacgttacattaagtctgttaagtctaactaacttaacagctggaaccatcaacttatgacctttatcttcagcctatatatactgttaacacttatcagttcgaggagtgatttaatcagatgagttttgagaggtaattttgaagagagattgagagttagataaagagagaggtacagagaaaagagaggttggatttgagttttgtatgaagaatcttttgtagatgaagaagatttttgagtaagagtgtgagagaaaccacttttagagaactcaacagagaattgatcgatcaaccgtaatgtactatcttcttgctcaatcaataaagaagatttggtggtgttccaaaagagtagagccttaaatcacatcaatctataggacttgaaccagtatatatcttggtgttgattttattgtcttactgctttaatagtttttaattttagataactctattcatccctattttctccgattactgtttggtttcattaatcttgtcattgctaattatttggtgattgaaattttagctgttttgattctgcactttagtcctaattttcccacaataataatattcagcttcaaataattataattattttttatatgattgcgtaactattattataaacgatgccaaaataattaaaataataaaatacacatatagtaattagttaatcaattgtaataaaaatgagcacgaatttgtgcctgtataaaaaaatagattagtctatttaagaaaaataggccaatgtgaataaagcacgccacgaaacaaccaaacgttccatgcttaccctataaaattattgcacgacacgtcatgatacgacctatattttttcatagtccgacataatacgacccttttaaaaagtcaaaaaaatataaatcgaactagctagtacgacacacacatacttactaggagtgtaaatagatcaggtcggatctgatccgactatgatttgacccaatccaaatcatgtaatgatcctccctgtcttgccccactagatcagatacccagattggatcagatccgacctgtctttatcttttattttttcttaagaattttaattttatatctaaacttataattttatatctattttaattttgtattagtattatttaatacaatactatatttggtattgacttgtatcaataaattgtgtaaagttataatatatttctaataaacttgacccccaacatcgactacgggtcgagtccgggtcccgggtttgggtctgggtcccaacctaggggatccacgtccgagtttgggtctcgggtcccagggggtccaactctaggtctaggtcccgggttcggatcccaagtccaagtttgagttcatgtcctgggtccgggtctcgggtctcgggttcgaaacctaggtttgggtctcgagtctggctccgtgtccaggtctgagtctgggttcaggtctcgtgtctaggtccaggtctcgggtccgtgtcccaagtctgggtcgagtccgagtctggatcccaagtctgagtccgagtctgagtctcgagtgctgtgtttgtgttcgagttcgggtccgggtcagaatcaaggtcaaggtccgggtccaagtctgagttcaggtgttgaattaatttttttttaatgtgttatgttttaaattagaaataaactgtcggattagaacttcaacttaatccaactaaatgaatcttttagacaattctagtagtacttacattacagctctacatagatgggggcatgttaggaaaaaagagtatgttatatacatttgtacataatattattatgatcagtacgtataattttgtcaacttggagcctaattaataacattaatattaatttatttacaagttggtatatatagaatcttccatatcttcaaatatcacatattaacatacaatttaattataataattagtagctagctatggacctactgaataattaaatcatgacaaaattactcaattattattcaacataactcactaaaaaaatttgttagtctcaattattaatagccatttaatagttatgtaaaaaaaacataacgatttgataacgaatcatcgtagaataaaaaagaactaatcgaaaacaaaacaaaacaacaactaaatcacatataagattaaaacacttaaaaccatatcacaattataaagctaattacaattgtaataaaaatcgaataatcataacaaaaacacataatttatatcaataacaaacgtaaggtacttgaaaattaatattaaaaaacacaataatattgaagattaggattacttaattaattgagtccaatgagggtgaattatatattgatgatcaattataaaattgtgtggtccaaaaaaaaagtattataggggtaatatatatatatacacacactagctacaagattgagatgagagatttgtgcgtttaatgaaaacacatgataagataaaaaaaatatatgttttttatgaataattaatt

SEQ ID NO: 45333 - DNA, 1425 bp, Cannabis sativa
  modified_base (52)..(69): a, c, t, g, unknown or other
  modified_base (149)..(156): a, c, t, g, unknown or other
tactttttcatatcaaatattattttattctgtattattattattattattnnnnnnnnnnnnnnnnnnattattattattattattatcgaatatcagtagtatctaacactttttagatgtgtcactttataattagttagcgatannnnnnnnaaattattatattaaattatattaaacccgacgatacttaattgtattaatattaatattgatacttaaaaaaaattactaaacaccattgatatcttttaatatttgaattatttcttttttttttcttaattataaaatattattattattattattattttaaacaactattttcatctctccaaatattataatattttttttgtttctcaactcttccaagtgcaattattgggtttagtttgaaaccatgaaaaagcaaacaagtattattattctttgtttattttaataattgttaatttaaaaatagaacatagaacaactcaaaaaagaaaagaaataaaattgtagatcttgctttgattttacgaaaatgtgcattgcgtggagaattaagctttggcaaattagattaattatattttaattaaactaatatagtaaacacaaacccacacctcacttttaattatctaatatgtaaactgtttttgtttaatttattattaatgttttttaaggttaggttagacttattatattacacctgtaatatatttccatattttaaaggattagtactcactccccttcaaaaaaaattaataatacttcaaaaaaaaaattataactttataaaataaaataatttaaatattttggactgacggagcacgaacccgaagcttccgcctttatagatggtgccctgaacaattgaactaatcttgttttcatattttttttaaataatatattacactattatatttaattttaaatttttaatatatttatttaaaaagtaattacggtataaatatataagtttatgttgtaataaatacttaaatttactttttagcgataataatacataaattaataacttggaccaataaatgattgtctataatttaagtattattatcacaaaaaattaaacataagtatttatttataactgatttttggaagcaatttttgtttgtccttaatataaaatttggaatcgaattaggactaaagtttattcagtgaattttgattaaacaactcttcactttcatatataatattttttcttttaagaaatcaattgacgtaataatcatcaaatattgaagttaatttttttttttttttttgaaagaaaaatattgaagttaatttaaatatatataacaactaatttgttcaataataatataacaactaaaaataaatgttatgatattttattggattataattaaatcttat

SEQ ID NO: 45334 - DNA, 4813 bp, Cannabis sativa
  modified_base (52)..(58): a, c, t, g, unknown or other
  modified_base (4100)..(4102): a, c, t, g, unknown or other
ttagaggcacatgagagcaccctaaaactataattggcccattaaattatannnnnnnactaattatactcattagcccaataagcctaataaaaccccatagggttaggtgttggatatgtaaggggttaatatgtgttagtatgagatgagagtgtgtgtggtgataagaaaaagagtttttctttcataagctccccttctaccatcttaggatacattgaaggtttttggtgtcatagcaacaatggagaatgcaaatatgggaggtatgtgttttttttttatattatttgtgatgctctaaatagagtattgatcttggatgatgattatgagtagtaaagattagcatttaatgtgtttttggttagctcataatctatagaaaaattaacacgatatagaacagatttttctaaaggagatgcttggctattgttgacccgacttgtaaaaaaaagcttaacctcagccatttctcaattacacttaagatgattgcctcaacctcgacatttgtatggtggtgaatcttctcatatccatgagaattatggtgttgatgagaatattggcaatacatctactttggatatatcacttaatggtgatcaattagtttctggctctaaagaaccatctgttacttttaaaccctccacgcttaaccagtatttcattataaatcaccaacctgttgggagtaaggtgaacaaagtgacagccaaatgctccatcgatgacccctcaaataattactctgatctctcagcaatttacatgccagtgatatcttcgccattgtctagtaacacatttgcaacttaccatctgcctagccatactgtcactatccacaacaataaacatttggtgaactctccaattatttttcccatgtctgaggctacttcaattgcttctactgctgctgaattgccaattgaaaaggaaaatttgcatccaaaccagcaaattaaaagacacaacgatggaattttctgaggcaaactctaaaaagatgcagaggaaatacaccaaatgtattcacttctaccttgttagttgatgctgaaaatcaccaccaagtttttgatgaagtcatggattctgctggtggtaacgacaaaattgcgaagactgttttatagtcccgcaagcagccatgaaaatcatcaattggaacgctcgtggtttggggaacccgagtgctatctgcaaactctatttgcttgtcaaagagcaaacccccactgttctttttattatggaaactaaattagcttgtgattctatttctcgtatttgtaatcttttacattttaataatggacttgaagtcccaagagtagactttagtggtggtttgatgttactttcgaatgatgatgttgatgtaactttacaaaatttcaatacatatgttttcgattgttatgtgggttttcataatggtccaaaattggcacttttctgctttctatggggctctagctacaaaaaatcgatgccatacttggactctgttgaaaagacttaaagatgttgctccaatgcttccttggatggttattggtgatttcaacgaaatcctttataaccaaaacaaacggggagggggcgatgaatttcgtcatgtattggatttttgcctcttaaatgagctgccttttgaaggtgatctgttcacttggattaaaggaacgcatagtgtggacaccattaaagagcgcttggattggtacgtttttgtatataatccaccaggattatctacttttgttgtaactatgctcactgttgtcgtacttgtgttgggtttacttcccgagccagttttcaatagctttatttcagtcctcgcttcctctttacgcacaaagacttgtgttctttcattgaaattgtttatgttcctcacagggcgaccctggagatcatcccataactcacctcatgttgtagataagtcagtggtgatccttgcttaaagtgttgttagttgaatactatcatttaggtttttgacttttacagcatccgtactgaagcgacttgactacgccttaagagattccccaggttgttgctttatgttggtcacggatgacacttcaggtcgacgatctcttgtagcttgaaactgctttttaaattccctcgatagttgttcttaggatgttattgaatgatgggtgaatttatcgaaccaagtgctcgcatcccttcttacggaggttgggaataaaatgcaatgcaagttattgatacattgctggctcgcataatagtgttaaagttgtttaaatgagtgattgagtatgtggtcctatcgtactgcgagacatgtgggttcttaaatccctgaacaaattttgaatattagatatcttgatggaatggcttagtttttcttgtttgagtcatattctggcaatttgccatgctctccatcttgatatttgaatttatcctctagtttaattattcgtagctggatgggatccacttgttgctgattttcattttgattaacttaattgcacaaatcaagtgcatttcggtttaaacgctcgtgaaggtcaggctgtctttgatttgggtgcacgcgaaggtcatgctgcctttgttcatagttacttacagatcttgtctctgagtaactctcatattgataacttcgtgagttacttatgctttcttgcttctttattcatgcgagatgattctggcatgtcaattcgttcattcccttggtcagcaaatttatgagaagtttatggaacatctctttgatgttcttgattcctcgtgttattaggatttggttggtttgtttggtccataggagcatctctggtattcccaggttgttcctcctgggtatttgggggattctctggtatacatcaatattattttctattacttctgataatcttctaactgtgacatttttatgtttatgatttcttgggactctttgtcctatcatttcacccaactgtggcagtgcttcataaatccatatctatgaaaaaaaaatcatatcaaaattatatctcaaaataaaataaaaaatatccaaaaaataaaataaaataaataaattataatcataatcaaatttcttaccagaaatatccaaagacaagtaaagaggatccacttaatatccttctcaattggactattcttcatatcttttttcgtgatttgctctattattttctcatatgccagctttccccaacaataattgtcaaatattggtaaattgtccactcgttgtagccattcaagatctataaccgaagaaagacttggcagtattagaaatgcactgagcaaatagataaagcacaacttcactctgtccctagtattttcttctctagatatgctatctagagcactagcattgtaatgaccgttttagtaattttggattagtaaatgcaattagcactaatttttgatatttttataattatttatgaatttaattatttgtgggcacattgttagaaatgggcattagagttataatttttcaattccagagattttattaaactctaggaataatatttgacttatatgtgaattatacaatttatgtaatttttactcggcgacaacagaaaaatgcgatggatgaatagtttgatcacatgggtaagtttagaactttatttcttagagggatatatatcggagaaaataaaataccgagattgaacgaggttatggaatttgatcattttacccctaggtttgaaaatgtcaaagttaaggttatggagggcattttcataattttaaatgatgggttaggtggctgattttgatgatgacacttagcagtaaaatacttcagccaaggttaatgtaattaaccttcatttcatttaaggaaaattaaaaagaaaaatgaaaagccaaaattcatgaacaacttctctttcccttcctctctctctctttgaaccagccaaaaccagggggtattgttgttgaactttggtgatttgagcaagggattcaaggagtatcaaggtaaggtaacactagaaccatagtcttatgttttgaannnttaaagtttagtttgagtatgtgattttgtgatatatgagctgttagggtttgattcttattcaattcgaattctaaggttaatttgagttgatttaaagttctgtatgctggtttggttgtgttgggatgaatttgctcaagtttgagctttgaactcaaagtttagatctttaatggcatgtttgatttcagtgtatctttctgggaattactggttggaatatattgtgtatatcctaattaggtactctggaaggtttggttgcatttggtggagttttgagcaaaatatggaatttttggggtgaactggtataaaccgagtaaccaattttaccagtacctgtaaaaccgattagccagttttggcaggatccctcaacaagtcattttctcaattcttgtccattttagtgccttagttgggtgtttccctatttcctgatttagtgtgatccctagagagtataacagaacctagagttgtgagtttgggtttcctgaattaaggtttttgatcatgttatttacccggtttcattatgtgattaaggcatttatctagcacgagactttccgttcatattagccagcacacttgaatctgtaaagaaggtaagaactgtatataatgtgtgatatggatatttgattgtatatatatgttaagtgtatatgcatgcttatatgttagttgcactaccaacac

SEQ ID NO: 45335 - DNA, 2525 bp, Cannabis sativa
aaccattgaaacctcttccttatgtgtaattattattgagaaaagatataaaagtaattaaaattataaaatacatgtataggttaatatttagatcatcaattataataaaaatgcaaatatatagagcacggatttgaacctgtataataaaataagttgatttatttaagaaaaacggatcgacccgaataaaacacgacatgaatccaaatacgacaagaaattaccgaacttacgggccgcaccatgtctatcatataaaattattacacgatacggcatgatctatatttttttttataacactattcatattttttatgacctgactcttattttaaaaagtatgccatcatccaaacaacctatatatattaaattaaattaatattatattcataattgtgacatgttgagtgaaaaaagaaaagataaaatctcttgctaaaataataattgtgttttatctttaatttaaaaatttataatattatcattgtatagtgtgctaatccattttcttatatttatttattttgtaagtagttttagtccaattagttatattggatgcttcttgaaggtggtctcaagttgttttgtttaaatttcttagataacttagtcttatataaattgttttgcttatagtgagtcagtgactcatattttaactttgtatatctttagctagacaattaacttgttgattggatgtttcattgcgtcaacaattatgatagtgtgtgatttaagtcactctctcaaaaaaagaaaaaaaaaaaagaaagccctaaaattaaaatattcaagatacatcacaccaattcaggggcactaaggttatgactaatagtttgggcctgcagggccggtcctgatatagtttgggccttagaaaaattaataaatttggacattcttcacagaaagtataattatttttttaaagaaaatgacaaatttataaaaataatgaaatttaaatttacttttacaaaaatacttactcgaaattttttcaaaaatattatatttttataaaataacagtgaaatacaaaacagaataactaaaaataacagtagaacaactaaaaatcaatcgtagaacaatagtaaaaacttaacacagtacacattataaaacttaaaattttttgaaaagtattctaccccacaataaaaaagttaaaaaattaaaaatttcagtatgtgctataaataattcaaaaaactatactttctttgtaaaggaattttttttaagcctttaggctgggtgaacccttggctaggcgcatgcctagtatggcctagggggatcacaaaataatatgttaaagaccattgttattaagcattaataatgtctataatgatacttcataaaaattattatattaaattatataaaatctcgcaccaataatgatattatgctttagagggtgttagacatctctagtgtcttttatcgtttccctcttttaaacttagaagctaaacactgttgtattggcatttggtaatgatgctaattttcttttttctcattaattgacttattaaatgatggattgtgggttaaacaaacaatgtaatttgcccaatgctaggttctcaacatcgcatatatatagagcactgacatcaattatttattttatttttcaaaatatcttactgaaacttttttttttttattttttatttgactttatacttttacattacatcatatattaatttctctatttttctttatactacttaaatattatattttattatataaaccaaaaaaatttaaaaatagtaaatgaaaaagaataaaaaaaaaaggagaaatttagctactcattaatatgaaaattgatcatgtattggtagtgaaatgaaaaagtaaaaagttctattatattttatcgaaatgttaatttcatcaattagtggaaccaactcatcaacttatggagatttcaaaaaaaaaaaaaaaaatctcatcaagttatggagagatgacagtacaagaaggtgattctttagctatgctttgctaaaacttacaaatgtagcaaaggtatcactaaatatttaaaggggctttttatttttaattttacagcaaactgtttttgtaatttgttgtaaattttcagttcatattaaatatcatgtatttcctagttaacataaaattgtagatgataaaatatgcttagttatattggtgtccaatggcagatgactcaatttactcttaatctctttagttattacataagagtaatcatatcatcactaaaattatgaatcttactaattctttagtatcttcattttggatttggatgtcattagctcatatcattaatttccacactggactaatggtaatctatttcaaattcaaatgtgatttttagtcatagagtccattaatacccaagtagataacccttcacataactttgagatccttagttcgagtaccaattaaaacataattgtaatatataa

SEQ ID NO: 45336 - DNA, 4122 bp, Cannabis sativa
  modified_base (137)..(141): a, c, t, g, unknown or other
tcaatcaactgcaagctcttttttttacttgtcttgagcaactctcattatgtattctgttgaccccgagatggacttgttgtcttgccagacttacctgtcaatagttgttatcactactagaaaaataggttttnnnnncccacgttgagtaacttttaaactgtttagtaacacttcaccgcgcgtcactaatgagaatgattgaaaaaacagtttttagtgacccttcacgcgtgtcactgaacccttttacaattactcactgtgcgtcactgtaggcgtttaaagtcaagttttatcagactgaaaaattaatagcaacatacaaaaaatgtcagtatatcttttttttttattctttattattatttttggagatatagtgacccacaaaaaggaccactatattagatatttttctaaaataacataatatttaattcttttaattaaaattttatataatataaataataatttaattaattatatactgatataattaaatataacaataataatttttattaactaaatgtaaacaatactacaaaaatagtttcaactaaaataataaaactaaaaaacaaaacacaaaatatttttattattgaaaatacatatttttattaagattattaagtaaaataatacagtctttacacaaaattttaaactcaaattataaattatataaaacttaatacaaacttatatcagtttccaccaaaaattacaaaaacatgaaagaatgcctagatcaaattatttatccagtattcatttagaatgaaataagcctaaattagttttaaaatattacacaatgtacactttgaacaaaacaaacataaacaaccaaaaaaattcaaatctaaagctcgtccatgtttgaactcaaagtcccacacactgtcaactacgaacatcgaacaacaccaagcccgtcgaacccaagcccttcgaacacaaacgtcgatcgtgtacccagagccacaaaaacattaaaagcaagacccacgaggatcttcaaacgtcgtccacctacatagatcaaagacagagagagggagaaagagataattaggtggacaaaaatgaatataccgattaagctaatagtgtgggttaatttagtgggcgtttgagcaacggagatgtcaactgtggacatactggggtagagcagagggagacagcttgggctcaaagtttggaagcgcccgtcttttgtcggtggagctctccttggctttgggaggtcgtcgtcttcaatggaggagggctgataagtatagatctaaaagggagaagagggatgagagaagatagatgtgagaagagagctagaaagatataatctgaaaatgagaggcgcttggaaaaggagagagagggaaactattttagagttttaaaactattaccctaaatgaaaaaaaaaaattaataaaaaaataaaattgaaatatctattgagaaaggagagagaggaccttatgtgtctttacaattttgtttttttttttaaaaaaaaatacctatagtaacgtgccaggtatgacaggatatgctttagtcattcttcacgtgactctataattcagtatttttaataaataaaaaaattagaaaattatggataatactttttagtgacattttatatttttagtgactcatattatgatagactaacactaaaagttaagtctatttatgcgggtcactaaatagttaagaataatttttagtgacccacacaaaagtgagggtcactatatagtgtcgctaaaagtctaaattatagtagtgtattcacatctcacttttgccaaagcggtgacgagtttgaatatttctatcaaatattattcctgagacgagttatttagtgttcatttaataatatacggcttgggctgattcatattcaagtcatgtatacgtgtcagcttctcattattagccaaaattcaggtatcacttataatataaaatatagtaactttagagaaaaataaattttaagaaatgggaaccccaaaaaaatcccataaataaatttaagatttttaaaaacaaatatcactagaaaagttatcggagcagccattctcgcagaaaaatcactgaaatttttattgaagacaaaaaagtcggtagggttatgactgctgcacataaaagttactagaaaagttgtcagacttttcatcgctgctaacaaagtcgtcggagatgtcatcgttatcgaaaagtcattgaagttagatgttggagtcatcttctgagttagatgttgaaaattgaaaaaaattaaaaaaaaaaaaaaaaaaaaaagaacttgttacgtttatcaactatttaaaatctgacacaaagaaattaataatacaaaaaaacaataacatacaataataaaatcaaaattgaaactcaaaatcaccttacgtaaaaaaaatcaaaatcaatagttaaacataaaaactaattatttaatacaacaaactgaaaaaaatttgaaaaaaagaccgtaaataataaaaagataaattgacacacaaaaatcagttaattaaaaaaatcacagaagccagttaaatgtattagataattaccgattatgtaaaacaatcaaattataaattaacacacaaaaactaattatatgaaatagctaaataaaaaattaattacctaaaataactaaattaaaaataaaaattacttaaaataactaaatataaaaactaacttagaaacaacacaaataaaatagacatatattattaaattaaacagttactaccttgcactcacaaatattaagaaactagtttttttgaaaaaaaaaaaaattaacatatattataaactaagaaacaatccacacttcgcgtgcagttgtattttgtttaataataattaaataaaaaattatataagactctaaattttatatttttatataacttttctactaatataattaacaattttattaaatttttattttttatcataataatacaaaaaaaaaaaatattgtacaaattattttaaacttaataaataatactttttaattaattatttattatagatatattagttataataagttttcaaaatatatatcatttaaataaattaaaaaaaatatcataaatttatagaaaactcatcacatgatatcaaaattgttgtcattactgaatcttacttgtagtcacaactataaattcaaagtcattgtcgtcaccatatttcacttgttattgtcactatcattctcaataatttttttctgcacataaaacaaatcaaatactgaggtaactattcaattttatacataattttaaattgcagtcatcatcgtatctcatttgtagatactacacaataaaaatagatattattaccaaataaaagaaatatatccaataattggcatcaaatttttaactaatataatagattttaaaatattgatagacttctttcaatcgtagtgtatataactcttcaaataaattatcagatataaatattggtgaattttttattatttgttttttaagttgtcattttttttttttattttgaaaagaaaaaaaaccgtgatattttttataagtgatgagtgatcttaacttatcattttttttacttaagaaaaaacaaacaaagtcattttttttttaaataatgatagtgtgatatatttgttctcttggaatttcacacaaatttaggaaaatgaaagttattattttgttttctagaaaaattaacaatttattctcttgaaatatctcacaaatttaggaaaaaaaatagttatttgttatttaaattttataatttcttttcagattaattgatatttaatattaattaaaaaatgtgaaaaggagaaaaaaaaaataggataaaatagttacaacgtcatgtcaccgctttaaaaaacaaaaatatcattttttttttaaatcgtgatagtataatatatttgttctcttggaatatctcacaaatttaggatgatgaatgttattatatgttatgttttatagaaagagagagaacgagagagacaagaactgaaaacaa

SEQ ID NO: 45337 - DNA, 913 bp, Cannabis sativa
ttccgtttattaataaagtttaatttctgcgtttattttactagtaatcccaattaggggattaaggtttcataagtttattgggtagcgtgcctaattatttagggcgttacaagtttcatacgtagacaacaagacagaccacaagtaggcatcaaaaatccatgaaaataaaaggaaaatatctattttcaaagagcattatgtattttattaatttgatttgtaaataatagcttatttgatctatttctaagggatttaaagggtgtaagctatcctatataaagagttttagtcaaatcctaaaatcttaaattctaagttattaagtctcaaatcctaatctctaatctaactttcaaatatagcctaaaacaatactatatctaatattatgtatggatgatactttattgaatatataataattataagagttttatttgcatagtataaaatgataagtgtacctcaaaattttttaaaaaataaagttaaaataatttttaaaaattacttttaatattttttaaaaaaatttcacatattattttgtgtaaatttcaatacttattttagttttatttttatatattttttttaataaaatttcgtataattttttatttttttactataatatttaaaatttcatttatttttgtttaatagttatacttcctgagactatgaattggaataataatattaataaaaattaatataattagagatataaatttgatatgaaataaaaattattaaattaggtacatttataaattttgtgtgcaaataaaataattactaaaagcatgtttgatattgttttttgttttttgttttcaaaaaagtgtgtttaaaaatgagaacaaaaaatattttttgaagtttttaaaatacaagtcgc

SEQ ID NO: 45338 - DNA, 1179 bp, Cannabis sativa
  modified_base (869)..(875): a, c, t, g, unknown or other
aaaaaaatcaaaaattaagctcagagtcctatttttactattttaaaaaatacagggtccaatctataacttttgtaaaacaaagggtctaaaatggtatttacccaattataaattactctttaaattaaaataataataataataataacagaaaaacagtatgtgaggagtggacacgtatgagagggtgaaagtttggaccaatctattaactgcacgagattcctctacggttaacactttgcagtggtagggagctttgtagtttgtacaggtgtcactttctaattggataaattattcactattattttcatcgaaatagaacgatgtaattatgtattgtactacttctaatattagtagtattagtagtagtactactactactgctctagggctatggattgtggttatgcatgcctatatgtctatttggggaacattgggttattttttttttcttgttaaaatagtggatatttgatttgatttgattttatggctgaaaaagctaagtgcttttttcatttttgaaaaggtaaaaattaatgctatgtttagtatatgttttttaagtttaggaaaattattattgttgaaataaggttatctataagatgataatcttatagataatctcccttttaaaagagtggttccaaatagttttgtatatacagatcaaattttttgagactacacaaattcaaaaattacaagcatgatattatagaaaaaaaaatataagcttaaacataatttgagacagtgttgtaaattggtacgactcgacacgttaaaaatttctataatttaataataataataaataaaatacattaaaaaattataataataataannnnnnnaataataataataataatacattacgtatttattaataaatatacaaattctaattaattttatatgtaattatgtataaaatattatttaataataacataaaaataattaaaattataaaaaatacatataatttagtgatcaactcaataattgtaaaacaataataaaaagtgggaaaaaaaattagattatataccttttttattttatttatttcaatttttatctttatttgtatattctttaagatatattcacttttatagatgatatcccaattataccccttaagttaatgta

SEQ ID NO: 45339 - DNA, 2439 bp, Cannabis sativa
aaaaaatacacatggtctgatggtcgaactacatggtccgatggggtccgaccaatcggacccatcggaccatatgcttttttttttgtttcaatttgaggaaaatgaagagagagaggcacattggtctgatggtcggacccatggtccgattggtcggacccatcggaccatgggtccgaccatcggaccatgtgcatttttttttgttcggtccgagagagagacaaagtgatagagggggtatttttggggttttgaaaaaagtgtcatattttttgtagtgtaaaatgtattggtttaaaaaaaaaattgaacatttttaagtatagaaaatcaaatttcctaacaatgtggtataattgaaggaaagtaagttagaataaaaataaaaataaaatgaaaataaataaataaaaaaagtagtgaagaaaaaaattgaaatgttattattattatttatttatttaataaatactcatccaatatataatgtatcattttaagtgaattattctgttatagaaaataaaataaaataatgaaaaaaacttagaatatagatagaatggtaaagagaaaatatattggagtgttattcttattattttattaaacactcattcccgtaatgcattatttttatatgttgatcattcaaagtcattgtcattatacgactctaatactaatatatatcaagtactgtcgttatgaatctttttctttgctatttttactgagagttttgctcactatcaatggaccatcaatatcaagctactctctctcacttttttttttatttataaatattgattaatataattttttattgaattacataaatattcttatttatatatattgttatacccaaaattcgactaccatttcaatggaggacacgtgtcaagttaagggaaatatggatcgatgcatgtaacggtaatcacattaaatggaataactcattaaatgcggaagtaacagagtatatttgcaactcgctaactataaggttttctgcgagataaatgtatacaaactgttacctcatatattaacgagaaaccatatgacattggatgcaaaaagcgagacattaacttcgttacacctgggaagacgaaagcgatacatattgaatgtgaaaacacttagcgtataatatacaactaattataacagtcgggcaaacccaaacaactaatagcgaggtgtctatctcgctataggaaggcatactcctgttactttcacaaatcaacttcagacgttttgacaagtcagaagctgacattcgaatgatgactactgaaataccccttttgtcattaaaaaatgtgattgttaaaatgaagcgttatgccatcaaacgaagaagcaacgaggcagatatcgtcaacctcagagacataggggaaaagttccaactcactatcaaggtcattggtactgagtttctgtcgagacatcccagaacgttatcatttccaatgtgtttaaatacacaatcattttgacccagtaaaagcactgtgattttcaaatattaaccgcatttataccaagtgatatgtaatcaaaccccacgatttaggggataaacattgtaaagattacgatcaactctgtaattaactgcctactatgggattataaatagaggcaagttagataaaaaaaagggacgaaaaaataataagaaggaaaggccctgaaaaaccatcagaaatttaataagattgactcgtggactatgcagaatcttaactgcaaaaccacgtaaaaaatccttttgcgttcatactttttcctttactgtttttttttttaaagtgtaagattatcactattaggctcatatttggttaacgaaaaacggtgttaacaatttggtgctttcattgagagccttcgtgaaaaagctaaaaaaaaaaaaaaaaaaaccctccttttgtaaaaaagaaaaaccatctccttcatggctgaaaactcaaaaaacgttaatacaccacctgaagaaactcatcgacgttctgggaaagagcccatgggctccagaaggtcttccaacccacagtctaaacgaatcacccgctctaggaggactcaacctgagggtggccccagcactcggaccacttgtttccggaagacccaacttgacgttggtcccagtacacgaatgacacgttcgaggagaactcagaatgggaatggcaagaatcctggaatgagggatgaaggacccaatcgtgaaggtactcagcctaagggagatagcacttacgtaacggaaaaccgccaccttagacgcctcctggaggaggcaaccagaaaccaatgaacaagaaattcctcatggaaatgaggaagaccctgggactcaacctggggaacgtggtcacctacgaggaatcaccagtgttcttc

SEQ ID NO: 45340 - DNA, 1933 bp, Cannabis sativa
tgctcatagttctactgtgatttattcgtgtcctggctttgtgctaggtgacgggactgagcagtggcagccaccacttgaaaataacagtaaggttaatgttgatggcgctatatttgctgacactaatcggtttggggttggttttgtggcctgtaatgcacaagggttgttgatcaaaggagttaccaagctttatcaaggatcggttacaccagagtttgtggaagcattgggtgttaaggaagctttaagttggatcaagcgaagtcaatcttgccaaattatccttgaaaccgattgcttactgtttatacaagctttgcgtagttcaattgaaatgatttccatgtttggtcaaatggttaaagattgtaaggctttattgaaagaaattcaaaatgtttctatcttttttgttaggcgatcaactaataaggtagctcacaactttgctagagcttccttatcttatcctgattgcagtttcaacatgggatctgtcccagttgattagctacattcgttggtagctgaatttaatagttaataaagtatgattttccattcaaaaaaaaaataacaatactaataagttcgattgaatattaaatatattgaatttttgaataccctatccaacatccaattggatattaaaaaatatcacctaatctgatctaatcacaattaaatatttattatttagtgatcattttaattaaattggattaatttatgtacagaagtatttaaaaaatcttatccaagtgtttataaaaaaaaataaaaaactattaaataaaatctaaaatcattaaaatccgattaaaaagtcaccaatctaataataattaaagcataaagttttttttaagccttgaaagcttgatagtgtagcattgagatcccatttccatccatttttttttatgtggacaggagattttcatgtaataagtgggtccccaagtttcgtttaaattgacattcttgattaagatatattccaaaattaatttaaagtaagaaaaattatgttcatatggacattcttgattaattatgttcatatggacattgttgtgcacatgtaagttgaattgaacaaattattgcatcagatgttgatatattccacaataataatcatatgatatcattatcatttgtgttagattgattttttagccaattgatatttagtcataattaataagaattaagaataaaaaatagtaaattctaatacataaacaccgatctctttttgagtgtaaacatagcaaaatttctacttatataaatttggatgccttttgaggtcatgtttgacctcttatatagagacggatatggtgcacctctcttccttggttaactttaaactcatacatggttacataaatatttcaacaaattcataattatttttaaaatttcagaggtagttgtactccgattttatagaagtatcctgttattttcgtgattgttagtttacaagttggagtgaggcatctccgcaatattgatgacaagaatggggtacgtggcctacggagtaagaggtagtcagagccgtttatgggcataagcgggctaggcctgtggctaggatccacctagtccaggagcaaaaaaaaaaaaaaatcccttttaaaattacacaattttttttgttgattttgaaaatacaatttttttttttccaaataagggcctaaaaataattttttgcctagcccactaaatttcagggccaggcctggaggtactcagcatatagtataaccgacggttttaaattgttggcaattctcatgcttcaattttacgagtttcagatttgaaaattcatttcacgtatcttaaatttcaaatttttattttctccatcttaaattttatttccctcctcttaagatttaaa

SEQ ID NO: 45341 - DNA, 2285 bp, Cannabis sativa
cagtaaaaaagaaataattgccgtgtggcagtattattgtaaaatttgggaaaaaaacagtatttttgtaagtttcccttttgttttcaatacttcttctcgaattcttcttcttgactttttttaagatttttttttttttttaatacatatatttattcccaaacgttaactgtgatcatggtagagttttgtggtaagaatttttctcaaactaaaaatattagaggaattatttaatatttttttttaaaaaaaaaaattacagtttgagttattcttgtgctatatgaatttccgtaaaagtatgtaaaaaaaatcagtaaacaaatctctacttctcttctttcacctcacctcactcatatatgcattttaatctacttatatgtatacttgttcttttaaagtagatctttattttgaatttccctttaaaacccaaactcaaaaccgaaatttgatacaacccaatatcagggtcggtcttaggttaaggcgggctgggtccgtgcttagggcccacttctattaagggtccaaataaaaagaattaataaatattcatatatttttaatcatttttaaaaatattattgttataaaaatagctcaaaaaattattttctctcgcacccaattaattgaatgtgtttgatatacacatcctcacacctgaaatacgaaaactcggatctagtaaactcgtttgatgcaccctacttccatgtacttgttgtatgtcttacataattttgtgccaaatgaaatcaacctaaggagcttggcattggtgctctgaaggattataaatgagggtattcctattagaaacaaactgccttttggtggggacaagtattatctattgtgtggctttgagacagagttttgcctctagggaatgcagcgtgtcgagggcactctgattttcagggtgttttctcttattggaaattttccttgctcaaatatgattgagtttgctggaaatattttgctgtttgtccctgttaatcttcgttcatctattttagtgtacatggcatgtatgttcgatgaagtttggagtataaggaatagatttttctttaaaggtggggctgttaatctgggcatctctcttaagcggattcagcagaattttgttgagttcttcgattattttgaggttgctgctacgacttcggaggttcaacctcttgatgttgggatctcgagggaagattttgatttggtgttacttattaatgcattgtggtgtcaaggagatgctggcttggttgtggtaatgtataatattacaaatgaatcttgggcttataacgttcaaagagtttcagcctcgtttgctcttttatcctaggcaaatcagtgcaggggttcgaaaattctagtttttcaaattcaaaagttgttgttcaggcgttggcgttggggaaagggcaatgtgttcctaattgaaattttcttaatgtttctctttctattttagagttatctaagcgttttaagtcttgtatttttttcctttgttaagcggatggcgttggtttttgttgatggtctagctaaaagtgttagaagttctacactttttgctagtatttattaaggggagggtaatcccttgtgattagggctgttaaaaaaaataataaactgcccaacccagataaactgcccaaaccaaaccgaagaaaccgataaaaaatacaatccgaataactttatgaaaaattcaaaccgcccaatgaatatattgagcgggttaaatattattctaacccgcccaaataaccctaaaccgatttacatattttttttgataaaattacttataacataatatataaatttcgtttaatagttaaactattttacatttaaaatttgtattttatatagtttattttgaaatttagaatttttagttgataattttgattgcatttaaatattgtagttgaaatttagaatttacatatgagtttattttttaaaaaatattgtttgatactttaatgtttattccgttcatatttattttttaacattaatttaaacggtaactaatttaattttgaaaggaatatactatacatttattttttcaaatcaattatttgaacaccaaaagttaacaacaataaaaaaaaataaaaaaataaacatcagtttaaatagattacatcatttttattttttcatttgacgggttacaattagatatttgcaaactcatcttttctttagttcttaaaaaaaaaaggagcttaactcct

SEQ ID NO: 45342 - DNA, 1698 bp, Cannabis sativa
ctaacaaccgttattacagcaaaactaactgacataacaaccaaactaactagatataagaaaatgaaatacaaccagctgaattaagacttatactaaaccagtaaaaccagcaaagacagtgaagggggaaaacagagtaaataggaaggaaaatagagtaaaactcaataccccctcctcaagatggagagtgtatgtcgtagaccgacatcttggaaatatgagttcctagaactggtgaagttagaggcttggtgaaggcgtcagcaagttggagagcactggaaatgggaatcagcctgacggtgttgttgttaatcttgtcacgaatgaagtggcagtccaactctatatgttttgttctttcatggaaggtagggttgttggctatgtgaatagcagagtgattgtcacaatagatgaaagctgggtgaggttgtggtatgtgaaaatcatgtaggagatattgtaaccatgtaatttcactagtggtggcagctatagctcggtattcagcttcggctgagctttttgagatggttggttgtttcttggtacgccaggaaatgagagaatctcctaaaaatatacaaaatccggttgtagaccgtcttgtaacaggacaagatgcccaatccgaatccgagaacccacgaagatgcaaggaagatgtctttgaatagaggagaccttgtccaggattccctttgatgtagcaaaggagatgattgacagcttgaagatgagtggtacgggggcttgccatgaattggctaagggagtttacagcatatgttatgtccggtctagatagagtcaagtagagaagttttccaacaagctgtctatagtgggatgggttgtccaatgcttccccttgttcattgtctaacttaagcttaggatccataggtgttttagaaggtttgcttcccatgaaacctgaatcttcgaggagttggagggtatatttcctttggcataggaataatccttcttttgatcttgcaatttcaaatccgaggaagtactttagatttccgagagccttgagtttaaatttgaggtgtagggaatcttgtaactggtgcaatatggatatgttagggccggtaatgatgatgtcgtccacataaacaagtaaggcaatgaaagtatcttcggatcctctagtgaacagagtataatctgcttgggactgtttgaatccttcttggagtagagcgtcggataattttctgtaccattgtcgtgaggactgttttaaaccatatattgatttgtgtaatttgcacacaagattgccacctgcattaagagaagatggaacagtgagtccttgtggcaaagacatataaacttcttcgttaagatcgccatttaagaatgcgttattaacatcaagttgtaaagtgtgccaattctttatagttgagatagcaagaaggagttttagtgtgaccatttttgccacaggggagaaagtgtcaaagaagtctagcccttcttgttgcgtgtaaccttgcgcaacaagacgagccttaaacctttctatgcttccatcactattgtattttattttataaatccatcgacatccgatggctcttttgttggcagggagagggacaatggtccaagttttattatccgaaagagcttttagttcacattgcatggcttgcaaccaagcta

SEQ ID NO: 45343 - DNA, 1759 bp, Cannabis sativa
tggtcgtggtggtcgtggagagaagggaccaaggttgtgggtggtgggttatgggtcgattgtgtgctccttcgtgtgcgtgtttacagagagcgagagagagagagaaggggaaaagagagagagatagttgttcaaatgagaggggtagaatgagattttaagaaaatatgacatattttaccaatattgaatagtttaggtttagaaaaaaaaaattgatccaatacatgcataattaattaaatttccttataattatttagaatttacttgtaaattttaaaaaaattctgagtaatttacaatatcgaaaataagatttacgtattttttttataggcgcgtctatttttcttataaacgtcgtaaaaaactacttgaatcttatttttcgacactctaaatcatttaaaatttacaaatatgatcttaaattactataatgtatctgatcatgaaaagagaattggactaaattctttttctacatgcccaaataaatacggaattactagaacgatgttaggttatacatgagaaatttctgaatgaatgtgaaggagcagaaaccgaaccaaagtacttgaaatcagtggttagtattcgttgttgtcgtgtgacctgtcccaatggcaatgccaatatctagttagctaatatggccccgcaatatataaacgactaggatagatgaactgtcaggtactgtttatgcttcataagccaaccaaaataaagctacacactatttgttatgctatgctattaatttgtggctttttacatttggaccatttttctttatatttaatgcagttcactgttttgtattatagacatagtcttggctcataatattatattctcctccaatctttatagataagaaactggattctttgttttcttggtccaccaaatttatgatcttcatcgatctcatcttctcctgttaattaacctcagtaacttcttagacaaacaacacaacagatgacctaaagagaagacctcaaatgtgtggtttcactagtttgatgcatgaatcacgatgatattgacaaattgacattattattagctaactaaatgttaattcattattggtctttattataatatttgtgtatcttatgattggtcatcacttaatttcttctctgttcatcacttaaaatatatagtgaactctgacttcttatcttccttttttgggttggttggtggccacattttgaaaagtatggtggggattctgatcactcatcagcataaagtcttctctcgaattagccattagtttcgtaaagttaataacaagggtttttataatccaagtttgcacaacaagataggtcagtggtcacactacctaccctaatagcaattgttgttagcttaagaaaaaaaaaatactaactataacttcctattacaatttcataattaaatttcacgcttaaaattacatgccggaattttatagtggtatttattatagttacaatattatttctgtaaatttttaaaatattttgaatatttacagtatcaaaaatacagtatcttttatttcaatttatcatgtttaaaaaatttcaaacttatttttagtacgataaattattatttagaaatttataaaaatatacacaaaaataaactaaaagaatatatataataaaaaatttagggtaacgcccatcccaaaaaaaaaaactttgactatatcatatgcattggaaaaacttctgta

SEQ ID NO: 45344 - DNA, 738 bp, Cannabis sativa
tatatatatatcattttttttaacgctaatatcattgttattgttattgttagaataaattatctaataaaataaagtgttacactagaattagatttgatctttcctgatgagatcaaactagacgaaatgaagaagatgaatgatgtataaattagagaacaatcatggctttttatagctttgggccatatataattatatataagtatatatcgaacatatttgacaaagcaaaacctaatattatataggacaaaattagttcaagtgtatgagatttttttcttttatgaggatttaattgttggatcacacaataacaggaagtatatataattttgagaaactattaattaattaaaagattacttaattataaacaaaaaaatcaacttgaagttgaagaaaacatagatcttgaataaaaaggataaataacttatatatataatatatatatacaaacaccatgtatatatatttatgtatggagatctatagagaaagggtaggtttaattaataggaagagattatgatgtatacatatatatataataataatacatatacctggagccgctacagaactcataaagcttcccacggttggagaaaataataacggcaacctcagcctcacagagaacagagagctcataagctttcttgagaagcccatttcttctcttggcaaatgtgacctgcctgttaattttgttctctattctcttca

SEQ ID NO: 45345 - DNA, 2339 bp, Cannabis sativa
  modified_base (764)..(766): a, c, t, g, unknown or other
tattgaatttgattatatatcatatttttatataatactatattaaattttagtttatactaaaatataatatattaggtgcccataaaagtcaataacacatataattttacataaaaatattacatgaaatataatttaatataatactatacaatacaatacgatataatacggcgtacttaattaacgaacccttaatgtcatttattgaacttatatataaaagggagtttaccatgaacaccagaataagacagaaggagagcatcccacattcatatctagaagccatactgatttttgcctccaatatgctttttgggtatatctattactcaagcttggttttgttcttagccttagcttgccttttataggcaatagtaaccctctaagcttgtagccatatagtgtgataaacttatttctatgtattaaaatacagatatagataatgattgaattggaagtcatcaacctttgctttctcaattaagcaacccttatatctctaattattttatttattagtcgtctctatctcttatatgtatgtagttaaataattaattacgttttgttttctagagcttctaattaagtaaaaaaagttatagcatcgatgtttgagttgcacatttatctagcaacatcattaattatagagaaatgctcaagggcaccagtggtgcctagcactttcctatgtgttaatattgctattggtccaactaagtatcggatcccatataatttaatannntagcttttagggagtatcgctagccaatcgcaacgcgacatgtcgagaaggtactaagcactactggtgcctaatagcaatgctcttaattatagcctattagaatctctaataaaatgctaaatagattgtatactactataatttagtattttttaataaaaatatatgtgaaatttgaaacatcataaaaattgcgataaattgaacacaataaatggaatcttttttttttaatatatatatatatattaatgatagactttaatatatattttaaacataattataatatatagtgtgaataataatattttaaaatatttaatttattaattatcattaatgatattttattttttatgagcaatttgtatctaaaattattattgtgtaagcataaatataaatattatactaaatataatatttgttaattttttattttaagtttgacataatatttatattttatattggagatggtgtcattgttaaaaaacattaattatagttcgtgatgatataaaaagataagactttaggatctaaaaaatatggtttaatctatgtattaagcaattaataatttcaaatatataaatatataaagacttactcttgatgtataatataagtcaataaaaaataaatgacgtgattattttgatgagccttatttggtggcatgtggagccatatggttcacttaattattctagagataaatttgtggtcaaaccttttagggcttgtttagtacacagtgttatatcatattatatagtattatattagattgtattgtattgtattagtattattttgtaaaatgttatatttagtattgtcttgtattaataggttgtgtaaaattataatatatttacaataaacttgaccacaatcctaatcccgacctggacttggtcttggactcagaccccatcccagaccccgaaccaaagactcgaaccccgaacacgacctagacctggacccaccccagacccaagactggaaccctggaccccagacccaaaccttagacccgacctcgaactttgaaccccaaacccaggtttgaccatacccctgaccctaagtccaagttcgggtccaggtctcagtatcgggtccaagtttggtgtccgggttaggggtccaagtttgagttcaaggtctgggtccggggtttaggtctcgaatcccaagtcaagtttagtgttagggtcagggttggggtctgggctttaaggacgagactggctttgggtccgagtctagggttcgggtctgagctctgaggcgaggctgagtttgggtccgggtctagggttcgggtccaagattcggggtcgagggccaaggttgaccccaggccctttgtaaatattataatataagttaatacgaaacattttttatgtattaaataatacgagtcacattgtatcaaaatataagattgtaattattaatataatacaatattttatccaaacatagtgttatttgggtttggatctagtttcgaagtttagggtctcagaccctttgtaaatattataat

SEQ ID NO: 45346 - DNA, 1346 bp, Cannabis sativa
aaattatatctcaaaaatatgttaatatttatataaacacttataaattgaaaccaactgtgtcacatattcttaatgagaatatggatgaaatgattaaataacatacacttttcattatattaatatatcacacacacatccacatatacattatgttactttatataattaattaattaaccactcaataattttatattcaaattaattaatattgtaataataataataataataataatatataatccccacaatttggagatcaactctatataaatggacttcaaaatctactactataatcactaacacaaaatccactctctctctctctctatacattgatataagtatatatatacttattaagatttaagttatattacaatttatatactgaaaaaattatggatagcccaaaatttagggtaacaagcatattattgttattaatatttgtaattttattattttcagtttgtgaaggccgtacctctcttaaggttagtggtaattataattataataataataatcacattattaataataataataattatattatttcatctatgatgaagaaagttggtgaaattattattgggtcaaaatattcaaagaagaagaagatgaatatgatgatgagaaaagctcaacaagtgttacaagtaagcattgagaaacaaggtggtcatggaagagtttttgtgtctaaaagggttagtccaggtggacctgatcctcatcaccattaattaatcgtcataattataattagagcagtgctaattacaacattctattctaatctctttctttacttccatccgaaaatacatccgaaaatacatgttagaatatataacttttcatggtggtgtacttcggtattgttactgtgtcattcttgtaaatttttaaaaattttaaaattttttgaacacatgttatggtaaattggaatgtcggggattctaactattgagaatttttttaaaaatttacagtaatgatgttataattattccatgaaaataaatattctgcatgtgttttttttggatgtggaggatgagaaaaagggttgaaattagccctcttcaattaaactatattaatcataattagtttcatcatcagtgtaattattatgattaaatatatatataagtaataagaaaatatataaggttgtacttattatatatattgtaatgatcacctcaattttgttttgtttttgtttttgtttagatccatcatgtaatgtaatcaagagaagctttctcatttgaatataaatatatttttttatgaatgaatataaatatattaag

SEQ ID NO: 45347 - DNA, 1073 bp, Cannabis sativa
aattgaaaagatcactttgttatttaatttgggccacgctgaatatctggactctgagaattgggcctccaatttgaatggaaaaaatttggtctgtctgcataactgtattggatcaaatatataactcatggcattgatgtccttttgcattgaagtgggtctaaacactccaaaaaattaagttacttatatttgttcagtttattcactaatatacacgcattttggagtcttatgcacaaaaaccaaaaaataaatgaatttttacaaaaaatactgaattttgggtcaaagtttataattttactaccatatagaattttttacaaaaatactatctttttatataataactgtaaaataataaaatagaacaactaaaaacaacaatagaacagctaaaaaataaccgtaaaacaacagtgaaaacttagcacagtacacagtatgaaacttacatatttttaaaaaaaattccgccctatagtaaaaaaaaagtttgaaatttcatggtgtaaaaactccaaaaataattgggttgactccctcttttaggcttctttcatgcatatgcataagccacctgtatacattttgtatatgtgcgatatttatcttgtaagctattgggctcttaaaaattaattaaggatttttttttataaatatggaatttttttttaaatgcattttaaaaaaatatgaacatttaatgaaaaaaattaaaatctggaaaaattaataaaaagcttaataaaatggaaaaaatagaatacctataaaaggatatttctatttataaatttcacacccaaaatatccaaactcagctattctctctcgtgcaatgcaatcccctctgtgcttctttgattctcctttgcgatttctttaattcacctcaaatttctttgattctccttagatttctttgcttctcctctggtgcgatcatcattcttcatcttattcttcatcttcctaatgctgatgaagaaaataaataaaatctgaagtcaaatagacaaaggtaagaaactattgattttgattacattcttgacttagtt

SEQ ID NO: 45348 - DNA, 1150 bp, Cannabis sativa
atatagataatttataaattttaaaaaatatttattagaattatttatcattcttatcgtattatgtaatattaagatcaaattttatacataaatatagatgtaaatatacacatattattataagtatataaatatagatgtaaatttttttatacttcaaaaagaagaataacttaaacagtaaaaatgtaccttaatttattattagtgatgattttaattcatttaattaagacaattttttagtgataatctttcaagaaaacaaaaagtgcaagagtagcaagataattaaacgactaaaaaggatcatacagctaaatttgttatcaaaaggtaaatcaacttttattttgtagagttatttgcagcaaaacttttccaactctcattttacttgcaaataactattcaatctcaaatttttatggaaaaactctccaaagtattgttctatttgtatttttaaggtgttgtctccctatctccgttaaatctttattttatctacgtggcaatgacaaatcatccaaaaattattctatgcggccatatttttcaaaactaaaaattataaataaataattaaaatcaaaataaaaataaaaaactttaaaacataaatatttttttcttccactctctcctccctcaatcctctctctctccttttcataccaactctcatgttaccaccaccacctaaattattaaaacctccgccatgacctatatttcaaattagtaataataataattaaaaaaataacgcgtcaaaaaaaaataaattaaaaaaaaaaaagaacactacttcagatctaaaataaaaatacaaaacatacaaattccctaagtagattcataattcaaatccatatttgcgtatattccccttataaggtaaaactaagttactaatttgcctaaaatcttttttctcccgacttaattgaaatgtttgtattgtgggtaaggtttgatttatttagtgttttcacttacctagttgcttcatgttgtaagtaagttgaaaatgcaagatggatcactgagcattggagtctacctaccagaatgtaaatgtgacccaactatagagttgttagagtattttggaaaaaattgtgttttgtttaaagttcaataa

SEQ ID NO: 45349 - DNA, 1048 bp, Cannabis sativa
tacaagctttcatattatcaaacctatcctgaataaaagaggtattctatctaccatagttaagtttaagatcactaatcaaactgtgatattccatcaataaaatgtattttttgttgagtagctcatcactcaagaattttaaagttaaatttgtttgacctgaaataatcttagaatgtttaacgttatagaaaattttttcaaaaaatgtgtgataagaacaaattacgctgcaaaaatattatagacaagtacattacatctacactcttacaaacttgacaaacgatcaaataattataagtaatcctaaaaaaaacttagacaaccaaataaactaaaatcacttttagtgatcaaacactagattggaattaagaatattagtcggtaatgttcgatataaagggtattattttgggaagaaaaaaaaaacaattgtcggttaattttccgatgtgtacataattgaatgaccgaaattttagtcaaatcatcaaatttattttgagtagtcaattgttgtatactattatagaatgaatacaaaaacattattattgtagcagcaaccaatagtggcaatcttggcatattattggaaaggttatatccaatgtaggtttttgtgacaaaacaaatcacttttgagtttgtatgtttttcaaagtgttttcacattagtcattagaatatttatataaatatacatgttgtttactactttagtagcagttcactaaaaatcaggtttctaaaaattattcgagatgtaaatggtccaaaaggctatattatccccgtcatgtcatcatgcatgtttgtactgttaattttcttcttgtcgttttcttgtataagaccattatgtgtaaaaattaaaatataactcatttaacaaaaagtatatttcaattatgtaccaaatcatgtacctaaagtaatgtaaatttgacacagcaaattttatactaaatttggcacaatatttactataatgtaaaatttacgccataaatgtactatttttttcatttacatttat

SEQ ID NO: 45350 - DNA, 1675 bp, Cannabis sativa
taatttttttttattaggggattcgtcatcccgtctccgcccccattagagaatttctcgccccatatctaatggggaataagcggagatggagattaaaatctttaacgggaatggagacgggggaacactccctgccaattctccgctgtatgtgcatccctagtgttaggcacttgatgccttttagtattttttttattattattatatgagcattgttattgggcattaataatgcccaacacattctataggtgacactccacaattagttagcaatattttttaaaagttattttcttaagttatataagacctgatacttaattacaccaatagcaatatgacaccgaggagggtgctaagtggtgcattttagcaattctcttattatatagggcttttcttttggataggactaagtgcatccggcaggtccccttgtatgtgtgtcctattgtgagtgggtggaaggaaaaataagattcttatgcttagaacatccccaacaacttcttactctattctttaaaatatatcaccaaaattctactctctctattttatatcagacctttacatcaaatcatacatcaatttctttatatttttccctacatcattaaataaaattattttttattttctatactattaaaataataattttttaacacatatactatatacataaataaaatattatttatatattattcaaataaatttaaagaatgcactattcattcattctcacatatagagcaagttgtattagtttgaatgcatatatattatacatatatgatttaaaggaatgtaagctttcttgaagacgtccaaagtagctgactccaaactatccacatccttttgaaaagcctcacattcaacactaaaagatgtatgctcagaatcaagggtctcctgcaagcccctcttttccttagtcagatcactgaccttagtctccaaatttgtgagaagagtgcatagttttttttcctctcatctttaagagagttcacttctttggccagagcctcattgtctgccttgagctgggctctggacggcatgtcactaatctcattcttcaagtcttcaataagcttgttagcaacaaggagttgcttgttaatttcacctaactgaagactcttgtgttcaacttccttcttggcatcctccatctctttcttcaagttgctggttgttgttgcgactttcaaagcagtagacttggcacatgagtatgtgtatgccatcttcagattgagctacactgtgaaattagattaaggcatgtacgatttaaagcctgtgtagaaaaaatagaaggaaagatacttactcaggtggcctccttcattatgagtaactccacgaacatatcctcttcccggccagctgatcgttcacttcaagcagcacacggtcgtgatagaacattagcatctccttcccttctttgtctctggattcagtacgggaggagtagcttgaggcttgggtagtcgaggcccttgtgtgtttgcccctttggaacccttggatggagcagctgcagtgtgagatttggagttcttcttggccaaaggaatagaatcaagaaccaccaccttagaggcatccgaggaggcagcagccaaactcctctcagcagtcacct

SEQ ID NO: 45351 - DNA, 1417 bp, Cannabis sativa
attactttgtgttagtgatttctttacaacaagtaaagtaaaatatcaaagggaaatatggactttttggacaagtagtgttgctcctccctctactctagtctcttgtccaagattaacacagttggttttattgagctgagggattaaccatacaataccacaaagtaccaaaatttacacacctctaaaacccatgattcatgttgtcattagggccggacctaaaatttagtgtgctaaaaaaatatttttagattcttatttaaagaaaaatgtatcattttcaaaattaataaaaaaaattgtaaatttttgagcccctgaattaggtgggccttaaacacgagtctagctcgtctataccttaagttggcctagttatcatggtggtgccctcagtctagatgagctgacctcaaaagatttcattcatgatttcatgttgacaaatagatagcttttcttatgtgaaaaatagaatggagtcaaattaccttgttaaacaattagaaatattaatgagcatgaagatgaaaatccttaaatatcaataatagtcctatcctatcatctcatctaaaaagataattaatgaatggtttgatgcagaacataacaaaacattctgcaccaaatcaaagaatgaattggtcacatatttgaaaggcaaacccctcataaaatagatatcaatgttcaaagcatttggctaataatactaacaatattattctatcatcttcaatctcaattcactcaaccccaaaccatattgagctgctaatgagatgagtagagtacttatagtactatgtaaatgtatacacatacaatagaaagtgaagaaaatcagatcaaagtacacaaaaatacataatataacaaggtaggtacactatcaaaactccacggtattctattctgtaatgacatatataagctcagtctagttgttactggcgcaaactatgtaatattcggaagagtttcaacaagaaggatattgtagccgttgattacaagggaaagttttaggccaagaagttgtacaatagtacaattcgacataaaaaggtagcttttacgaaggtaatttggtgtcgtcttatcttgcccaaatataaatttatcttgtggcaagcaactcattcctatcttcttactaaagataatctcattatataaaaattgacaaaggtatgttcggtgtgtggcgggcatgatgaaagtcatcaacacattttttttttatttaagcgtttatatattacattagcataatctgagactcgaacccaagatctccaacacacacgcaccccatatggccacttgagctagcctcaagtagttcatcaacacattttctttgattgttctgtattaaaaagagtagtcgacatctttttagttg

SEQ ID NO: 45352 - DNA, 3029 bp, Cannabis sativa
  modified_base (104)..(106): a, c, t, g, unknown or other
  modified_base (1816)..(1816): a, c, t, g, unknown or other
ttgtaactaatatttttagccacggaccttttagtcacaacataataatgataatttataattagtcacaacctttttatatttagtcacaaattttgttgtgnnnaaaagtaaaattttttatagtaatattatctgggaaaccaattctttaaacccaaaaaactagttacgccagtaaaatgaaacttttataggtgttgttcaggaaatgcataggcaaaacccttttccttgtagtgttttcacataaatgacctgcaaatagagttaatcttcagcagtagctattcatcgacagtatcataattatgtattgcaatgagcatggaattaattaatgtatagctctccctgcaaatgatctattccttgtactccatgtctgaattctcttgatcatttttttcactacaagtttacaatcaaccttggaaatttgctttcaacagatcagtacacccaggtaccgaaggggcatagctcacttctagtgtaccttgatgcatctaaaactcattgcacctcttgaggctccataatatactgcaaatttcacttcatataaataaataaaatactagaaggagctatatgagccagctccaacaaaacagagccagtttttccaatctcggtttctccaataaatacacaacatgataaattattggaagaagggctagctaatgtatccaaacaaagaattattcaatatttcaagttgaagattaaaaaactcgtagttgatgagtttatccaaagaaggctctatattaattttatatatttagaattagcatctaagaaagttttcttctttgtttctgttttatttgcaatgaacttttatgtatcctcttctaatattttaaaagacaggaataagacaaatatatcatttaatatataacacattttggtatatatacttctaaaacattagttgtctaacttgtctcaatttgttttgtgggataattgcctattacccgtgataaatattctctttatataaatacgttgatataagggaatattataagtattattatatttttactatagccaaaataaaggtacgtaataaagtacgtcacgtgtatataagggcaaatttcatgccctttgattcctctaaaggtctttttcatatctaggtttcacgaatgacaacttctcttgaaatgaaaaacaaaagaactaaaatcatgatcgatataataatatcatacatgcactgaattcttattgctcaccgcgtttggtcagaaaattatcattatgaaaatattaatttggaactactgacaaagaaaaatacaagatgatcatcacccaacaggtcaaactaattaattaagttatttaagatcagttatttacttgtgttttctttttaaaaaaaagacaagattctataatgctaatttgatcacgccatgttctcgattgagctaacaaccagttattatatatactttatacataaagtatatatattagtatatttaatatatatagatatttcttttacactaaactaagataatgttcatactatatctctctctctctatctatattaggcgtgccaaccaaattctacattgataaaacatgaaaatgagaattaatttataagggtattggaaactttaacgacaataatttttttagaaaggttatctactatttaagatggaatctcaatatttttggaggaactctttaactacaattgataaaggataaatactatttttagatcctgtgttttgtaaaagttaccctggaccctctgttttgttaaatnataaaatagatcttatatttttcaaaatggtgaaaataggaccctgagctcaattttcaacaattttttttttaatataaccaattttaagacaatttctaacacgaacagtgttgatctcgcttttagccaacgacaatgagtcaattaataagcgataagaaatgtaattaagacagagcaaaaatcattaaacaataaagaacacaagattttaaagaggttcgccccctttagttcggtaatagcctaactcccttagatggcattgacttgagaacaaagaacacaatattttctctctcaaagctctcacaatgaaatatctgagtactttctcttagatctctctctaaagaaattctttcgatcccattttatagtgaagctagatcactatttatagggctaaatgtgtgagggaaggtttttcttttgcttacaatatctataattggtaagaacatacattacatatttagaatacatatataaaatgggggattggaacagcttgtcgtatctctctgatacaatcccatgattgtagggattgactttgtgcttgagctttacgatatcagctctgaagtagttaagtcttgatacacagctcggaaaggtaacttcactctttactcagatcatctgccctttgctctgctcggtcaagcagactttgtgcgtgcagatgtgttgcttgaagtctgttcagaatattcctctagccaagtgtaaagaacgacaaacacgtgtcactagtacatatggccacatcatagtgcaaaaaatgggataacatgtgctcccaagtctgcatgggacttccgaagtggcgcatagacttcactcagtttgaattcgtgtttgaacgggtggcacgcgttcaatgcatctgttggtgatccgatgtgatcctaaacaaaggtctctttgatatttggctcataaatgctgattggttcgtacctcgaaatcctccaaagatttgcacgcttttgacggttgctcttcaggtacttgattacttgattacacaacgttcacttttagggggaaatcgaggcatttaaatttcaaaacgattacacttcctcactaattttcttataaatagggaagattgtccaaataaaccacttttagcatcttctttcttgacaattttaaagcaacaacacctttcacgtctcaaatccttcgaagaatttcc

SEQ ID NO: 45353 - DNA, 1930 bp, Cannabis sativa
actttggtctatctgggaatttagaaacaaaaaactgttcagaaatactaactcaaatgcaggcgatgtagttcaatggaccagtgtttttttgtcccaatacaaggaggctcagctcaaacgaattgacatggttacaacccaccaggcaaatgtttcaacttcagccaaccgagttcaagaaggatcctaccaattatacacagacgcagctattcaaactagaaatggtaagattgggttgggtgcagtagtcaaagattggaatggacaggttattgctgggttgtctgtacctatgacaggcagctttcaacctgctttggcagaggcgtgggcacttcgactggctttagactggtgcagcaatgtcaaactccccctctccatcattttctcagactgccagcaactggttggaaaagtttccagccgaaagaaggacctctcagctatggcagatgttgtgtgggacatcaggaattccttatcacatttccctaatgcctcagtcacttacactccaaggagcaataacactcatgctcaccaaatggcaaaaggtgctttagggcttgatgaggaattggtttggaaaaacaatagtccaaactttctctttgtaacttgagcttgttgttcttcccctcaatgttacaaacgttaaaaaaaaaaaaaaaaaaattaaaatacttttgtaacaattgatttagttttataattaaatttgtcaaaaaaaattattatttttctgaaaaaatatatattccactcaaatgttttcatattaaatgtaatagtttttcgatatgctactgtcataagcatagtctagtttcactttcacaccaaagagaaattcacaaatttgaaacatcctttacctatgtcaaaaacaaaaataaaaaaaatcaatttataacttactttcaaaaaaagaaaatcgataacttatttttatatgtaaaatgtaaatgatgattgtcttgagaatgtaaaacgttgtccttgttggaagggcaaatgttagtgaagcaaaagcaatttagaatagtcttgagaagttttgcaattagtcgggacaacaaatttttagacccaatgccaatacaagtccaggattggaaagaaggatccaacaagcaattaatattgtagattattacagaatatttgctatccttgctgtctttattaaaaatccgacataagtatattgatttcaactatatttgggataatttgacctccaaactttaaaggtggaaggttaaaactattcaaggggggaagagcttctctcatcaaattggttggtcttttctttgctagtttacactatgcaaataactaagttgccttcccactttggagctaagattgatagtaaagctttttgccttgaatctttgctagtttacagatttttggtgggacaataagaaaggaaacaaagccttttgccttgaatcttagggtagcttgtgcttgtcgaagtctcgtggtgatttgaggtttcgtaaaattgatgagatgaagtaggactttttggctaaatagggttggcaattcctctcgggcgagaactcacattgttctcaaattttgagggccaaatatttgacacattcttcgttcttcagctgtcactacaagaactctttttcttagttttggaagaatgtgatcaaggcagaagatactcttagtagaggagcatgtaagattgtgggttcaggctataacataacatctaggagcacatgtgggagaaaatttgattatctatgcatacattagtgggaaattaattccctaagcttatatgtatcaaaaaaaaaaataaactctcatctctctacctccattttctctctcgctctcttcgtctaatccactgcccaacccacaaccaacgatgatccaccgc

SEQ ID NO: 45354 - DNA, 640 bp, Cannabis sativa
acgccttcaggaatctgggggacctaacaacatggaccctgacggattggttcaaccgcttcgttggtcctgctcttgctccctttgcttctgagctgacgagccaatttgtctctcatctgacccaacttccggccaaaagatatgcagcttgtgcttccacgaacgccatttatcaggttcaggacatcagtgctgccatgaccgtagtgaatttttgttatgcattcctctttttgcttatattttatcttaaggcattcgatccctcatacttgttttcattttcagattgctgcagagattggtcgcgtctcaaagaccctgatagacaatgggtacgtcatgtctgaatttgggtgcatggacgaggccatgaagagtctgcgagacttggcggctgagaggaaagaattccgggaggaggcccaacagagggaagcttaggcgaatgagaggcaccgggaggagctgaaggttcagggtgaggctgtggccaaggccaagcgcgagctgagggaagccaaggattccgtggaggagctgaccaccaggctgaaatctatggaggagctgcaccaagcagacttgcagtcagcagccaatttgaccgtggaggtgaaggagctgagggacttca

SEQ ID NO: 45355 - DNA, 2418 bp, Cannabis sativa
  modified_base (820)..(824): a, c, t, g, unknown or other
aaaatagtgttatttattatttaataaaatacaactcttatatacgacctacctaacaagccctaagaattcttattgtatattatttatagttttgtaaggtactcattaatcattatcattttattgttattcatattcccatttctttatactttttattattctcaaccatacctgccaagtgccaattaatataatttaatgatatatatttcattataaaaattgacaaggttaactttcatatctttcttgatcatatatatgattgatttaaacaaatttgacaaatttattaacaataatcttccacataaagggtatcttatctataattatgatcacaactagcatgaagacagatttagtcttcccacttttggcaaataatatatatataaccacccatatgtatatatatgtttcatatttaattataatattataattaattttagaaaggatgaaaacctatatgaaagcagagcgcatgatctcattataattagttttcatttgttggcatatagcctccaaaattagactaatgatcctgtcaaaggaagttgttatatatatatattagactaaaaatttatttagggattattaattctattttaaattttttattttacaaaaattattaattgaatcatttattttgttaaataataacaaaaagaattttgaacttaatttttgataatttttttagtttaatataactaatttgaaaataatttctaacacaaacaatgtagaaaatgtaattatcagttttgtcataatatctttatatcagattattattaannnnnattttgataaaaaattaattcaaagtattatttaatactattttaaaaaatacaaagttaaatttattattttacaaaatacatggttaaaattataaattttgcaaaaatataaagtcaaaaatatcatttaccttaatataatatataaatatatgtgtgccataatatataaagtacatatctatataaataatttggacctaatcaattttaattaaaattatgataagttatcatataatacaactgttcataaatataaatcatgatcaccaacgtctacttaattatatatatgaagaaattcgtacaagtagttgaatttgtaatatatatccctgcacgtacgtaaaccctaagtacatatatataaatatatatggaatatcccatgaatatacctcataatataattgatatttcatccatcaaaaattaactatatacatatcaaacatcaaattttcattctttaattcacaggtatataaatagatcttcatgaagactctgcacaagttgcttgtaggtatttattatatatgatatatagatattgatcttattatagtaattttatttatttgttaagcaaaagtcagcggccagttgacatttagcaatgtcaactaagattaacaaagtttaaatattataattaagctcaactgatgttaatattttttcactaattaataaaattatatatttttttttcttatattatccaaaacgatctaattatatatatatatatatataaatataattatatgcatatgcatccatatttaatccacttttacattttttatgacttgttgtaaagtgtacacaattcaccttaggccagctcatgttttaaattcaaaagccagttgctacaaaagccagttgctatacatatatatatatatatatattatattacatagtggaaccacatatatatttgaagtgaaacactatatataatgtaagattgtgtttgtgcagagagatagtataatatcatgtgattataaagctaagcatatatataatatagaagcatctcttagtatataccccatttcaacctcattaataactagatagtactaattaataaggtcaatgtttttacatcacactgatcgatcatatatataatgtgtgaaaattgtagaatcaaatcaagaattaaaaattttaatcaacaaacaattagcaataattaacaatttacaaataataatcgaagataaaacaaaaataaacggagtactccaaatagaaacgattaaagcaataaaataataaaatcaacactaagatatatactagttcaagtcccctaaattaatgtgatccatgactttactccaattctggaacacacgtactactgaaatcttctttattaattgagcaagagcacagtataatacagtcaagatcgattctctgttgaattccctcaaagcatttctttcacactcttacttaaaaatctttttcatctacagaagattaatcttcatacaaatcccaaacccaatctctctattttatttgtacctatctcttcctctacctctctctctctctc

SEQ ID NO: 45356 - DNA, 1492 bp, Cannabis sativa
aaaatataacattataattattaattaagaaaaaacaattgtgtaaccaaataacatgcaaaattataattagaaatttagttatttgattctgtaattacaattggtatgataatatagagaagcattttaataatttgaaatgagaatataaagaaaagaatgaatagaaaattagatgagattaatgaatggtagaagttagttactttgagaccgtgaacagagagaagaccactgaggatgcattctttgagaccagttcccagaacgatgatgtcgtattgttcatccatggccaaatcacagacagaaatcagagaaagagattagaagagagattagtataaattagtgatatattgattgatttaatatatatatatatatagaagagtataggaagaagaagaggtctttattggggagttaattgacgaaactcacgcagagatcactacaaattattacacctctttttttatttatatataattatttattagattaattttaaccttgaaaaaattacattaattaagaaaataaaaatattaaaatttaactttaattaataaatttttaaatattaagaaattaaaataactttagaaaaaataactaaattttgaattaaaaattaaaatttcctaaaaaaataagtaatattaataaataataaaaaaaaaagtagtttcatatgaaaacatgaaaaatgtgtgttgacatgattttttgtcggctgatctaagaaaattataaaaaattagaggattccaatgaaatattttggcaaaataaactgcgaaaaataaaagtgataccaagatttatagtaattcacctccttatcgctgtaatggactaggtctacatcatcttttatttattttatctgatacaccaaagttattttctcaaaagtatgtatacaataatacaatcagagatttctaggcaaatttgtatccaagtttatgaacaaaagactcatgggagaacaaatactcataaacttgatagcaagggtagtggtgatcgatggttcttgggagccaagaataaagagtgatcccttcttcttcatagaataatgtttgaagagtcaatgatgattgtaataatgaagataatgtcgttaaagtatgaagaactcaaagtctaagaaagagatgaagaagatagaaatctcaagaggcgatcaaaaggtggtcagaaagcgatccccaaatcctagcctaccattatgtatacaagaggcaatcaaaaggtggtcgggatatttcacttaaaatctcgtatcttattacaaaataatgaataatgaatgtaaataaataaaaaaatctaagaaaaagatcccacacctatagaaaaatactccacaatatttggattgtcattgaacttgggtagctttcatttttttcttaaagtttgcttatgtggcatagtgcttatgtagctgattgggataggagttagctaagcc

SEQ ID NO: 45357 - DNA, 918 bp, Cannabis sativa
aacctccatccatcctactctccctctctcccaccaaacatagccttagggtacccacagatctttctaaatattaatagtatttcccgtgccaatggatttgtaggcccctttcctaaagattttcttcgatttgaccatatttttccaaaactaagaatttgaattccaatagctacaatttagaaaaaaattccttgttttaaatatttagctttgagcacattacaataaagtgagtttcaatttgtcataagatgccacccccactttaccaaaaacaaaactttgttcatcttctcagacttctaaaatcctaagctcccgagacatttggataaacacaatttgtcccaagctttgagacgcatccttttgttacccttcctggcccctactaaaagtctcttgctataccatcaattctagaagcttaaactcttcgagaattgagtggattgcatagcataagcaagaacatatagattaacatattttgtgagggttgcccacctaatcttagaaagagtcttaattttccaaccctgtaattttgagatcaagttgtccatgatgaaatcaaaatctacctttttccttgaccaaaatagctgtaacccaaataacaaatgttcctctcttgcccttgaagcccaaaaatagattttatatttattcccctcttcatgccagttgctaaagaagatagaaaattttagtttgtttacttgtttcatccaattcaattcgcactactttgttcatagggtatctgatccgcactaagtatgaatttcatattttggatccaatccaatccgcacaatagttaaaatttaatccaatctgtgaaagttgttaggttataattagcttatgttttgggtctttaaagttagcattatctcgtctattggt

SEQ ID NO: 45358 - DNA, 2997 bp, Cannabis sativa
tttcattaaaatccagagtgtttccctagttaattgtcaaaaagtttcaaaattatgttttacatatagctctagtcagctaaactgccagataattcatgtaatctaatatgaaagtcaatatctttctttatagagtaatttttaccatcatgtctttgtagtgccgttcaagaatttcacaattctctacaagctcctggtaagcatcaggcatgcaatttttcatggtgtccaagtcttctggtgtcctaattccagctactacatcctctccctatcaagaccattcattctttcagatacaatgtatagctaatgtaaacaagatatttctaactctcaacatctacatgcttacaatgactcagagaaatttgaatgatatattatatatgcaacctgagcattgatgagaaactctccataaagcttcctttcaccagtgcttggatttctggtgaataaaacaccagtccctgaagtatttcccatgttcccaaaaaccatggtttgaatgttaacagcggttccctttagcccagttatctgattgatgttcctgtatttgtttgcccttgggctgtcccaagagtcgaaaacagctttgacagctaactgtaactgctgttttggatctgcaaatttaaagaaaaaagaaaagaacaagctggttaactgttttttaagctctcttctttttcatatggtagtaagataaaatattgaatcagtacctgagggaaacttttctcctttagtttcaaggtagacactcttgtactgctccacaagctctttaaggtcagaggctgatagatctgtatccaattgaactcctttaacatgcttcatattctctaacttctcctcaaatgaagagtgcggtatgcccataacctggaattaacataacactatgttttactcaatccaaagaaagaacattgttggcctaagtaggaaggacacacatactctttttggcagtacaagtaaatataacttccaagcataatgaatgtgatcatcagtcagaattacttacaacatttccaaacatgtctagaaatcgtctatatgagtcataagcgaagcgctctccgctctttgcacccaaaccagcaactacctcatcatttagtccaaggttgagaacagtgtccatcatgccaggcattgaaatctagaaagaaaaacaaattatagcaatgcaagttctcaattggaaaaagtaataaaaacctttggttaacaagtgaaacaaatccaaagaaggagctcaccgcagctccagagcgaacagagagcagaagaggattgacaggatcaccaagaacagaacccatgtccttttgcacagcctgcaacccttccattatctcttcccaaagaccttctggcaatttctttccattctgttggtattcttggcatgcttctgttgagattgtaagtccagggggcacagataagccaatgctcgccatttccgccaggtttgctcctttccctcccaactacagagccgaatttgcataataagctaactcttgcattgaatccaaatagaaaaagcaaatagaaatcctaataaagacaattacacaaacatgtagcttacataccagtgacttcattcccttgtttccttcactccttccttttccgaaagtaaacactcgctgtatattgtaaccataagaacatgattttccctaatttatcactaaaatatgcgtgtgtatatatgaatatatataccttatcggtagttggtgtagttggatcagaaacaggggaaagaatagcttgagctcgggtgtggccgcgaagctgacttctcttcgggtacggtgttgcgactccagtcacggcaaccgcgcgtgctcgccggagaagttgagaagaaggccgggttttgctcctcattagatcaaacaagtggtactgatccacatactttgactttgaccatgactttatcaatctttgcttactcacctccatagcagttccactccttatcaccattcctttcatcgtcgacgacatcgtattgatcttcctctctctctctatatatatatatatccctgaaatatatactatataataataataaatcatcagttcatcttcacgattaaggctaatcaacacatatcatatacgttcatcttcttgcaatattgaaattttggatgaaacagttttgtgtactaactgaataatttatatacatgtatttgttaatattatgcaacatgggaagagagatcagtaagtatacataccaaagctggtgggagcttagggtgtggtgtggatcagcttcttcacacaaaaatggcggttagatatttattttttttgttatttattttacgaatgatttttaatgtaaataataattataataattttgagagaaggaaataaagggtttgatgagtgacgtgagtggatgaaattatagttatagcgctaactcgtgagtcttaacggaactttgaatcgagggaaatccctcttttgccctttcagcatttcacattgtctggaaattagaaagcgacacgtggagaagttcttgggacatggaatgtgatggttggatagagttttaggagagtaggacaaacccgatggcagggcaactgggcaagcacccgcattaatgggctgcccatatgttcctttccatagggattattttggaggaaattaaattttatctctactttattttatttatttttatttttatttttattttatagatatatatatttttatagatgatatttttattatactcattaaatgtgaattatgagttagacttaagtagaaagtaaaatatattcagtaatacaatattatttaatgaaatataatatgacagtattttttttttttttttgacaaagtgattaaaatcactcatgaatttacgacgcccacgtccgccaccggcgctggaacctcctcgaa

SEQ ID NO: 45359 - DNA, 1820 bp, Cannabis sativa
cagggtactccagctttgcaaaatatgttattgaagattttatcttggcctctaaagattgtaagtgttcagtttgcttacagttaatttatagtggctcttacttttttttcttgttaaatttattttttgtatttgtttgtttttaatgttattgtgtataggtccaagttaagaactcgaggcccacttctgaagagtttaagaagttaccactggatggttttttcgaggatgtttttattgatgatcgtgtgccggttaagtcttcagttgatgttggttcttcattggggaagaacttttatcctgatattgagtttttgatagagaaagttaatgaaattatttgttcgtagaatggagcttaatttcaagggtgtgttggatgtaattatttaactgaagtcgaaggccactaatttttgtgacaggtctcatgtttaggtatgtttaatatgtcattttacgatgttgttattttaataatttgaagtcatattttgtttttgttatttagttcttaatggattgtttcatgattttcctacaaattaatttagctaaaaatagtaaagagttaaaatttgacgatgatgaagaagataatataggtgcagattcggagaagaatgatgatgattttgatagtgttgttaattatgatggtgatggttctcatgaatatcatagtagtgttgatggtaaagatgataaaaataatgatgatgtggttggtgataaggggggtgctaattctccagaggttggtgagaaaaaatgtgagggtgatgtagcaagtgaagatgacaagtccaaggatgttggaaatgtgaagggaaaacaagttgatttaaagggtgatgattttttcaaggggttaagccagcttgagattgatgatgatcaagttatttttgcttgtttggagggtgttgaaaaaaagaaggtatggttcttattgaatttctttttctatattgtggttctaagtagttgttacatagttgcaaatatttttaattcaagttgtaaaaatgtcaaattaaaaacttgttacctttccttttcttcaagttcctgcttcccttcctgatgaggaagttgaaaaaacagatggcaatgtttctaaagaagaagaggacgacactcttccttgtactccttttcttgacaagagaaaatatgccccgacattaaaatatccttttgttgattttagttcttcaaatttgaagaccactccattggagtttatgtctttagattctccatatgcaggagatgagcgagatttcaagattgttacatatgtcaagggcctttatgctattgatgattctttttttgatctcgtttcttcaaaacatgaggcgaagtttgagaatgaattagtgaatgattgcttaaatatcctaggtgatgttttttttatgcattgttttgtatttgattttttctctatcatttatttaaattaagttttgttcatattaatttgttttctatataggtcctttaacgtctacgaggatggtgctcgaaaattctctccttgttttaaattggttgtgaattatgttgaagatcaaacttagttttttcatctttcttactaccacatgttcattaatgactcggtaatatctttaaatccactcgtataatttataattatatatagttgtttgttgcttgttttttagttttgcatctattttgttgatcttggaatgtgtgttcatgttcttactcttttgttgttgtttcatgatgagtgcacatttgtacactcattcctagtcaattattagatgaat

SEQ ID NO: 45360 - DNA, 957 bp, Cannabis sativa
  modified_base (39)..(43): a, c, t, g, unknown or other
agtgaaaacttaacactgcagtatgaaacttataaaaannnnnagtaaaaaagtaaaaaatactgtctgacagtatttttgtaaaaaaataacaaaaattaataccaatgtaaatttcccattcattttgatctattgtagtaagacttacctgacccatctatatactagcccaaaacaagacccaattgttggtagcccaatttctattgttcaaccactttttagagccaacccaggcccactttgccaatagacctccaacaactcttgccaaaaaaaaagaggaagaacaaaatacagttccatttttaagaaattaatgatgttccaaagataatattaaattaacaatgattaaaggaattaaatcaattatacaaatctttaaaccatatttatggcatcaaaacatatcttgatacttagaaaattattaaaaggtatcagcctaacacactctttcagtgttatactgtataattttcaaaaaaataatttttaaaaaatgtagagtgttacgtatagaagatactgaacactactaatatttaataacaatgcacttaaataattacattcactaagtgcctcacattacatgatccaccattaaagcccgtcgtccttttcaatattctgttcttaagcaaaaacacatttttatttcatttattattcttcttgatctttagttgttgaaatctctattaatatttcatttcaaatttaaataaattaaaacgcacatattcaacaaagtaacaaattcaatgttcaaatataatattatagggtgattctacaatgcactccttaaaaggaaagtactgatacacccttgacttatttcagcatccaagaaaaaaaatttagtctaatttttttttttcatattcatgtatgttgtaactatttaagataacttacaaaattttgagaaattccgaataattt

SEQ ID NO: 45361 - DNA, 3821 bp, Cannabis sativa
  modified_base (69)..(71): a, c, t, g, unknown or other
attgcaacaaaaaatcgtatacaaccccctattgcaactagcgcttcaaccactttagaaacccaaacnnnaaatttgaaaaaaaaaaagttaaaaaaatagtatataaaataatttctttttttttattataactggaaaaaatctatttgtttaatctcatatcctttgttcattatatttatatcatataaaagtaaactttagtttttttttctaatatttattaaaagaaaataataattattacatttaaaaaaaaataattattattcaattgagtaaataaataaaaataaaagtgcttttgcaatgcatcattctaaaaaagtgtatccagagaattatttatttaaaatgttataattattcaaaatatcttataaaattttctaaaaaaaaaaaatcttacaaaattttgaaaatttaaaataatatttatagaaaaaaaatgtttaaacagttaaaattaaaaaaaaaaaaaaaaaaaaaaatcactcctactcttgcaataaactatttgagctatattttaaaaaaatttcaaaatttctataaatttaactataagagtggtcttgcatatatgatgatattgagcattgtctgcccgtgtgctctgtggcagttagtagttgttttttcattttaaccatctcttgccagtttccaacttctttctttgcatttaactgttcctcccctgttttatttcaaatttcctggttttgttcaagttttttctggtttgtttctgtcttccaacttccttaacctctaattttcactatggaatccttcctctatgatgtttctactgctcttactgaaagggaaagggctgtggtaccaattaataacatttctgccccaccaattggcattactaaggctcgtgttctctgtcgagtttactctaaaaggggtttcaatcctaatcaactcaaaaacttcctacttaagcattggttgggtcggtttgctgttacaatttcagattatgactctgaatcttacatggttacttttggttgtgagggagatatgagaagggttttatccaaagaaccttggcactttcataatcaacatttaatcttatgtcctccgagtgttcttctatctgactctgtaacttcatacaccaccactcccttttgggttcaagtttttagattgccttttcttagcaaatctgaggctcttgcaaaaataattggcaatctcattggagaatatcttgaggttcataatgattctcttaatgaggggtggggtccttttttaaggattcgggtaggtttggatgtatcaaagccgcttttaaggggtcaaatggtttcacttccatggatgcgtgatgaactttggattgaatatcgttatgagaggttgccgaatttttgttatgaatgtggtattattggccatgtttatgataactgtacactttatatggagaagttggatgagggtattgaacctggacttgaatatggtccctggatggtagggtctgcattaccaagatcaagctatgatcgttatcgacaagatttttccaaatcaggatcgtggccttttatcactagacttgctaggaacaccatcaacccaattatttctcatccttctcaacaccggttctccctcctactgtgacaagccgtgagaagtgttctatccttgaggtttctgcaccagtaacaaatggaagttctcaccaacagacagtacttcacaccaccagtgcaggtagtctgaaatcccctcaaatgaattcactttcttcatcaactatcaatggtgaggaaggaattgcacctgtaatttctacacctgttaagtcgggtgctctgcaacatcaatctcccataactatcacgagtaccaatcccacacaattcactccaaattccaagcaacctccactcacttccagtgcaatatgcaaatcaagcacagttgttaagcagcaatttttacaaaatgatcatggggtgctggacaatatcaaaggcaaaggaattgttgatgatgttcctcaacagttacatagcacttttcagcaatctccatatgggggccaagctagttcttcttctaagacaatttttatgaaagaaaccaatgaatatcctcctggttatctacccaagaggacagtagctttacctgtggcaacccctccggcgtatttacatcatcttacctctgctagtaccactattccaccatcaaaagctgtcaaggtaactccttctatggcttcctctgtcactccaaatttggctacacttggtgctgaaattgctactgagaactctcccttaactgccaagaacccttgtacgtttaccaaacatcaaatgatcaaccaaggaggtaatgttaggcaagtgttgaagagatgtcgcacaagagataccacattgaccgatattactaatacaccccagcgtcaactacctgaacccatttctgaattggctgccatttcactagtggaggaggatggtgatgtttctttggcgaaggctgtgtcccagcctcgccaatcaccatgaatttaattagctggaatgctcggggtttgggcagcccccgtgcatttcgaaaactttgtttgctcatttctaagcatttacctgatgtactttttattatggaatcaaagcttagtataggtgctatttctaaatttcgtactgcttttaattttcctaatgggatagaagttcctagggtgggactttaatgttgctttggaaagcaaatgtaaatgtaaatgttcttaactttggtataaactttgttgattgctacattacgactactgatggtcttttatttcatttcttgggtttttatggagctcgtgcaacttcccaaagacatttcacttggcaagttttgaaaaggctaaaagatactgctccattgatgccttggattgcaatgggtgattttaatgaagttcttactcatgttattaagcttggaggacctgctctatgtgatacacaaattgatcagtttcgaaatacagtggactattgtggtctccatgatctccccttttctggtgcaagatatacatggcataacaattgtgtgaatggtacaaatgtaaaagagagacttgattatgctttcattaataatgcatggcctcatttatttggagctacagaggtttcacacttggatttcttcaaatctgaccaccgtgccctacttctttccttaaatcatgttgcaccagcagtaagtcaaaggttcaaatcaaggtttcattttgaagctttatggctaaaggaagaagaagcttcagatattattctaaaaaactgggttacttcaatagctgaccccatccttcagattgctaataatctctcagcttgctccttccatctacagacttggcatagaaggaagtatggagaattacctcgacagattaatagcacataagataaggtttctgctcttcagaactcatatgcaacaacttttgaacactttgaagagctcaaacattgtgaaaatatccttgatgagttgctagcacaagaataagactattggaagcaacgatctcgtatgaattggttgaaatcgggtgactcaaatacaaagttttttcatcaaaaagctaataaccgtaaaaagaacaacaccattaagaagcttattgatgaacatggtgtggaacacactataagaatatttttatttaaggaaatatatttctatttaaagaaataaatttctatttcaggaaataaataaataattgattttctaataaatgaata

SEQ ID NO: 45362 - DNA, 2854 bp, Cannabis sativa
tcttaaaacataaaaatctaaaaaaaaattatataaaaatagtaagtaaaatattaaataattaaacgatgatcattaattagaatattttagtccattaccaaataatcaattttttaccatataacaaatattctataataacttccattgaaaaatatcgactaataaactacttacctattaaccccacaactagacaaattaataaactgtataataataacaaaatatcagcaattctatataatattaaatacaataataatccaaagaacaggtaacaattaattatatatatatatttataagtaaagtgaaaatgatagatccacctaaataaaaaagcagtgacatttgtatggagagcagcctcacgtgtcggtgagaaatcgatcatcaaattttaataataataaatactccacacatgacttgagtacaacacaattcttttcttttctttttcttttcctttcaaacctcatatatcatatatacaactaactcttactagtatctcttctttcttaatttctctctcagttctctctttcctttggaggagggaaattggttttcctcccacgaaggaaattaataactaataatcagtagtactacgtactatagttctggcctggttaaggagtatagtagttagaataggtggaaggaattatcagcagaaaagaagaaggaaaagtagaaggaaagtgaagaaggtgagagatagtttaatggatttctggaacaagatggttttccctgttcgtcgagtttttcttgctattacttctcgtcttaagcctcaaaaatcaggtatgtgatctttctttttccttcttcccaaacaccttttttaatttcctataatcaaaacagtttaaatataattcatagtttgttaaaatgaaagggaaaaaaaaaactaaagagataaaagtttgatttaattttgggtgatcattacaccttaattactcataaaagtatctattaattcaggttaatttcatttgatattctatatcatcataatttagaaggcacatttgtcttttattaattggtaattagtatatttattatataaaaaagaaattaatttgcaggcttagtggaataattcatttttgtcatcaagcaaagcactaacaaaaatatagacaatttcaattttattggttcaacatacaagcacatatttttctcttaatttttaatttatttgatgcaatggagacatcattttttattgtttaaatggtcaagttgcattaataaaagataaatgttttttcgtggaattatttaactaatgttacatctttaaataaacatatttttaaatacataaatagagatacccaatctagatatcccacgttttattcaataagaaaatacaaagtattttaattctcaattatttatatatcaagattattaaaaaaaaatactacaatttgtggtccatgtagacagaaattttgtccacagcatatatgatatcatatcatatgacccattaattagtttatcattatacacatgacttctcaataataatgacctctttaccaaataaaaaaatatcataagttgaagaaaagaaaatagaaaataataataaaaattccttaagagaaagtaacaataaatttaaacacactcacagaagagaacataacacaaattactagtatgataaagtttatttatttatatatttctaaacttttatgttgaaacaaaatgatataggtataagacacaaagagaatgagtgcttttatatccactagactaaatccactttatcgacaagaagaaaatcaatatttctaggaggacctatcactatgttaaattaaatatactcaaaaagtaaaacaaatcttattttggtgttaatttttacatataaatatatatattattttatatactacccattacttattactaaatacccaatacttattttgtcatagtaccgaaagaagggtccatagatgataggatcaatgtcttttgcagtgcaaaactttatgcccaagtcgctttagtaaatgctctcatgaccaaagaaaccaattattcaaaaaagcaaattattctaacatttaactttttttgcacaaacaatccccaacacacattctaactaataaatcctacttgtttgattattgtgatcataattaccatctaataatatataagaatttagtagtggtgcttatgaatagattcatctaatgacaacatgtggtgtaagtaactatatacactaaatatgacatcaatttattattgaacctttggtcacatcataattgtgtgtagttgcactaatatatatggtggaactaaggtgggttatttctatgacatcacaacttttagcttgaatttaagcactatgtttgcttaatagcttgaaaatgtgaaattatttagtatttttaatatgtttatttcaattctttaaatttttcctttattctgtcccttccattttactctcatctctttttcactcaggtttaatttgagtatatttataaactccaataacgaaagggtatatataaatagggatatttgagacgaaatttcctaataattgttacacaaatcaccttcaaaaaatacagattgaactacatattaaataagttaaagaaatatgtcgcccaatgtttttgaattattactttatacttaatggatttaatagacacttaacaactaaaaaaagatgacttgtaaaataatgtacttttgtcaccacttttggaggctaacaattacaaatgttaaaaggtttcgcctcaaatatctttaa

SEQ ID NO: 45363 - DNA, 2125 bp, Cannabis sativa
  modified_base (479)..(482): a, c, t, g, unknown or other
aaaaaaagattattgtacttaaagattaaaatattatcactccacaactctttattttctacttttgtttaagtaacatttaataatgaaatgaattttcacttccttattttttttaacccaatatcaaagatgtggtgatatgaaaaattcttctcttccctaaacataatattaattattttatttatttttcttcttcgttttccatattggtctattcttgccatagttctctctctctacatattttaacttaaaccgtacgtaaatatccagcaaaaactacaaatttgtaattatttaaataacgtatgtcaactttgaaattgacatatttttaagtaattgtaattatttattgtaacgtatgaacttgtgaaaggtcccactaagaagtgattaagatataatatgtttaatgattaataatattttggaccttgtttttttttgcaaaagttattgattggaccctnnnntttgttaaatgacaaaatagattctgtattttttaaaatgataaaaatagaactctaaacttaatttttgacaacttttttttttaatataacaaacttgaagacaccttggagcgagagcccttgacaccttggagcgagcgagcccaagatacgttggagcaagagtttgccaattcaaggttacaatcaaattttattttgacaaaacattaattcaggatcttatttgtaccattttaaaaaatataaggtatattttatcatttaacaaaacagaaggtccaattaataatttttacaaaatacgaaattcaaaataatatttaccccatgtttaatttagaacaatttctctatctaccaagtctctaaatattatatattaactatacttgcccgacaaaataacaatataaaaaaaataattaggtgaatttatatataaatagcatgagttatttgtgtcgattctacacaaaatatcctatccatcgcttcatttttcatttcattaatttttaatataatttagaacctacaacatatataaatattaataattaaaagaaatgggtatgggtcccattttcgtggactataagattgtttacatgtggaaaggctttgttctacgttaattaatcaagatcactagatatgaacaactataaaatagctcaaatttatataataaatcaaaaatttataaaaatatacatcaacacgaaaaaaaattatttttaatttaattttttttatttataaaaatatctcttcaatgaaaataatgaattatttattgtttttattattttatagttaatgtatagttgtagtagatttaattttacgttattttttagttatatatttttttttattttagctgaataaaatatatttttttaattttaaaattttacaaaagtatatttataattataaattttaaatcttaaaattataaataaagcatataaaatatatatttttttaaaaattcaaaaaaaaaaaaaaaccattaactttccaataattttgtccacattttagtggctttatataatctggaaacgaatcattttgatacgtgtatgtagtcttgattatggtctaagttgataatatataatataataataaattatgtgtaaaattctattataggtacgaacttatatatgattgttaaataaataaataatcataactttttataaaataattagcattgttatcgcttcaacttttagtattatcagattttattccttaaaataattcgacttgttaaaaatttctcctaaaatataatagttacataattatccttttactgtcaaaatttagtatttttaccacttaaactttaacaaataaattttttttccctcttttattacaaaattttatttttagaaattacaatatttaattcaaaaaaaaataataaaaaatattaaaaacttgataaaaatattaaattaattagaaaatattagtttacttaaaaaaaaaaaagttaaattattcttaacagaatatattttcaaattttattttatttataaacgcgtatcttgaaaaagcaaatcaaaattattgagaatctaataaataatttaaataaactaagattt

SEQ ID NO: 45364 - DNA, 2487 bp, Cannabis sativa
cagaaaacaacattttattgttttgaaaattcttgttttttgtaactttattttctgaaaactatttcaaaaaacaaagccaaacaagtcaaattgttttcaaaaaataatattctatttttttaaaaacaaaaaacagttttttagttacgatgccaaacatgcacttaattttttcctttgttttcactattcttcttcaatactaactagcatcaagtggaacttcatagtcccaccaattctcttcttttaagtaaacgagttaatccacgtaatccaaaagttatctttcttcttagtgtgatagcccaaacaaaagattctataaggcaatatctttgaagccaacaccacccacttttttatcactacagatgtcctgccaagccacatgaccatggtagtttagcatctcaatgcctttccaaagataggcatgataaatttgattaattttttggatgacagcctcggagagaataacgatttgagaccaataggaatttcttaacaagagaactggatttatcgagacaatacgacatgcataagataaattcctactaatccaaatatgaatttgattaccattttatcaaccaagcactcacaatctgccttaagcttagagatttttttttaacaaatctacataccaaggtacctaaaaggcagcaaactcctttggaaacaagaaatagcaatacttctatccaaaaaataagtatcataccttgtccataaacaagtaattttttaagattagcacaaagccctgaagaattggagaagagtttgtaacctctaagtaagagagttgttgagatatagtctcctttgcaaaatattaacagatcatctgcaaagcaaagatgagtaagattcaatcttttacatctcagatgatacttaaagttctctttgcttgcaagtttcttcaaaattcttaacaagtactccattcctataccaaacaaaagaggagacataggatctccttgcctcaattcccttttagcctgaagataaccatgaagagctccattaatgctaaaaaaatcttggagttgtcacatgactcattataagatcaacaattttcttttagagaaattaagagcttccatcatttctttaagaaaagtcccaatcaagagtgtcataggctttctaaatatcaatcttgaataagcaagctaactttgcagtctttctatcatagccacgaaccatatcatgacaaatcatgatattgtgagcaatttgcctttcttttacgaagtcactttagttctgaaaaagaatatcaggaagaatctcacttagtctattacaagtcattttagtgactattttatagaccacattgtagcaagcaatggatcaatagtcacaaataggttttcgacaaatcgacttcgggatcaaagtaattatggtggagttgatttctttcaataacttgccagagttcagaaaagataggatggtattttcaacttcaattcctgtaatctcccaagtatccttaaaaatggcactattaaaacaattcggctccgaggctttttcatctggaattgacttcaaggcaactacaacttcatcttctttgtagtcacaagttaaccaatcgacttgactctgactcaccaaattaccttccccaacaatacttttgtgaactcttattctatgatgagctttagaacccaacaaagagttgtagaaatcaagaaaggctttagtgacaccttcttgattgtctctccttgtgccttcttgatctgtaattgaataaattgtgttttaatgatttttatatttcagacttgcacggaacagtttggtgttttcatgaactagacataattcttgtgagttgtaatgtatagtcttcctgagcaacttgttcttctttaattaagtcacaaagcccttgatcaagcttattttttttttttttttgcacacaaagcatcttgttaaaacactcttaatcctgaataatgacatcctatttatcatgcctaatcaattctttcagactcgattgaagacatttcaagtgagtaacaagttgatacattcgctcctctgaaactttttccttcccaatagcctttcaaattattaaaaaaatctctcaaatctttcaaaaaattacaatacttgaaggattatttcatattgtggaggctagaataaattgaaaggatagcagaagagtgttcaaaaccttttggaagaaaagtcaccttagttgtattgtatttgtcaattcattctgagtttgctaaactcctaaccaatttagcatacactctatcacccccttctcgcttattattccaagtaaagaaagagcccttgcatttgatgtcttttaaaccacaagcagcaacccaattttaaaaaagtaaccatatcattggcattccctcgataattcaacctttcagaggtattcaacacaacattgaa

SEQ ID NO: 45365 - DNA, 1274 bp, Cannabis sativa
aatattccttatatacactcaattcctttgagtggtccattctctttctctcaaacctcattttctctcattctctctaacaaattcaaactaaaattttatttttagttaacaattaacctctcgaagctaccacaaaatgctataaattagagagtttgttgtgagactctattttcgagatacccaataattttcggcaacaatcaataggtaagtgattttttttgttattggtccttataattaatttagaatgatattttcatgattgattaataagttgttgctatgtttttgttgttttgtgttgaaatggttgatgtctggtttgttatggtttttttttttgcatttttttttctagttcaatagagcccgatgctagtccgatgggtttcttagatctaaggtcaggaatgatggcccgattggcttgattggcccgatagagcccgatgcttgtctaatgggtttcttaaatctaaggtcagggacgatggcccgattggcccaattatgcccgatgttagtctgatggtcaacttggacctaaaggcaaggctgatgggcccgatatatgcctaatgctagtctgatggttcgcttggacctaagggcagggtcgatggcccaataggcccgatatatgctcgatgctagtctgatggttcgcttagaccttaatttgggactgatgggtccgattgtaggcccgatggggtttgatgctttagagatttatggcttttatatgacttttttatcacttttttatatgaattttgttttaatttgtaattgtatttttttaatgtctgtgactggttcaactatttttgtattcgttaagtataatagtgtttgggagctttagggtagagattgggtttataaccaagttaaaaatttggcatttgagattgatacaaacgtaagctacctactcatgtttgattgttgatcttttgtacgaattgacaagtgcagtatgacttgaaattggaagtgaattacaagtacatgaaatgcttaatgtatcgccctgaagttattagaaatgataagcgtgtaagattatttttgtctatgcttgcgaagaagccagatgaatttactctcttgtttgtgactttggtaaagaagaatgtctgtatcgatccagtcccacaccaaaaattattaaggatactcgtagcgaggttgggagtttcattttagaaatgaatccagaggtgttgacagccaatgtgttaccttaattaaacactatg

SEQ ID NO: 45366 - DNA, 1095 bp, Cannabis sativa
gttgttgagtatatcctttggcaactaatcttgctttgcatctttcaacagatccatctaggttatatttgattctatatacccatttattgctgattgtgtgttgtccaggtggcaaaggtacagtgatccaagtttggttatcttcttatgctttaatttctgttcccatggcattattccagactttgtatttgatggcttgcgagtaggatgtaggtttgataatctgatctgcagcaaggattgcagctataattttttttgaaaatctcttgtaggacaagtgattggtaagaggatgagttgttgatgtgtgtatttgagtatcacatatgtaatcgtttaggtgatttggcttgctggttttccggccatatttagttttataactgttgctggatttcgctatgttagatggagcagatgaattggattttgtatttttattggcaacaggatgagaggttgtaagatcagtagcagcaaattcattaatggtgtgaggaagggcagcatcaggtgctgcaatattggttgtaccaatttcttttgctgtatcaggagctgcaatatttgttgcagcagtgttttttactacatcaggtgttgcaatgtgtgttgcagcagaatgttttgctgcaattgaaagggtcaggtgctgcaatatttggagtaactgtagataattgatcttctgacctgctgtgttggtgatgaaaaaatcgagcaatgtctttgttgggactattgttgtgatatggataaatgttttcatagaaaataacatctctacaatgaaaaatgcgattactttgtatgtcaagtagaggataggctttcatattttcaggatatccctatgaaggtacatgctttggatctaggagagaaattatgatcgtgattgatgttggatgcatatgataggcagccaaagtttcaaagatgttcatactttgggatcttgttgttgagcatttcaaaacttgttttatctttaagtaacattgaaggtgttctatttattaggaaagtagcagtacgtaccatataactccaatagatgagaggtattgtaaagaccgcttagtt

SEQ ID NO: 45367 - DNA, 1070 bp, Cannabis sativa
agatttaatccttcattccctggtgttggatctcaaagtcaaggcttgccttctgcaatgttggccactgcagagactgtctgcgatgagtcttggtacccagactcaggtgcaactcatcactgtacctcaaatgaagaaatcctgacacaaaagaatgagtgtcaaaccagtgagcaagtttatatgggtaatggaagtggtctgtccattcaaaacataggtacaactcaatttttggcttctgaccaatccactttacttacattaagtaatttactgcatgtaccccaaatcactaaaaacttgatgagtgtttctcagttttcagctgacaatggtgtctattttgaatttcaccctgatttctgccttgttaaggatcagaagacccagaaggtgctgctgcggggtacccttgaagctggtttatatgtgtttcactccctcaatctaccaataatcccagacagaaatcaatcctgtaatcgatatatccctttgcctgcaatctgtaataacatacagtctctaccagataccaattcttgctgtaatcaaccacctgtaacatccacttcaaacaataatactttgtttcatctatggcactctagattaggccatccagcagccaagacagtcaaaagtgtactcaacagttgtaatattcacaacattaataaaactgtttctgatttttgctcagcatgttgtttaggaaaaatccataaatttccttttcctaattctgaaacagtttatactcaacctttacaactcatacacacagatctatggggtccatctcctatgatttcatccaatggctattattactatgtccatttcacagatgcatattcaagattcacctgggtttatttgctaaagaataaatctgatgcaattcagacatttattaattttaaaactcaggtggaaaaagaacttggcttacctattaaaaatctccaatccgattggggaggagagttccaagccttcacttcatatcttgtagagcatggcattcatcatagactttcatgccccaccactcatgaaca

SEQ ID NO: 45368 - DNA, 2491 bp, Cannabis sativa
aaaaaaaatataaattatccattatttaatgttataaataattacactaataaactaataaaaataatataaaagtagataaaaaatagtgcatttatagtgatcatagtaaatgttgtggtaatatttgttagagaattgctaaaatgtattattggtgtgcctagtttatttttctgtgttatactattattggtgtaattaggtatcaagtttaagaaaatagtttttatagaatatcgctaaccaatcgtaagataccacctataaaaagtgttggacagtactagtatccaacaccaatgctctttagttttgtattacttatttccaagtattaatggtgtctagcattatcataaagtgacaagctaacaatattctataataattattaaattaaatcatgtagacttgataattaattttaccaataacaatataatattttaaatgatgctagttataaccaataatcaatccttttcaatattattattttgacaagcatctccaatgggaatgctttaatgaatgacattttttatatcttttttttttctttttaattattatattattataaagtaaaaaaaattaattattttatatatattaaagaatatcttacaatgatatttttatattttcttttattattttgttataaaataaaaaaatataattatttaatatatattaaataggagaattactttatatattattattttaattttttttttaaaatttatcgtttgtgtttctaaagtggttgcagcactagttgcaataaaggtttctatacgattttttgttacaatttaagttacagcgctagttgcaataggggtttccatatagaatttcgtaaacatataaaaaaaaaaaactattttgaagtgtaaaaatgaaaaattctctattaaataataacataatattaatttaataattagaataaaaaatgtcgaaaatgaaaaaattgctacattagagatgcttaaaaccatttgatttttatctgaatataactataaatagaaaaataatttataactttcgtcttttcagtgttaacgattgcgttggaaaattggaagtagaaatttgacttaaaccggtttaatgtgacatctgactagatttttcatttcccaactaaaaacttgtggttcgtagggcttagttactttgttttattaatgagacagtataaaaatgtggttcgtctttgttctttttttaataaatgtgtggttcatctttaattgatgacccaattattgattttgagcattagtgttttgaaatttgaaatatgtataaaccatagcgtgtgattaagaaatgctaaaggacactagtggtgtaccacccttctatgtgtcaatatcactattagtttaactaagtatcaggttccatataatttaacaaaatagtttttagggagtatcgctagccaatcgctacgcgatatgtcgagaaggtgctaggcaccactggtgcctaatagtaatgctcagcgtgattatgtgagaattgttttgaggtattattggtgtctagtattatttttagtgtaattaagtattgagtttcatataattttaaaaaaataatttttatgaaatattattaactaatcgtgaaacgttacctataaaaaataataggcaccactaatacttaatagcaatgctctgattctgtcgtagacacccttgtatgaggaagtaattttttaaaagtgtcaaaaaacactctacatgatctaaaaaggtaatttttttctctgtttaatattatttttggtactcttatttctaaagtactccaatagtaagaacacttcaaatttattacatggacacacattattatttaatatattatttattttgacttcagtaaaacaaaaatggaaaaagaaatgagtatatcttcaatgccaaattttgctgtcaatattactctttagtttgacacccaattagctccttcctacatatgataacattaccaaacattctctatatgcttcaccattgagtctcaatctattaattgagcaggttaaaaataagtataacctaatttaacctgactaatatcattttttttagatttgtacttttcaatttttattataacataaacaataatatataatacaattatatatatatataaaaaaaaaccctaatgacctgacctcgcacacacactctctctaatggtttatgtgttcaaatttcatttattttgaagaaaataccttaggttagtttggacgggttaactcgaccaaaccaaccaagccatcggtcgatttactatttttttaaattgagcgggttgcacttagaattttgcaactcgatatttacattaggttagaaaatatgtagtataaaccgacttgttatctgcatttccggcaagggacacgtggactccaagttagcatctaaagcctaccaatggg

SEQ ID NO: 45369 - DNA, 650 bp, Cannabis sativa
tataagaacatgggctactccattcattgccaattgattttgagatggaacccatgattctcaacactattcattattatctattaaaattctattttccttgtttcaacattaaattgatactcatagagcaagtattatattttttttattgactttcatgattatattccttatttcggataaaagattgacaaggttttatattgattttaaatgcttgacagactcattatgggaaattcgatgaaggtttgtcttgttatttacatatttcagtaataaagtgagaactaaaatatgtcaatggcttttaggttttttttttttttaatctttggttggtagtacatgcaagctgctattttctttgactaatttaatggattcaagataaggtatactgattgtatatattttgttattgtagaaaattcaataccacagcttcttctctcccagttgcaagttccaaaatgttgaaggactagcaggcttcagtctattaaaagcattagaacagtcatatcattgaatattgtcccaattgaaaaaaaaaatgctctttatctatgtataaaagtattttcatcgtttcatataactacaacaaatatttgaataatattaaagttgtaattttttttttt

SEQ ID NO: 45370 - DNA, 1519 bp, Cannabis sativa
gacagagcaatgaaatcactaaatgtggaatcaaggatgtagagaccattcttggattcatctttgccaatcattctcttgtggatgttatcttacatgatgaaattatgatcagtaaaaaatttaacatgaagagaatttcaattaacgagccaatttacaaaaatgatattatatttaaaagaatgaacatatagtacattgttcagggtgatgtagggtgaaatggtgactgtaccacctttattgactaccaatttttcattattaggtaataaaagtatagtgaaaattataaataaattggaaaagtttagtttcaaaacaaatatgtatcgtagccctgaatccacaatctaagattcattattgggaatagaaaatatattggaaagtacgatacctgtgttacctgttgatgtgctaggatcagatgtagtcataccagaatgttggccaacaagtaagttcaggagttgctggtactgtgtcgagatgagttgaggaagaagtgttgtgccatcacctgtagcaacccctgtgtcattactggtttgaacttggttggccacaacatcttttcctttattgttcttgttgtagcctagtgggtaaccatgtattttgtaacacttttctactatatggccatggatgttgcagtgggtgtcaaaaggcatgtttctcttttgttggtgagacctattaccattggaatctggcttgttcgcactactctggtcaccttgaaaagcgaatgccatattggtatattggtccacagtagtgtttgaattttctctttgattctcttcttgagtaaccaaatgaaaaactctattgatctcaggaagagggcccatgagaagaatgctacttttgacttgagagtaattaagaatcaaataatcccatcaagaaagagataatgtgttccatgtggtagtaatcttagagtttcttgactctaccatagttgcaaccattacaaacacacgaaggtcgataatgcgataattgttcccaaatagtctttagcttagtaaagtacatgctaattccctggctatcctattttacattcatcaaactttttctcaaattgtatatatgtggactattcttttgatggaacctaatcttaaggtcatcccatatggcagcagcagattcatcatacaaaatactagaagaaatctcctaagagatagaatttaagatctaagaaatgacaatgttattgtttctaaactaggcattacataaattcggttcagtaggtgagggtttaggaattgaaccatccaagaagccgagcttgttcttgataaagatggttaattacatggctccactccacgacatgtagttatcttgtccagttaagaattgagaaacaaggatattagttggattatctgcatgatgaagataataaggatttgaaggatcttccaagagattcctttgttgtatgatttggtgagcttgactgctatgaacaacaggattcattgtc

SEQ ID NO: 45371 - DNA, 2693 bp, Cannabis sativa
cttgtctgctccagatgagcttgtcgaagacgatggagctttaatttttgatttttattgaaagtaaataagattataataaaattaattttatttagggcataaaatctcaataaatattaagctaaatttcagtttgcttctttgagactagttgttgttgttgtggatgtggttgttgtggcctagcattttgctgaaagcaccctaggtaattttgccaaccttgattgaagaagttaggaaactattgttttgacgatagaaatttctaatcgtttgggcttgttcaatgagcattgctcataaacatgagacctccacataactcacacatggtgtgcactgcttctcttgggtggtccatgtgttggcttgcaattgcttgattaaggtttttacctaagcagtcaactttgtaatgacatcaatctcatgcaaactaactactttctttgaactgctcctctcattgggccactgttggttgatgataaccttctcttccaacaattcgtatgcctcattgatattttttctcataaatgccccaccaattgctgcatcgatgagtgtgcgagtaggaccacacaacctattgtaaaaattatggactagcatctatttatcaattccatggtaaggatattttttgatcaagtctttaaacctctccaaaatctcatagagagattcattgtccaactgatataagttgttaacttcccctctcaatttagctgcttttgttggagaaaaaatttagagaggaatttcatcggcaagtcaccacatgtgttgatagagtaaggtggtaggggtaccaaccaactctttgctcgttccttcaaggaaaatgggaataacctgagtctgatggcatcttcactaaccccgttgatcttgaacgtctgataaagtttaacaaaattagatagatgcatgtttgggtcttcagaaggtagtctcccaaattggacattagattgaactatttgaataatggctggcttaatttcaaagttgctgacattgacagcgggtgctcttatacaagactgaacccccgtcataataggtagcatataatcccccagacttctggcaggtagattcttgccattagcttgatcttctactataccccattgctaccacaaggcggctaattatttagctcatgctgtttattctttttcagatcgtcaatttaatggaaaatttgtcccggctgatcttcatgctattttgctagtgaattcacacttttaattaataatacaatgaactttcagtaaaaaaaaaaagagtttgtttcaaattgtagtagtaattaaattattatgagctttactattattttttgtttgtgttgacaaccagttacctttgtatatatatacttttaaaaataaataaatcacaaaaaatactaaatgtcagattatcattacagttaaagatactgtaattgactgaaaaagagcttgtttcaaattgtaatggtaatggagtaaggcaatggagaaggtggatcttctacttcaacaactccttcaagcatttgaacaaccttcctcatgttaggcctaagacatggattctcttgaatacaccacattgacaccttcacataactctccaacttcttcctatcatttaaagcatcaacttcataatcaacaagcatatctaatgacccttctgtgaagcaatcataagcccaatctgtcaagatctctttcctttcctcaccaatctccatatcacaattttttctacagcaaacaatctcaagtagtacaactccaaagctatacacatcgactttcgaagtaatagacatattcctaaaccattcaggtgcaacatacccttttgttcctctaatggctgtatttgtttggctttgattcatcatcaaaagcttagccaaaccgaaatctgatatcttggcattgttgtactcatcaagaagtatgttctgaggctttatatcgcaatggatgatctgtgtattgcactcctcatgtaaatacaatagtcctttcgctatgtctaaagcgattccagctctttgcttccaattcggttttaagtctccaaacacaaattttgccagtgtcccattttgcaggtactcatacaccagcaaacgattctgtccatcattgcagtaaccaattaaccgaacaagattcttgtgatgtgtttgagctattacattgacttcattcttgaactctttctcagtctcaggtaccacaaaatttagcttcttcactgctattacaatgacacttgaatccatatccaacatccctttataaacagttccgaaagctcctcttcccaactcttctctaaactcatttgtggcttcctcgagctcttgataagcaaagctacgcaaattcaagtcaggcatgtttttcagtgatgaaatctttttacttcttctactaccattcttttggcgtaaaaagaagaatcctacacaaactgtggctgccaataaaatattaacaaaaacagaagtacccaaaagagttgcaccaactctgattaactcatcttggtttttcctcctctcttctacataaggaatcccaactaaggtgatattgtctttacgaactttgataaatgccctcgagttaagattctcatcgaccttgccattcgagagaggg

SEQ ID NO: 45372 - DNA, 3331 bp, Cannabis sativa
  modified_base (2449)..(2455): a, c, t, g, unknown or other
  modified_base (2542)..(2544): a, c, t, g, unknown or other
  modified_base (3264)..(3269): a, c, t, g, unknown or other
aactcacattactttaaaatttataatttaccaaacactcagctcaacttttttccacagttttgctacagctgctttttctcacagcacagctaactctgctttttcctacagcacagctatgccaaactggccctaagatacctaataacaatattcatgcgcatttagttgtatatatttttaagttaacattcatattcataacctcataaatctatatacacatattggtgtaaccaaataatgaatcatgtgaattatatagattgagttgagccggagaggggacctcagaatcagtttgtttgtgtacatgataatacggacaaacttatcatcgaaacttaaccggcttaacattgcacacaggtaggaccattctaccctattataggctttactcaaatccagtttcaaagccatatagccatcttgacccttttgctttcttttcaaataatggaggacttcatacgagaccattaagttatcagttttaagacggccaagaacgaaaacactctgattactcgaaataacatcacccaatagacatttttaatctctttgtcacaactttagatatgatttaggcaatcacattgcacaaagagatcggccgcaactcgctcatattctcagggcacttctttttaggaataaggatcaaattagcatagagtccatatggtagaattgtctaactgtctcaaccatgtcaactcccacaatatcccaatacttttgaaagaaagttgggttcataccatccagtcctggtgacttatctggatgcatccgggcacttcttgcagcagttggtgctgctgctatgatgttctccagtggtttgatgaagggttaaggtagtggacgtcaggtgaaactattgaagctgctatgatgtgttggtcgatatggcatcaccgaaaccaactggtttggaatgctaaacaaccaaatgttgatgatgtaagtctgttagctaagctaagctttgaggaatggagtaatgctcaaaagatttaaccatttaccaaccttgcttctcggcaggttgagattaagcattggacaaaaccgatttatccacagatcaaagttaatattgacggagctgtgttcattgatagcaggcgttttggctgtggtcactacaagaaatatcacttttaccagcacagttcgctactgcccattttgcaaactgcatcggcaaaaatgtcaaagttttaccagcatacatttgcagtggctaaaatctaacttttaccagcacataaggaaaagtcatttttgccagctcttttcattttatgctggccaaaattctaataccaatattaatttgccaacccctttttgccaacacaacacaagtaaattctattttacaagcacaatactaacttttgccagcacaaaaatgtgctggaaaaagtgacatttcttgtagtgggttgtgtaggagataagaagacaagtttttcctacagctccatcgccaacagtaacacacttcatgaacctcaaagtactcatttttttctacttttcaattttttttttttaaaagaacaaaagaaaaaaaaaaccaaagcatgagatcatattctttcctctaaataaggcattcccaaaccctaacactaaatgggtaattaaagaaaagaaaaaacaaaaaagaaaagaagtatacaaaaagaaaaagcagtactcttggacttaaatatttagaaataccaataatgaataaatttcaaattatttgttttctattttggacttaaacttcaaatatttaggaataatccaattttctattaaattgtagtttttgtttgaatactctttgaatacagtttattatgtttcatccttagttttggatgatatttcttaataaagtgttgtttttattaaaaaaaaaaaaaaactacacatgcatcatattactaattaaaaaaaaatagcaataattaatgagattcttaggagacaaataataataattttttattgatataattaatattacgcacatatacataaataattataaaaaagaacacgcacactctttttaattattcattaaaataaaaattgtctatgtaaataatgacattctacatatagggcattgggtgagctttccattgatcatgtcacgagtgcattttttgtgaaaacaataatcacatttggtgattcttacttcctcaccattctcaaattcataagcacatattgagcattggtttccaaatattgtatgccctttgcatggatatttgcttagctcaaacattagaattttggaagcaatctccttattagtaactaggtaatatagcaacttttcgcgcaactaatttaatatttttttagtattataataaataattacttaaaaatataattctaatatatagtaaaattatannnnnnnatcttatttcatattattattaattatttatttattaaaacctaaatgtacaatttaattaattattatttattaagaagtttaaannntattatatgtagtattttaaattgctttgttaaaagaaattattattataaaaataaataagtaaggtggtgtagaaaaaaattacggtgtttcccataatacattattttcatatctcgattattcaaaactattgttactattatatctcatttgttgactcattgtatctcacttatttttattaccgtatcgtatctcacttagtttcatcaccgtatctcacccgttgtcatcattgtatcacatccattgtcattaccgtagttcacttgtagtcttcactattgtatttttcaaatctatatcttaatcttagatttcatctcgaattttaaatgtttttttaatatttttatgacattagaagaaaattcattagtttgttctgttattattaatttatatgttctaaaatattgattattgttttttaaatatcttaattaaaaaaaatatataaaaaatgtgatattttagttatgagaaaattatatttgatttaaattttaatatatttttttttaaaattatttcttattttctaactttttttttaaatattttatatttttatagaaaattaaaataatagtaaaatatcaatttgtaaatttatgtttttttttttaaatatttatatttttataaaaaattaaaataatagtaaaatattaatttgtaaagtttgttttttagaaaaattattaaaataatannnnnntatcaatttgtagatttatgctttcataaaatattaaaattgagagaattaaggagagaaga

SEQ ID NO: 45373 - DNA, 1049 bp, Cannabis sativa
tatataaaaaagagtacatagacatttttgattataagtagtacaaaatattttaaaaaagaaaaaaaaaacaaaacaacaaaacaatacaaataataagagtattgctttgcccaacacaaaacaacacaaataaataaatgttgtgtactaagcttattgtgaaatgacattcacagctgtcaaattttattgtgaagacaagatagtcatgattttagctattattattaatttatgtttgttttttcaaagaaaaaatttcaccacgtttgaacccctttaatggaaaatttcaatagaaaaaaagttaaagaaaaaaacaagatatacgttactataacatttgtgagttttaggagccataaatataacctttaaaagtaatcgttatatctgtatttttattttggagttttttttgtttttacattttatagtatattttttttttatttttacagaattctacacagaaacccatgtattaattaacgaagcaacttaaatcacaactaaaatctgtataacaacctacataaaaaccactgaagaaaccactggagcaattaccctaaccgtacgtaaatttaaaaataaaaataaaaataatatatatatcacagatctaaacatattcttaaaaatactttgtagaaaaccctaaatcataaaatcataaatttataaaatataaaatctttgaattaaagaagaagaagatgataaaagatgagcggaagcactaacctaaagccattgttggagattgctgagaaggttttgatcttccaagaatacactatctttctaaaatattttctaaggagagaatacataaaccctagtatttcttagggaccactatctatttataggctcattatataatgagttttgagtacttataatttgacacctcaacaaattataaattaacttatggtatctacacattatttccatgacaatttaatacctttttgaaacccatagtataattggtcacttaattttatatcacactttataatagcatatacattata

SEQ ID NO: 45374 - DNA, 797 bp, Cannabis sativa
ttagctggaatatatatgattattatacccctaaaatttcaagttttacatgaaattttgtgcataatattatttttagttataattttttatcataaagtaaattttttgtaaataaaaattattaaaaaaaacaatatttaaatgcaaattattactattttaattttagcaagtgatcgacaacacttagaacaaattgttatttttgtgataaatactcttagttgtggatcttaaaacatagaaataataatttatatttagtcataattttttattttacatttgttacaaattttattacaaataaaaataaaatttttaatagtgtatatttattgtgttgtgaccaatattcatgagatttctcttgggaagccttttcaagtgtcagtttcatctcttggagcataataatcaccatattaattgatgaggatgaagacatatagtattattatagttatatatatatatatatatatatattgcttattgactcacctaaagtatacttgttgtagttgcatgcccatgaattgcctccattttgaatagcacaatattttgcttccacaactattatatatgtgattagcaaaaaatactttatgaccaatagatcagcaaattatataaaataaaataaaaagaaattcgtaactgaagtcactacaaaaaagtttctagcagcgaaaattcttactggaattgcagttagaatgtctagcaccaacatttttcactcactagatctttccagttgcgcgttaatttgttttttgcgaattaat

SEQ ID NO: 45375 - DNA, 869 bp, Cannabis sativa
tcaatttggcctcttatatttataacgttgttctttttcaaaaaataaatataaaaaactacttcataatgaccccatgttacacaaacttggatataaaatatttcacaatttttaaataccatttgtccaatcatcactactttcaattataattatagtttggagagtatgcataggttggaccattgttattaggtattgtggtacctactatttttagatatgttatcttgcgattatttaacgattatctagcgatatttttttaaaatttattatattatattatatgtaacttgatatttaattggaccagtagcgataaaaatacataaaagtgtgctaagcactactaatgccttttagtatttttcattgttatgtgtgccaagcatcttttgtagatactgctattgattaatcatattttttaaaagttattattttaagttatatgaaacaaaatactttacatcaataagagtatgacaccgaataaaatgctagataccaattataccttttaattaacatttctcatagattatatatatatatattattttattattataatttttgttttttccaataacaaacccctagttgtttttttttcctttcgttgcaaattttccaggcaaaataatttattgaaagaattaatctaaattatgagtgatattattatgaagagaattgcaataaaaaaataaataaatttttttttaaaaaaataaaataaaattgagtagctggtttttcttttgctaaacaaatagagcctagttgaaccttaaaaaaacaaagaagcctttttttcttttttaaaaaagaataattactaatttctctcttgaattttt

SEQ ID NO: 45376 - DNA, 1113 bp, Cannabis sativa
tttggaagctatttacaactttagtaacttgtatttgagcttctctttcatttttaggcctctgtttactggttggaagccatccttatccacctcttgttgttgtccattatcgcatttggattctttttcttcaccacccattgctacttcatcccctttttttttgacactataatcttatggcccaaacccttacaatgtttgcaagctattggcatccattcatagtttacactcattgtaattttttgaccatattcattaccaaagtcaataaggtatgaaaattcctgttcaaaatcaacttcgatcataacacaagaaaaatttagtttctctcaatttttagtaaccaggtctaccattaaaggtttccccaattgactaataaccttggaaagggatcgttcaccccaatattttatttctaaatcttagagctaggtccaaataggaactcgagaaacatcctctttcgcaaaattcgtgttagactctcatggcttcagtacgattggcttcctataaaaaaatgtatcctcccttcaaaacttcatctcgctcccttgttgttccaaatcttattataaagatccatggggctattaatccaactcgatcatatactttctcaccccacgtacgccgagcaaaaccttctaatatacataatggaggattggtcccaaaaacataactaacaattgatgaactccaaaattccacctcctccactatatcatccatttctatcttaattttcctcaacttaggctttccactatctccaattgtctcatcattcttatcgaatttagaagaaaatttttaaacaattgaagcagatcttaaaattggaatacagggattggtcattctatggccttttttggtggcaaagattgcacagaggtgatagtggtgctagtgccttcctgaagggatgcctaacaagcctgacatagccatggacaacctgctttcgagaactcctaaccttttggttctggatgaagatggtgttgggattttatgccctaaataaaaaccatttcaatctaatctgatttgttatcaatgaaagattacaagtcatttatgtttacatgt

SEQ ID NO: 45377 - DNA, 1068 bp, Cannabis sativa
gcagtgaaggaattggacaagtcgtccatgatcaaagcaaggcagaaattaaaaaggccaacaaaaggggaaaaaccagtatttagacagagatataaaaggaaaggttgctgaaagagacaggatgcagagtcaatcgagtaatgtcctgatatataaagccttgagcaaactgggagggactctggcaagagcatttcggcaaagagtaatatctccatgtcaggggaaaaaatgattattcctacaaagatgccagtggctcctagaaaaatggcaatgacctctacaacaatagatttaatgatcatccaggggggtgcgggaggttggggttcaattgataccatttcagcaaagggctttcctttgtaattaagcagagaaaaattgagaagtagaaatgggaaagaattaaactcagatgggacatctacataatagtaatggaggatgagaagtttacctgtaagggagaagacaaaagaatttaatgatggactctgtttgatggcagctaacggaagtgggaaggagaaggtggaaccgtcacttgggaagaggaggccaggacggactgctacgccgattaacggcgacgacgacgacaacagaaaccacatcggcggcgcaaggtttgagccctagatcgcactcaccttcagaggaactgtccagcaaataaaaaaaatgtattaatataacattaattttatcatgactatttataaaataaagaaaaaaacaaaaataaatctataaaatagaaaataaataaccttaattaaaaccatggaagcttatatctcccacggttatgtgaccacatattaagcgtaaatttgaataaaaacaaaaggagaaagtacatatagaagtatattcacacatcatcgtcaggttaaatacataataacataagctattacaaaatgaattctataaaatgctaaaaatttatatattacaaattcttcatagtgataaattcaatttgagatctaagttcctaagttagtaccaaaatggccttctacttcctaaggtgggtggcctaacttagattaa

SEQ ID NO: 45378 - DNA, 1170 bp, Cannabis sativa
ataaattatataaaaatataattctataattatacacagttaattagttagggtttgctaatccattctcttaatcttagggtattacatccattatcgattaagaccatggaaactcgcttgttggcaattttcgtgttaattaccaataggtcattgtgttcaaagtgcacattcttattgtcttcatccgtgaaggtaatcgagagattcatcatccttgggcgttgcgcaggagactgtaccagtgcacacatttctccttcctccacttcgtttagatatctattatgtacgttgcgtgtacttctcgcaaggtaaggtttgcccaaaattgttgcaacatgttcgtgtacgggtggcggagacaatctagggggatatgaagttattggtcctagagcaagtaaagccaccctaggcagagctggtggagcaggaagagcgggttgagattttccaggagcttcaggggggcgtaaccccttattagggatttacaacacctatctatccgagaataatcatgtgcccctagactaccccttgtccatgataaataatcgagatgcataccaactgtcccagatgccctgcccggaacaacatttcaatctcatctttcaaatactcacattaatttgtgttgtggcctttttctccgtgataatcacattgtttgctttaggcccgctggttcctcccaccatttgatttgcgcacgggcttccaataatggaccatgttacacgtcgctttataaagattatcctcacataaaacttgtgtattcagtgtactttggatcacactcctttctcggtttcttcactaaatcattacgactgttactcttaccttccctcttaccccgtgaatgccaaaactagagtctgagccttcaattttagattgtcttggagccacatggcacccattctgtgcctccccgttccttgagaaatgggtttgcgtagggatgagactagaggcaggaggtccgtaaactatcgaagaaaactacagtctgggaagggatagagatggggtagcattttgcaatgaaaatctaggagcacctattgtttgtgtcagaataggggggacgccgaaagctttgatagaagcatcatttgtcgggttttgtgccccaaataaaacacatttcaa

SEQ ID NO: 45379 - DNA, 2316 bp, Cannabis sativa
agagagagagagagagaatatgtgttgttatgtactactttttgtggccttcatttatacttggatttttgttggagacccaagaaagtgaacactgttacaattccgtattaattacttaataataatatgtggaagagatgtatcgtattaataattaatgtaacgtccacaggcattattaaatatgattgaataattcatgacaagggacacagggcactaataagccaattttcactttctgttctaaacaccatatcttatattttcaaaactatctatttttttttttctatagggatcaaaactatctaattaaataaatataatgtatatgtatatgtaaatttatatatatatgtgtgtgtgtttttatatggtgtggaccaccacagagaactataaataatagtgtttggacgactcattaattcattattatatttaaactctttttccaaaaaaaaaaatatatttaaactaatagggagctttactatgtggttcatacataagctgatgaggttgcacgtggagtagtgcaggaaggaaagaaatgtttcaatttatctatatatgataaagagatgaatgaagattgttgttgttgatgatgatgatggagtaatataagtggggtttattgggatttttggcatgtttaggaatggaggagacaaggaaccggcaaaggagggaggtcataagggtgtggtgggggcaatattgaaaatgcatagaatagcgtacccacaatgtatatacacaccaaaaactaattccttctctctctatctcgatcactgcatgcagtgttatttctctctttctttctttttaaataatttctcctctgccgttatttactactgagtcctctttctctctttttttctttctcttataatcagtccaaaaataatcaattccatcgagaccactgatacagagatgcatatatatgattatgtatatgtatgtacaaagatgacaattaacacacagtatatagacatggagaactgtagatcctgaattctcctctctctctatctctctcactcttttttttatatatataaatatatattgctctgtttttggccacctagctacttttgttatcaaaggatgagatgatactgatagtgatagtaatagtgccaaatttatgtacctagaaagggacatttccatgccaaatccaacaacaaataattatataatataaaaggatgtgggtcatataattgtatatattttgaacaaatacatatacatataaatagtatatctgcaaaagcttttggcaacctgtatgagaaacgtataagcgataataaaattagcaaaggtcattggtttttgtttataattaagcttgtgtacgtgtgtggttaattgggattgctacacacgattaattgcttaatgtgtaattgagcccaaaaaaaaaaaaaaatctcaccgtttggtggattggttaatgtgtttctaatcgatcgatgattgttaatgaacaacctgttgctaaaaaattaaaaaaaaaaaaaaaaaacagagagaaaaccaataagaccgttattttcatccgtcccgtcaaaataattgattaaaacgaaaaagactacgtgagaaagccgtatagatcgaaaaacaaaacaatacaaaataacatcaacgcgtcttcccaaagctttgtctcagaaaatcgcagcccaaaagagttactaggtatttgtctgcaacatctctctatgcctatatagctacctatagtgccacatatagtatcatatatacatatatatgagcattgctacattactatgacacgaggacactttgatgaattagctagcagttttttatactttttaataaagtaaaagaagtaggatttgatattgaaatacatgaataataatagtatacttcaaaagagtgctaggtggcactttgatctttctctctcaataaaaaataaggactttttttttttataataggcattttaggcctaaattttacatttttagcttgataagaaaaattaaacaaaaaagaaaatctaaaagtttttttttcaaaaatactgacttaaccttcttcctccttcttcatttcctgctgcttatctcctcaattttccttttcaactaaggcacgatttcagctaaaaaaaaaagtatccaagttgtataatactaagactgctcagctcgttcgatctcaagactctctgtaatacccatagattaagaatcagattagcaaaccccaactagttaaatgtatatttattatggaatt

SEQ ID NO: 45380 - DNA, 1475 bp, Cannabis sativa
tttttctaaaagttaggttataccacctttagcttttagctgtagtttttccataaattcttcaataagctattttttaactgcttaccaaatatctttttatcacggcatttttgaaaagcagcttttagtttttccaaaacttgtgccaaacgggcccttagttactagatacttataactaaatttaaaagtaagatttttgctaaaacacagctaataaatgagaatatttcaaaaaattattatatatatcatttacttaacataattttattttatttttataaggtactgtaaatagtgtttgggttttgtggtcttttttttcttgaaaaaaaaaagcaatcatatttgggtctctatttttacttctttatagttgttaatagagtgtaattagtatttggtttaaaaaattagagcatttaaatcaatagctgctgatatagtttgtatcgacaatttgcttttagacaaaggcatcataatctgccaagaaaaagtgagaatagaagatgttttgctgatgttgatgctcataagcagcaatgggcgcatttattctcacattaggtgcattccaataagaaacttacggtacctaggaatgcactctcgtttgccgatactgatggtgggcaacttacggaccagatgtacggtccgtttccagcggcttaggcaactgttccagtctcaaattattcacggccgctgacaatgacatcaatggatcaatccctgtagagttgggtcatctctagaatctccaaaacctcaacctcatcaacgacagcctctccgataagctaccaagtgaactggcagtcatctctctcagtatcgcaaactcagccgcacgacctcccttgtgaggaaatccctctgcttcatcagaatgaacgttacaactgcttacttgttggctgttttgggtggaaatggttctccccttgtggcgggttagaacccttagaaggaaaaggggaaatagaaaaatggggctcgtggggaaaggataaataagattaaaaattgagtttttaaaagaaaattaaataaaattaattttgattggttgttattttttttttaattgggtgtcagaatttttttttttttaaaaaaagaaattttaataacctacaaataaatacatcttacacaatctagacttttaaaaatcatataaattaatgattaaaaaagtgtatgtatagtataggaacaaaaacataatcacttaataaaattattctatatatttataaatatgtatatatttacagatgttatgtctgataagggttaggttagtggagacctatgtcttcaattatttgaaataaccgaagacatataagtacacgggttggcaggtttatcgggtttcgggttggcgggtttcgggttcacgggttttaggttcaaaaaattaaaaccgaacccggacccgaatagggcacgggttg

SEQ ID NO: 45381 - DNA, 1427 bp, Cannabis sativa
tctggatcttggaatccattttcaaactctctttcttcctcgctcacagtaaagcttgatcgattaaactttctttcgtggaaatcacaagttcttcccactgtcattgggcacgatcttgatgaggttcttctgtctggtgttcctcctccaacaactctcgttgatggtactacaaactctgcatatcttcaatggcgtcgcaaagatcagctgcttctttcatggttgcgatcctccatgtctgaaagcatactcgcgtctgtggcgaactacactacatctgcatctgtatggcgtgctctcgaacagaagtttgcctctcaaaccaaagcacgaagacttcaactcaaaggtcaattctcacatgttcataaaggcggattatccatctctgaatttcttgataaagttcaaaacatagctgactctctcgccattgcaggatctccagttgatgatcaagatttggttcttcagatcctcaatggtcttggccccgaattcgattctgttgtctcaggaatcacttcaagaagcgatgtgttgtccattgaagaagttcaggcacttctcctctcccatgaaagtcgtctcgaacaccatcatgccatgaatgatcttactgtcaaaatgcaagctaacatggctcttggaaacaacagatctacaggtgttcgacctttttccaacaacaactccagtaacataaacactgcttcccagggacgtaacagagttttttccagatcatctactcaaaaagtgatttgtcaagtttgcatgaggagtggacatactgcatctgtctgccattatcgctttgataaatcttggatcactcctaaactaggtaatcccatgaatcgtgcctatcttactgaattggactgtgattgtgatccacaggcatacaatacaactatggtgcaagattttggtgctgatgactcttggtatgtggattctggtgccaccactcatgttaccaacagcctcacaaatcttgatgagtccaaacctttctctggagttgaatctcttgccattggtgatggtaagaaattgttaatttcacatactggatctgtctctattccttcctactcaaattcttgtcccttacatatgcaatttgtcataaatgttccctctatgactaagaatttagttagtgtctctaaactaactcaagataatgacgtttttgttgaatttcataaaaactgttgctttgtcaaggacaagacaaccgggtctgtgctgctcaaagggaaaactagagatggactttaccttcttggtgactcgtccaatcgttcaagtcctactctgcaatgtcatcttgctacctcagcaaatgtttcttctgattccaattgttctatgcaatgtacttgtactacagattgtactcaagagtgtga

SEQ ID NO: 45382 - DNA, 2317 bp, Cannabis sativa
  modified_base (163)..(168): a, c, t, g, unknown or other
aaagtaatcaagattatgtgattaaataaattcctatgatttatcagtacacaggatttcactgatatgataatctgcaatgtagttcatttgcaccttgaataagtggtatgtcctttcaagtgttggggattatttcaccaggatctagatttactaccannnnnnttgtttaacatcctaaacatgaatttctaaaagcaatagaatttaaacacatataaagttctagaaaccttacattggtcgcagtggaattaaatgactcattccactcatatctctaaccctcgttcatttctgtcgcagcgtattctcaagatctgagcccgattctcctttaggtgttggagtcttcacagtcttacacacagtgattgagtacatacttgctatgtgtgggcatgtactctatcactataagggaaaaaactttaaagagaaagagagagagagagaaggattcgaaatagagagagaagagagaaggctcaaatttcactgaaggcttaagttgcatcaactgttagttttgagtctatcactatctatttataggaattgaggaaaatttctaagaaaatgaaggctttgcaaggcatgaagtcaccatcgaggagtaaacacatgcaaagtcttatgggacaaatcgctaccctaagcagatttgtctcaaaatccattaataactgtgtcccattttttaacttgctacatggaaccaataagggatttgaatggacttatgaatgcaaacaagctttccaagctcttaagcataacctggcaaaaccttcgattctctcaaagctaatagatgatgatgagttattcatctatttggccaccactgagcacacaactagcgttgttttggtgcatgaggaatattgtacacaacaaccagtgtactatgtcaataaatgtctcattagggctgagtccaagtatccccccattgagaaattggcacactacttagtactagcctctcagaaacttaggccatacttacaagcccgtctagttaatgtttcaagcaaccaacagcttaggaaaatcctacttaagctagaagcattaggatgattacctaagtgggcaataaaaccgagatagtttaaaatttcatatcatcctttaatagcaatcaaaggccaggcattggctaattacatagctgaatgcattggcattgacaaagacaatcccatggtctgtgaagaccagagtgcaacgcttgagactatagctcagatagactctggtacttcctagaagctttgtggggatggcttgtcgaatgaccattgtaacgccctaaactgtagggacaccacgtgtgcgtgtgcttttataaattaaactataattataaagtgcaatttatttaaaacttttggaattaaactaaaacttatcttattattcaaaatactactagttttggggatcccctgtttaaaagaatttacattacattacaaaattgcttttacaatagagggctatattttgaaaacacggtcaaaagggtggatcctatccactgcaagcgaagacaccgcagttgatatgtacatcactgggagacatctgactcatggttgatccactttccccttccctatacctgcaccacgaagcaccagtgagtcacaaagactcggtaagaaaagcaattaaaacacaaacaatgcataatataagaaatcacaacattacataattaacacacttatcatccaatattaacatttattcaatgcatattcaaacattacataaacaattttttgtcttataagacaaattgactttgatgcttcataaaacatccttaccactcgttgcccacaagctacatgtcactatttttgcctgataaagcattcgatcagtaagaaacctatttgtgctttcaagtgagtaattactcattcacaataacagtaatgaatgtatctttactcattctcaataacggtaatgaccgtatctttacctttatcataattgagccacacacaataataatcgtttctcacttaacatgcttagtagtgcaaataactctccttaccttaagtccaaagtcaggtgtgtggcctgacctgggtcgaacaatgcttgatgatctcgggtgctatgtcagacaacggtaaatcaataagggtctattccaaaacactgtctaaaacctgcataaaataacctagggttttctacaaaagcttatggtaaaaataccctaaaataaaatataatacatatcttggctttaatctatggttcatactatagagcccttcataag

SEQ ID NO: 45383 - DNA, 1131 bp, Cannabis sativa
taaaatagttacctcctgctctaacttgaataaatgacgattgaaatgttgctgcaatctctcattcgcataattaatgcagaactgttcaaaactattcctctgtagaacaaagtacagggcacaaaactttatgttacatttatatatatggagaaagcaagtttgatagtaagaggatagctgaaacatacatcgaatgattcaaaaccataaatatcaagaatgctgatggatctgccagtacgccgttttcctactgcaagtgatttgttaatttgttcaaccaaccattcaaaaagacatgcataaatggactttgccagagcatcccttgtgtcagttgcctgggtaaaaatcagaaatacaattgtaaggagacagataaagaaacagaaaatttagaaatatatcaaataatagtatggcatcatattaatgagggagggtggtggtctatgttagaacatgcccataagtgaaataaaagtatatataatcaaattgtgacctaatcacatgcatgaaattgagcagttaggaagagcctcaacatattttccaggaatctggtattgtggaattcaattccaaaacatctatgaggcattaagatcataaggacaatctgccttaaatacagtattcaaaactgtaaaaagggaaactaataacaaacaaatgatcttcaattgaaactcagcctgctcattatggaccaatttctagaacgatctttaaataataaattaataatgagatgcaatttccagaaataaatatgtaaaaggacagtaactcacttaactcccattttacatgactatctactaaatctgtattatatattatctgaaatacaaacacatcatgtcacatagacaaattcttacttgtgatatattcagcttttgaatgatattatcattccccactttcattttacgagttgacaaagctagcttaagctcctcaacatcacatccaatcaaatcagcaacagtaataagacctgaaaatgaaacttcctttagcaaagaacaaagatcaaccacaaaaacaaagtaattttgcagtagtttcttatgttttcttgctaatctctaacttaggagacaaggttttaaggtt

SEQ ID NO: 45384 - DNA, 1843 bp, Cannabis sativa
gatgatgatgtattctataagccagttaagatatatgcagttaggtacttagatgaaatactagtgataacatctggatcaaagatgctgactttagacttgaagaattgggtgttgaaatacttagaagggagattggaattgaaagttgatactgtaaagacagcaattcatagtgcagtgtctgagaagattgattttattggaatggaattacaggcagttcaaccttcagttttgcatcctccagtgtcggaaaaggcaatgagagctcgaaagaagtatcttagacagaaggaagttagagctttagagttgaagaatgccagagagaggaataggaagaaattggggatgaagatattgagtcatcttttcaaaaagtcaaagcaaagtgatggctttaaatttgaaaatcaacttgagaatgatgttagaaagatcgtcagctcttgggctgatgaagtcgtgcgagagttttttggatcactcgaagagcgttgggcttggcaccggaagctatcagcaggccattttctttctttgagacacattagagaccaactaccccaagagcttgttgattcttatgatatgttccaagagcaagtggacaaacatctgaatccaattaaagccaaaatggcattggaagaagaagaaaggagaaaagaagaggaagaggaaaggaaatatgctaagaacactgttgaggatttaacaaggttatgtatcaaagttgatgcacccgtagaacttgttaggaaggcagttaagctggttgggtttacaaatcatatgggtcgtccaaggccaatcagtttactcactgctcttgaagatgctgatattgtgaagtggtatgctggtgttggaagaaggtggctagatttcttctgctgctgtcacaatttcaagatggtcaaaactattgtaacttatcacttgaggttttcttgtattttaacattagcagaaaagcacgaatcgaccaaacgggaagccatgaagcattacactaaagatttgaaaattttcgatatgagtgggaatgatgaagtttatttccccacagaaagggaagtaaagatgatgggagatagaaacctttctgatccaaaacttgtggatggggctatatccttggctctgattagattagcttctgatgaacctccatattcatgcattgctcatttctgtgagagaacagatactattgtttacagggtaaggttactccaaaaacatttaaaggtaaacccaatggataatgataagtgggtgaaggggatgggtgctattcacggtagccttaatcggaagtgtcttcctctttgccccgatcacattcatgacttctatatgggacgaatcactttccaagatattgactgtgcttcgtttgtggatgtagactagattttaaaaatattaaggtcttatccacattgcgccgaaccttgtgggttttgctatgtttgttgtggctgcatagcgtgcattctaggactattgtggaatggatatttgagttttcagtgtcactgttacttcaaaacaaacaatggtgaaagctgtgaatttgaaaggcgtttaaggagttgaggatggtataattaggggaacaccagaattgtcaattcagatcacatttttatgagtgaaaaagtagatattttttatgagtgtcattttgacttctatgcgtttattaacacctgcaaagtaaacatatttagtttcttctaagaagatgttggagaaccagactaggagatactgcagttagtctcaatacagttgaagtggaataggtagctgtagtaggaagagctccaca

SEQ ID NO: 45385 - DNA, 3350 bp, Cannabis sativa
taattgcctttactaatcaaaaattactagagcggtcattacagttgtagctttctttttgggccttgatttgtgacaatgtttcttctattttgttttcatattgctatattactccaactctaaaattaataccgaattacattaagttaaatattttcaagtatagaaatttttgtatttgatttcatgaaaataaataattaaattctaattatttacccaaagatacacttaatgatgtattattttacacgataatcacttacattctgttttggaacctctatttgacgctttgactgtctaggaacgatactacatctattttgtgttgctccatacatagaaaatgggtttgtgtaggtgcttgcatggatgctgaaggtccgcagatagccagagtatactcagtcctgggaagaaggacttgaggaacaaaccctggaatagatgcagaaagggctagtgttggagggactccggaagcttactgataggcatattctaaattgatgaagccttgtgcccttgaaatgaactcagatagggtttcagctcttcttctttgcatctctccccaaaataaggagccagctgtaagtcaagattgtaaggcaacaagattcatgtcatcattcacctgtatcttagatgctgcctccatcattcgctgaatgaatgttttcaggatctctcccacctgttgcttgacatttgtgatggatcccacctccatgtcgttgtcctaggcagttatgaactgcctttggaagctagattgcagctctttccagctatggatcgatctaagagttaatcttttccaccaatcctcagcaaacttggtgaacattaaggagaacacacagacacttgtcatcatcactaaccctagctacttgcatcatcttgttgtatttggccaggtgagtccttggatctgtgcgcccattgtacaactcaatctgacacacagctttgggtcctcattcttagaatcggtgagggcccactttgcttccaaacaagctttgttaagtattttgtgacagtattctagagatcttgtccgcaaaatttcatttaaatgattcataagaccattccctcatggcctcgccttttctctttttgctattttgtacttggcgtcaagacgccttcaaagatctactgtggaccaactatcatcagaatattgtcctctggtcccaccatcatatttaatggaatgattggggtgatttttccttccttgggcttgggtgctttcacaccagtccctttttttcactatattaccttttagagcagaatggcgtccaagcccagaggcatcgatgaccttctgtgccagggtaggtctcctggctagatttacacttttttgaggaggtacaagagttgtagggttctgagggttacccacttttgcgtttcccttgtcctatacaggagcagaggttccaacatcagcaaggttttccttgttgtttccattgacacattccactaaagggtcttcgtcaaattcttctttgtctagatctccaaattgtcttagaggcaagccatcattctctccatcctcttagacaacttctcttgacgggctaacttctcatgggctttaagtcatttttggatactcaaactacttcaagatcttgctcataataatagccatccttgtagtacatgtctttgataaacctattgctgtcttgttcttcatttttagcatctcaatcttcatcgattcagttgggctgcttgtttaggttactctctaggttatcagcattgaatgcatctccacctctcacatcgctcgactgagcatgctctagagagagagggtttacatcctctatgacaacatcgaggctgccttgaggagtattcttagttactgtttttcgagtaaacaccatggttgcagtagcactgtggatttaggtctttcttcagctatcaatgaaagcaaaaaaaacatttgttgagattttcataaactaatataataagagcttaagaaaacaataacaaaagagatgtagatttttacgtagtttaggtgttaatgagcctttgtcacgagtcagtctaatagtcgttacatgcgtatttgatgttattacagtgtttatgcaagacattctaactctgcactcttggtttctcttgaaaaataggaaagcttagagtaattttaacagagcttcgactatcttgattttgatcccccttttgtatgaaaataaaatggtatttataggctaaagggtgggtatagacttgtccatgacccggctaggatttctacaaaaagcccactaatggggtaaaatacatgtaaagtgagctgactattgggccccttggaaagacttgtgctcgtgcattgaagcagctggacaataggggaccaccattcgtagaggatgcatgtcaccaaaaggtttaaccttgaaaagtaaataccttgaataactgtctcgcaaaaagatgtatgaggtccatgcactactatgttctggcactagggacaagatctgatcctgtgtcagagaaaaagcataaccgtcgttgggcgatcaaagtttatcctcaaggcagacgtctgcatcccttttgggcggtcaacgtctatgataggcccttcaagtacctgtctaggtatcacttgggcaagctttgagcttgggccattccgaatcctagagtggtggcaagccttccgtgtcccagggggcataaggaggctaagtaaatctctgtgtaccctttggcctagattatttttggattcgcagagcctctccatgacttagcttcacagaagatgctcatttaatgactgtctggatcagtacttctattcttatgccacatgtttcttcctcttggaacaagctaacaatgaccaaaaaaggagaacaaaaagaaaaaaaaaaaaagaatgaaatagagaaagagaatgaaaggtacaaaataaataattaaaaaaagcaattgcttagaagtgaaaatttcgtaaaaacattaactttcaaatgaaaaaaaaaatcataaaaatgtaaaaatcataaaaatgtaaaaaaaatcataaaaatgtaaaaaaataaaaaaaatgtaaaaaaataaataaataaataaataaataataattacttatatttttacaaactcttagtatataagccataaaaaaactcttataaaaagtgaaaattacacattttatgaatttttatataatttgtgcaaaaatatgattttttttccccaaaagaaaagtaacttcacgggaaaaatttgataaaaaaaaacagtacaaatcaatt

SEQ ID NO: 45386 - DNA, 1223 bp, Cannabis sativa
cagagtttacgacgtgaaacacatgattaggttctgtaatagtttgtacggaggattggatcgggttgccaaaaccctagaggtgaaaagggcggtcggaaaatgtcaccaggccggttcagatagtctgctgacgtggcacgctttccaaaagatgagagacgtgtattttgtgagtgctgcggctgcggagagccacgctggcgtgttgtttggattggaagtgtattgattttgtaattaatttaaaaattcaaattataatagaaattaattcattatttgatgattaaatattattttttatttttgtggtttgataattttttttaatataattaattaacttgaacataattaaccatttttgtgataattaacaaaaaattaattcaaaattttagttttattattttaaaaaatacaaaatttattttatgaagatgattctgtaatttttacaatagtatttttacttattttatttattggaatcaattattgagtatagattagattaaattggtaaagtaagagaattaaagtctggattcttttgttataattgggcaagccttcgttgaccgaaacatctataggaaaatgagtgtcacgtgaatgaacaagggaagttactcttttcccaaatgaaagtaggggatttttttttttttttatttttgcatatgaaaagaaaaaaacacttaaaaggtaactagtcatggtacggtaactataaagtgacatttagttggaagtaataaaatggaatgaaaatgatacaatttttattccatttatttgtttgttgtatttcatggcacgtttacgatacagtatttaaaatcgaaataaattaatagaaaaatataacggaaaaaatgaagaataattagaattaatatttgtaatatatttgtttactaaattttttaaaaatggaatattgacttttggctcttggatcagtttttttgaattttttgtaactcttttttttttttttttttgtaagatgaatgaggttctatctcaaaattaatgggagaagtagtcaattcctcttatatattctattatctttataaacattagcaatgtgagattctctaagtgttaaaacaaaaaccccacaattaaatcatttcaatttgtaccactaccactatcatgagaaaaaattgacaaagaaaaatatcataaatttttttattattattatt

SEQ ID NO: 45387 - DNA, 3669 bp, Cannabis sativa
agagtcaacaaaacgtttaacaccaaagtgtggattacgatgggagatgataaagttgattgtatgaaagtgatgaaactaattattgagaaggtcacttgtagaaaatgtgagattgaggagccatatgatcttcaagaagaagtaaagaaggctctgagagggaagaagtttctatttgttgttgacgatgtttgggatgaggatccttccaagtgggatgtcttaaataattgttttatatcagggttgcatggaagtaggatcattgtgacaactcggagtacagttgttgcatcgattatgaaaactgagtcaacttatcaactaggaagaataaatgaggttgctggctggaaattatttgcaaaacatgcttcacttgttgtggactcaaatgattacttggatctcaaacaaattggagaaaaaatagttgacaagtgtaagggtctccctttggcaatcaagtcaatgggtcttctcgtacgacggaagcagagaaaggaggaatgggaaaaaattctaaaaaatgatatatgggagttgtacgagagaaatgaagttaaaattcttccatctttgtggttgagttattttaatctacgcccagaattaaagcaatgtttcgcttactgctccctatttccaaaagactatcattttagaaaagaagtgatggtgttgttatggatggctgaaggtattttacagtcttcaaataaaaagagagtagaggaagttggagaagagtatttcgaagatctaatttctatgtcattttttcaaaccaatcaaataacaatttatgaggtggagccgaatttttctcatgcatgatcttatacatgatttggcaatatttgtttctggtgagttttgtttaatgatgaataatatcagtaaatgttctcacaaggttcgtcatttttcgtacatgcaacgatgtgcaaaagacattgaccctaaggaatttgaggagctatttaaagccaagtgcttgcggactatattgtggcacgaaggttcaaaatatgatggtctagagttgtttaagattaagaacttggacaaagcattcccacggttgagagtactatcaacaacggactgtgatatcaccaagcttcctaattcaataggcaatttgaagtatttaagatatttgaagttagattgtaaatatattaaagacatacctaatacaatatgtatgttgtataatttggagacactattgttggagagatgtagaaaagttactagactaccaactgatataggaaatttaatcaagttgcaacatcttagtgtttcttggaatttattagagatgccattgcaattggggaagctacaaaatctgcaaacacttaatagatttgttgtgggaagaagtagagattctggtggcattaagttgttgaatgagtttcaagatctacacggtagtcttctgatagagggactagaaaatgtgagtagccttgaggaagttacagatgcaacattgaagagtaagaagtttcttagccacctatgtttggcatggggtgattacttgcacaatgaaggagagctacttagtgccctccagcctcacccaaacctaaaagcacttgcaatttcgaactacaaaggcaacaatttcccaatttggatgggagatcatcgctgcttgtctaatttagtaagcctgaatatggtagattgttctaattgcagctttttgccgtcgttgggacaactgccttctctcaaagaccttgtcatcggacatttgaatagtgtggtgagaattggttcagagttttactattctgctagtgttgactcttcttctgttgcaatacaaacaaagccattctttacatctttggagagcatgagatttcagaatttgtctaatctcgaagagtggtcatttattgaaggtggagatttacctcgtcttaagaatcttcatcttcataattgtaataaactcaaagtgacattgttaggagattattttccatcattgacagtgcttgaactaagtgtcagtgaggaactaataccaccattattactcccaagacctcaactgatggatcaggcacctttgatcagtttaaggaagcttagaattatgagatgtttaaacttgaggcagttagacgaggcggccttacaacagctcacctccattgaggagttgaggattgaagagtgtcctaagctgcaatgcttgccaaaagaactacccatttctctttctgatcttcatatcactttgtgtgaattgctaagaccacgagtggagagggagacaggggaggactggccaataattgctcacatcccaaatataactgttaattgcaagaaaatataggtatgttactcttttctcttctgttctctcccaaattttacattttgtctttgaaaacaaataatatattatgtatcatactgatgacccatcttggggttgaaaatattcagtgtctcattttcaacagctatctgatgaaggccatttcttgtgtttgattttctgattttaggatgcctatgtatcagcggttcttctctaggcagtgtcagcatcttaagtcttttatccgatcaacaggtttcaaagctaagaacaagagatagtccactcactcgcctcgttagaaaaataattaggaatgcttttctgtgatactcaaactttttacaggttagaaaacttatcaaactttccaaatcagacttgaggcctttgtgtttcaaaccaacgatgtcacttagtatttgcgggagcaacttctggaaatgtttcatgttgggaaatctatgaaccaatttttcattctctgttacattgtgcaggacagtgagaatttcatgggaaaatcaagttagccccaacattttgtagtccttgcaacaccttgtgagacatgtaaacacaagctattaccataattgagtagctgtttgcatttcaaatctatcggattctgtcttaagcttggaagtgttctcagattggactacatacaaacttggatgatacagaatcaatcagctagagttggtatttctatgtttccttgtggaaataattggagttgaagaatgcaacaagtcagttaccaaaaaaacacttaaaattaattctgttatttctgtaatttgatttgcttacttttaatttgattgttcagaatagaattaagcctttgtgtgtgtaaaatggtgtcacctctctttatatatggattatctcttatagatatgatgatcataatcaaatgtgtaattccaacctcacattttcttacgattgaaatttcttctgtgctactttgtaactaaaacaataattgcttggaaaagaaactatttttgactgagtcaaattgtaattttagaaaaagactactcatcagtcagttatggcagctgaatgaatagtcaaactcataaacaatatgcagcaaagttcaagagaagccacctatacaccaaaaaagagaatgaaatgtcagtttctgtagcagagcatcaccaagatttgaacttggatctctttctctccctttaatgctgattctccttctagttagttgattttccacaatcttacacactatgattgagataccacttgatgtctgtgggcactcactc

SEQ ID NO: 45388 - DNA, 844 bp, Cannabis sativa
  modified_base (26)..(43): a, c, t, g, unknown or other
ctctttctctcttcatcttcttcttnnnnnnnnnnnnnnnnnntatattattttatattatttcataacatatataacaatattatagacgccgtggctgactttctctcgttttcgttttcaaagtatattacgtatctttcatgtatgcatgtcattatataaacatatatatatatatatatatattcatataataattattatgattaactcaattcacaatttatatatcatctcaggttattatttatgctttagccccattttgttactgttttcctataagtatatacactatgcagattatgtgcaaagtcatagtcaaaatcaaaagtcaaaaagcaataaattttcaaaccaaacaaaagaaaaatatgatcgcctaaagaaaaagatgggaacaaaccgattcttccttttattattttatgactttttctccataggaaattaatatcagtcaattgaatttattatgttatttaagagggttggttcaaatccgacctataaagatagatgatccaataccatgtaataaacatccaatacttattaggtgaaactaataatgatgggtttgtttccatggctccattctctcaccattcttcttctctttgttattacttcttcttcttctttgtgtcatcccaatgaaagctctgctttgctccacttcaaaaactctttcaccatcttcaactattgcacctctcattataaacttaaaacatatgtgaatccaaatgaaacaatttcatgggacataacaaccaatgattgttgcacatggagtggagtcacgtgtgatgatatcacaggtcacgtgatacgtctt

SEQ ID NO: 45389 - DNA, 2432 bp, Cannabis sativa
aaatttaattaattaattaataaaagtggtatttttcaacttacccctaaagcccagctcatgcttcacctcgaccgaaacccagtttgaaatacggcccattaatggatggttacaaatacttggcccacaatactagagacttgggcctcattttatgaagcccgtgtatgattgattcatttaagagaaaactaagaaataagaaaagagaagaaaccctagttcactcgcgtaccacacagcaacacggtttgaaacgacagcgtttaagtgaaaaacgcatgtttataaaagccctagaaacccttaaccatcagcttcctctgtcatttgccgtcacccgaaccccagagagagaaaaaccctaggagcaaagatgaagtacaacccgagggtcaccagctcccgccgcaagaacaggaaggctcatttcacagcaccctccagcgtgaggcgtgtgcttatgagcgcaccgctctcatccgatctccgttccaagtacaatgttaggtctatgcccgtccgcaaagacgacgaggttcaggtcgtccgtggtacctacaagggtcgcgagggaaaggtcgttcaggtgtatcgccggaaatgggtcatccacatcgagcgcatcacaagggagaaggtcaatggctccaccgtgaacgttggtatcaacccatctaaggttgttatcaccaagcttagacttgataaggacaggaagtcacttctcgatcgcaaggctaagggtcgtgccgccgcggacaaggacaagggtaccaagttcaccgccgaggatatcatgcagaacgtcgattaaatggggagtaatagcttttttttgttatccgtttttggtttaagaatcttataatttttagatctatcttctctgttttgggttactgttgttttaaattattattaggtttcgacgttttgtttgagatactattgagacaaatggaaagattttatttcaattttaaatcatggtttcttatgctcttgagggttcaaagaatttgctctcaattttgtgctgcctgaatgaaatatatctatattattgtgtatttaattgtctgtgtgccgattaccaactgatacctagttgaaattgttaacactttgttccctattgcctttttgttttgcttgattctgtgcttgagctttgtgttacttaattagtgtggattgtttatgaacgagtagtttgcttttcattactcaatgggcaatggttcgaagtttaccatttaaatattttcatttccatgtatttcatgtgattattctttttaagttcttataagtggtattttgccttctcattgttatgtagtcgtttttcttttgtctaacaggaattgacagattatattgcatcatttaatgattcttgttaggtaattgcctttcttggatcatattttaattttccactatttctcatagatgaatgaatccttgatatattatctttccattgcttcatgggtttcttttctactattctaattaagatataacttaatttttgttagctttataaatattttggtattctaattccaattaagctgatgctaggtgtattgtttccaaaatctgtctaacttgagttatcgtacttgataatgtgctaaatctactaagaataatgtggtaatttctcaatggagtctccaatatgcattggttttgcttctcaatctattcatagaagttgttgcgttttgtgtgtttaaattgtttgtaaaccactgagttttgaattgtgttagacgattattgctgaaattacgagtgtttactcttcaatgacttagttatgttacgatttagtgttatgtttttaaattgggtaaagaaattctttcaaataaataaggactaagaaatcgtatttgattaatggtgatgttttgaaattggattgaagataagtgttggattaataattgatgacctttagttattatatattttattttaattattggtgttcttttatgacattactaatgtaaccgaatagtttcattcattttggacagcttttagaaagatcatcgatagatataaaatcaaatataacatacaagtaatgaacattatatttgagattaataatatgtgaacataaattcaacaattatttaagataacactaagcaaagttgaccaagtaaaatcaaaacaaagtagttcatgcaatggtgaatgagacacccaacaaatcagagggtaccttattcgggcaccattgaaaggtaactcctggcattgccaaataagcaacctgctggaaaagctaatgtctaagtcccaaggttaactggaaaatcaaatcccacctgtccgcaaacctggtgaagggacttgataaattctagaagagcgtggttcaatctttaccatcatac

SEQ ID NO: 45390 - DNA, 2644 bp, Cannabis sativa
gatttagaaacgagaaaccctaatgttcgcctactatttttagatctctaatactatttaatacgtcattcttcaaaaaacatatatttagagtgcgcttggtaacatttttttcatcaaatttttatttttttaattaaaaaagtgaaaatatttttgaaaattatgttccataaaattgtttacacttttttaattttttaattgagaataaaaaaaaagtcactttcaaaatattttaaataatttttttcttgattaatattttggactccgactccaacctagaccttgggacctggactcggacctagaccctgactctgacccaaacccgaactcgaaccctcaattcggacaccagacccacctgacccagccccggctccagaccccacacctagactcggaccccagctccggacccaacttaaataaaatcaacaaataaaaataaaaatagaacttacagaacacagttttgttttttgtttttaaataagaaaacaaaagtggttataaaacacatttttatttttcgaaaacaaaaattttacttttatttttgtgttaaaaaattaaaagtaaaaatgttaccaaatgccaccttagtaaaatagtttctattttctaatttttaagataagaattaaggtagaaaatgctctccgtactaaaatcgtgaaatgctctccgtactataattgtggttcgcctctgtcatactgtggttggtatagtgatgagtggggaggtgcaggatgatgcagacccttttgggtgtcctagaacatttgtccttgcctcctttagtgaggattcaaaaaatttaggttttccctctttgggtaaaaggaagctgagtattgtttgttgagcatcatctcattcaaacctaaatttctattcgtggagggtttatgtaagtgccattaacggtatacagagtattttttagggcggcctattttcgtttagaagtatggcgtttgtggttaaagagactattaaggaagtagaaaacgttactctgaaggatttttctatacaaattctagttcatcataatgtaactaaagataccattactcgctcgtttgtgagtcatttctttgctaaaagagcagtccctaaaggtcagatgagagatgccattaaggggatgtggaagctttcatatggttagaaaatgcaggaggttgctcatgatacctttgtatttcgtctaaacaaagcctttgaggctcaagcaatcttagctcacgccccttggtctccttgtgatgggtttatgatggttacttaaatgtcaaaggatggaagatggcaatcggctgatttaaagaccttggccatctgggtttgcgctttaggcatccctaccagtttgatgattgatgaaggagtggtcctcttggtaaactgtataggcacttgtttacatgcttgtaaagtcaagaaggatggaattttgatacatgaattgcgattcaggttcatattagacttggtgttcctattatggtaggggcctctctccttgatgaaggcagtaaaaaggtctggtgctatttcaagtttgaacgtcttcctcttgtttgtttcaaatgtgattgtttaggacatgaggaaaaatcttgtacaggtcagaagagaatgattagtcttgatgatgggcgcccaattccgttgtatgggccttggctttgctgggggtctcggattaaattatttttcgattcttgaagcaaaagatattgaagctcaacgtcgtatagagcaagagaattgacctgggatggtttctaatgttcctttgatgatggaacctgctcttttaggtacccccattatgaatgaagccattgtagaagaggttaagcgtcgtcgactcgggttattagcgaagggaacagaaaaggagtggagttaatggaacatcaagatattgtccctcggacgggggtggtgagcttagttgtcttggtgggggaccacactttttctctggggcccaatactaagacttgtgttgggtcgattccctactcttggacctgaccagttttttaatgtggatggctttaatgggtttggttctaaacctccttctagtgggcctaagaagagaggaaggcccaagagtaaatcccaaaaagaagttaggccgaagggggtctctactattcctatttttgggcattagaagtctggcccttctccgttggtgggtaataaacgaaaaatgtatactacccaaaaggaaacatgacaactatattacatgtagttattgttctcattatactatccagaaaatttaatctactgattttcattcgaggttttctaaaaattccataacacactaaaaatatatgaacaaaaaccagcagtatatgtgaagcaatcaaataacaacaactcttaagaacataattaaatcgaacacactaaacaacatcacattttatacatataccaaattttttaggcaagtaagagttgaaggtcagatctctccttaatagttaatcttcttttgtcggctttcatggagatttatcatcgtgggtcgttgttgccacggcagaatattaaagtaaagcttctcactgaagttcatggagattgaaaaagattc

SEQ ID NO: 45391 - DNA, 2072 bp, Cannabis sativa
  modified_base (1968)..(1969): a, c, t, g, unknown or other
tttattttaattttttgattcaagtttgtcaatttatgaatattgatggggatttttgctggtgtccccattatctatcaactgttcactgaatttgaattcacactatattctatgtaatccgggcaagttaaaaaataggaggatttttgtgtatcgtttttatgtgcattcttatgtagtcgtgaaaagttataaagcagaagcattttcgtgttttatgttttatgtgcgttctcttagtttcaatatgattttggcctttcgtacatagatttctaatttatacagattaggggacttcatcaacttctctatttatttattttaaactaatatataaacacgtatacaaatttgtttaaattttagagaaactataatataaatttctgtaaaacagactgatttatttagtgataataattaagtcatatatatgttttaaataaattaaattgaaattaaatatatatatatgacaattaataaatctataaaaaattaattatatgattttaagactgttgttatcatcgtttttttttacacgttattattttcaaatttgatatcgccatcttacgtgtaattgttaatatcttacttgtaattgttaaataattctcaataaatttatttagtacataaaataaattaaataatgagttaaactattcacttttatacatgagtttcaatttttttttttagaatttatctaattaactttttaatttttataattatttaactaaagagacaatttttacttcaagaatttagaagtccaatcttttcaaactgatttatcaatttttatagagaatatacttatttagtactctgttatttctcaaaaaacatatctggtaccatgtgttttcaataatacttatttgatactttgtattttgaaattgtacatatttagtactctaaaataaaatttaatcaatttgaccaaacggttcttaattacatgtaatcatataattaaatttgaattcaaaatttataaaactgaagacaatttgaatgcattgataaaattttatcataattttaagtttagaatactaaatatgtatgattttaaaatacaaaataccaaataagtattattgaaaacatagaataccaaatttatatttaaataaaacaaccatatataataaattgtcaattaaacaaaaattccttgagatattatatctctgattataaaagaattaaaaacatatgtttttaatttattttttattttatttttcaattgatgtcttactatttggttgtaccatgatatttttttatttattattattatttttattattattatagttaaggttgataatgatattttttttatatttattattattattattgaattgtatatatattgattaaaaagatagaaatgattaatatcggtgaaaaatgctttcttattatacgtataataatttaggatatttagatttggtaaataataattagaaaaaaagagtaaaaattggagaaaattaaaattaatatttataagcctaataaaaaattaaaaaaaaaaagagaattagttggagtgatttacaaatagtctttttttttttttttttgtttggtagagataaattcatatcttatgtaattttcatgatttaaaattatgttgtagtagtttaaaaaaaaatcagcgtatttatttaataaaaaaataaaatataataataatttttaaatttaagatttgaatttaaaatagttgtagatcttttaaaatttaatatcttactaaacattttttttgagataaaaattgttgtattgatataaaatcattatacataacagaattgaggaagaaaatatacttcaaccaaattcaatcaacatccactaaaaagtattaacaaattaaagaacatggatgattgtgccttaaggaaattggatacaagnntgtaaaataaaagaaactcaaacaactaatttaagaaattttatatgaatgaaatcaaaagaaactgcatatccagccactttagaaataaaagaatgtgaga

SEQ ID NO: 45392 - DNA, 3795 bp, Cannabis sativa
taaatgtagtgcactaattattattgatataatattaattttttaaatttaattaaaaaattaatataataataaaaaaatatttttttagtgtaatgtttagtgttttggttagagtgaaaataatttttaatattaaatttggtactagtatgatactaaatttagtgtgctctttataaattctctagtagttctagtgtggctaggaacattttggaatcccttgcttttgacaagtagcactaaaagcttaaggatccgaaactaaaaaattggttaacagttcattaaaacaaaatatgattaaaagttgattagactaatttatgagagtcgtggtggaaggatttagttaattgaggtttgactaatcaatgtaaataagtcaagttgttgttgttaattgaggtgtcctaaataatatttatgttccttgtttattctggataattaatgatacatggtgtgttggaatgaaaacaaaaaaattaaatgtatattatttacattattttattatattttttaaaatattaggataattacataagatatataattacataagatattattattattatttttttttttttgtaaaaaagttatatttttacgtttaaagatttatttatttatatagatatttttacagaaaataaaactacataaaagtaacataaaaataacatctaaataatattaaaacaacaaaaaataacatacagataacaaaaaatcaacaacatattaacaagggtacaatacaaaaagaccgtattttttgtaaataaaataaaaaatattgtaaaaatatttaaaattttgtaaaaccatattttttttttaaaaaaattttgttattttttgtatttgtgaaataatccctaaaatatttcactaaaattttactttttatgttttaccctaaaccctacacatttatattatatcatatttaagttttaaaaattatttattataatataatttattcaataaataaataaaataatactaatattgcacaaatattacaaaaaaaaaaattaaaaaataatataatatttatagttcaatgaattaaatttcttagttataataactcatttagcagatcagcattgttcataatttttttacctcttaattaaataatttatcttgtcattattttaactgttctattgtgagtgatctaactaattttattgtagctcaataaatattaattagttataggattcaaaattaatggctgaaaaaaaatattattatttgtatgaatgaaaattgtaatcttaccaagagactaacatatattaatataaatcaatataaaaatattatattataaaattaatataatattatttattatgatagttttaaggctatttaggatttttatctctcaaactaaacatatatattattgtacattgaacttttcagcctattacaaatggtctctaaattatatacagtattgtaaattagtcattgtgtcaagttttgtcacacgtgacaaattaaatgatgtcatagctacttagctaattaccacatcaacgtcacatgtatatttttacattaaaaaattagaaattattaacctaaaaatcaattaatgattaagaaaatcacgtaagactacgtaagactaaatttaaaaaaaaattaaattattttttttcatattaattacacacgtggcgttgacataatacggacatgacaattggtaagtagccatgttattattttgtttgccacatgtggcaaaagttgacaaaaataaccaatttacaagactgtgaatagttcaagaagtatttttaacgagctgatgataactctataaaatagagttatttttcatcaatttgtgctatagagtcctttaggtttattttcttatgttttgtttgttttaatcattttgtttagttttagtgttaatttgttatttttgtgtttttggtaggaaatcattgcaaagaaaaataaaactgcaattcaagcctaaatttaatcatgttctggtcacattttagaaaaaataaaagcataaaagttttagatctctttcttaacatttcattgcatttgaatcaactcatttggaatttatatgtaaaaattatgtgcgtttgaatgagagagatcgaagcagaaaatacatggacaacaaccgatctgcgagcgcgggccttttccacgcaagtacgagtctgtacgtgctgggccttgtaattgcaaatttaaagttaattatggtttttagactgaggttttcagccaagtaattacatggaaggagggcaattaacattacaatatagaaaataccacgagaggatgtagatgaaggattgatcaagattgaagacctaaaactagttctttttcttctcttctctatcttttgtgtttaatgtctacttcttattattcaatgggtgtttctaccatgattatgaattaaatactttttctagggttttaatagagtctcttgaaactctaattatggattaatgtaatttctttgattttcttcttcattattatgatctatgcaatttatgtttaatgcttacatttaagtttttgattcaagatttaaaatgtgagaattaaatatgctataattatttaggcacaggtttcgatataagacgacagtacttatatggtttgtgtagcatttaggattttcatgcttaatacccctatttgtttaattttattacgagaacccgaatatagatttctttagtaaattcgctagtatagtaggaagaagaaatgttgaaattgtgttatgaaatgttagagtggatagatgatgaaattaaaagtcctagtttgcatccattaaattatttgtcaattttgttatctctttagattgcgaatttttattatttagcttcttaaaatcaattgattattaaccaaatataattctgaaattaattgttggtaattagtaatcaatctccgtaggaacgatttttatttattattgtattacttgattcaatcacttgcgtattaaatttaccaaacaactgaaaagttcagaggcacaataatacatatgtcataaatcaggaacaaaaattctaaatagcctaatattaaacataggatgatttcaaaaattatctcaatcacgagtataatctactattttgacgtgacatagatggtcgttcaaatattttatactttaatgttgatatttattatgacttttgggtcctttttgcgtcttcctctttggtgatgactcctcatttttttagtgaggtagcaagggttctctgtaacatgatgcttcagggggttggaatttgggtttggtttgtggtctctttcttcctaataatcaaaagctatcttatctattccttagctccctaagatgcggatgataaacttatatggaattttgaaaagtttggatggtattctatcaagagcggttactggttaacttttgttataataagggcttgggtcgtgcttctccatttaggagattctcgggttggtggaaaaaagtttggaccttgaatatctctccaaaagttagattgtttgcttggcaagtatcctctaattggattcctactaaaattaatttggctgctcatagtttcttaattgatgatttttgtcctctttgctagttccataaagagactactcatcatgctttgtgaaggtatccatctttagtagcttgcaggaagcttcatagttttaatcttggtaaccctc

SEQ ID NO: 45393 - DNA, 2641 bp, Cannabis sativa
ctaaatctacttattttagctttcataatccacctcagtatctggtatagatcagtaacagaagaaccccaaaccagccagcatttgactgcttataaacattgtccagcaaacgagcacttgaaaaataagtgttgtgtgttctccgattgagtgttgcataacctgcagcaattctcaatttgcattccaaatttaacaagtcctttgtctttaatctattcaacaaagccaaccatagtatcacactatgcttagaaatgttcaatcttgcccatacttctaggctccaagagacatgattttgatttggtttgagaaggacataacctgcagcaatctcgtatttcctctcttggaaagcaactgggtcctggatggtttttagatgatccttaagagttaccaacttcttccaatacaaactcgagtggatagaagctatgtaactccaccaagaatctctctagatgtacacactatgcacccatctcaaccataaacttacctattgatttgcaatggcccatatgtatttacacatagcagccctattccactcttcaagtcttttgatacccagacctccctctttttttgattgacaaacatcttcccaagccactgcaccacccccttgaaaggcagtttgccctttccaaagaaatgctctacagatagcctcaatgttctttagaatcttcttaggcaaaatcatcatttgactccagtaagcttgaatagctatgagcagctagtttattagagttattctccctacaaatgacaactttctcgagctcgagctcttaattctagcagtcatctttttagcaagcaattcacagtccttccctgatattttttttggatgaaattggaattcccaaataagtgaaaggcaatacctgttgttggaaaccagataaaaccaccagttgatggacctctctttgagccatattgctacaatagcaagcagttttagaagcattcagacataaaccagaagtacctgaaaagcttcaaatcttgtagcatatattttatactcctcatgtctccactgtaaaataagagcacatcatccgcaaaagctaggtgattaagcttaatatttgagcagccactattgaatttaaaatcatccttctcacaaattttcttcatcaatctagaaaaatattccatgcctaggacaaacaaaagaggagacatagggtccccttgcctaagtcctctcttagactaaacgaatccatgtaaagatccattgaacataacagagaatttaggagttctaacacaattcataatgagctgaataaatgtcttgggaaattcaagtcctactagaatctcttcaataaaatcccattcaacagtgtcatattccttttgaaggtctagctttatcatacaacttggtttatttgctttccttccatagtgtctaaccaagtcttgacaaattatgatattatgcccaatatatctacctttaataaatcccccttgagaaggagaaattatttcaggtaatgtattctgaattctagagctcaaaagctttgttgcaattttataaataacattgcaacaagaaattggcctaaaatccttaactgtatttgggcattttatcttgggaatcaaggtaattattgtagaattaatctcttttagaatgttacctgactgcaggaatgacaatacagcattagaaacatcttctcctatgtaatcccagttatcttgatagaaatagctcgagaatccatccggtcaaggaaatttatttccaggaatactaaagacaacaaccttcacttcctctttagtaaaatcctgaagtagaatgttcctctgctcaagagataaactaggacctttagcaagcaccccagattgaaccttccttttgttctccattttggaacctagcagctccttgtaaaattcaaggaaagctacagcaatttgatttgggtcatgagttctactcccatccttctgttctatagaaatgatcttgttttgccttaatctctgctcaatgctagaatggaagaatgcagtattacaatctccatcttgaatccaagcagatttggctttttgctgaagcaaggaggcataatttttctatgcagaaataagttgatcccgagcctctctctcctgggctaacagtgactcatttaaaggctgctagtgcactctggtttgcaaatcatcaagcttctgttggttttttcaaccattgattgcaagttattaaaaccctccttatttaattctctcgctgaatcttgaactgtttcaacctagtgacaagttgaaacatgggagaaccggttatcttttttccccaggaatcaattagatagcctttatattttgaatgtgatctctattttctgctttgatgctttaaaactttacaattggttgtaatgttaattttttacagccatcgaataggggtttatctacatcacttataaattattaaatttttcaggatcattatgaaatttctctcgtgcattgtcaagccagtccaatgaatgattatcaaaatccttacccttaatatcaactacccccgcttcgataatggatatggatcatcaattaa

SEQ ID NO: 45394 - DNA, 1056 bp, Cannabis sativa
aaactcttatagtaactaacggagcaacctaaattacaatcaaaatttgtataacaatcaacagagcaacttaaatcgtaattttttttaaaaataaattaaaaaaataatatataaagtaattctcttaaagataaattttatataaaataaaatttattgaaattcaacataaatttttggaaatagaatcattttaatttaatatgactaaaatatcggcgcagccataatttagatattaaagtgagagaacaaaagatttgttgacttagaaagacagcaagataactaaattatttgttagtgtataggatccacagaaactaatatatataattttaattatatatgattaaacaaaataataatatatttggtcattcgtgtggtgggatatataattaattgttacttaaagcttaattagttaatttagtggttgcatgctgacgtagcaattgcatgcccgtcacgattgataattattattttatattctttacgatgacattaatttcccaattatatttctttgctttttattttaataattaataccttgttttatttttcctttcgaaactttttatacgcggaatatcggaagagaacagagttattggtaattaattatggttcgccctttaaattatatatatatttaaaattttaattaattaaattttttaatcctattaggtcattttgtaggttttttttgggaaatttttaaatctttgagctcatgtcattctttgttaattttagatttaccatcttgatcgctcgtatattcttaagcgatttaatatatataatgtttttgggtagaatatgaaaaaaaaatttatctaagggagcataaatgtaaaaaaaaataataataagagatcgaaattattaatacatattttcgttaactaattgttaaatttttttgtaattaatatattcaaaagataaataaataacattaattataataatagtaataaatgacaagagaatttttaaggtgattttaaaattaatgataggtataattctctctct

SEQ ID NO: 45395 - DNA, 1902 bp, Cannabis sativa
actgaaacccgacaatcaaccacctcattgagacaaactgtagctatcctaactcttttaacttcttctaaaatacctttgttcaattccggattactatctatttttacaaccttttctcatctcgcatttattgtttttctttttctgtttacctttatctcattccatttttggtcttccatttaaaatggaaggagaaatcctggaacatgctgacaaaataattcactgattctaagttctaactaattagattgagacttcatataaagaggggggacctcaattacgtgattggaatcacttgcgaaattccagactcctcccaatgcaagaaagctagtaaatgtcttcacttaacttgttggagctgaccatgaaaagcaataaactcattaaataatttgtgaaaaagaaaaagtaccttccattagatcaagaataggagaagaaacttcacttcatctttgtgttggaagaaaatctctatgtatgatcagagaaattgctctagtacttgagcaaaatacatgagaaactaagtagccattcaaggccatctgcacatgattagaatccgaaattgaaacagaagctagaaagaataatggaaaaaagaaaatcaaagttatttagagaggaactcattaactaatgatgagagacatagacaccaaatggaataagatatggaatatccattaaaataaggaaagtcttaaacatggtatgaggttctgcaaatccattgaattgatataggtccttgaaagcataatttcatcagcttagctacaaaactccaagtaggagaccaaatgcagcagagaaaaaactggcaattggcacccaattttttttacttcctacagctacaaaaaaaaaaaaaaaaaactagctttgtaatttctataagacatgataaagtttaaatttcagtactcaatgtacaaagatatgcttttatgcatcccaaatggcaacttcaatctccaatccttctgtttacgacttaaaggtcgacctttgctaagagggtctctattttccttgacatcagccaacttccatatgcaagtctccatgtcaagggactccagcaaaaatgtaccatttttttctgagcaattagactcttcaccccctacgtagcagactcgcatcggcatatccttgaaccgatcaagatcatccggcacctttaataatctctctgcaccaggagatgataccttcaaaagataacttgtcctataatttgtgattcaatatatttttaaccagtaatactaaaagaaactaccacgccacacaacactatgaaaaagctatttgtcatttaattacctctaaagctaagtcattaggtatttgtccactttctccaacttcgtctagtctcttcttatattcctgactgtagccttcaagctcctccatgctgggacatccatatcttatgaagcacaaaataatatattaccacacatgaacccaagtcaataatatacgtaatttaaaagtttgtatccttttccatggttttaaaattggtcaaagcgtgccaagacagttcaaaacaaaatctgaggctacacctctgctgttacaattaaggcatacgcctcacgttgatgtggtgcccttgaggcgcttacctctgaggtgcaagcctcagcttaactgtgttaggactgttctattgtgggttcatttaggcttttaatgacttaaatgggcttatgataagcctaaggggttcctcgtgtatcagagaagaattaaaggaaataattaattcttctctattttgttattgggcttttaattagttcttttatttgttttattttttgagtccaattgtaatcctaagtggctaatgtctaaaaagaccaa

SEQ ID NO: 45396 - DNA, 2001 bp, Cannabis sativa
  modified_base (29)..(29): a, c, t, g, unknown or other
  modified_base (179)..(183): a, c, t, g, unknown or other
aacaaaatcactgaaatgagtactcaacnatttatctctgtttagccaagctagaaggaaatcatcatttcacttctatgtcctggtaaaagctatagattccatatctatgactatttgttactgttatacaagacttcttagttgttgacctgccctcggcttacaacatattgttnnnnngtccagcacttatcggactaggggtagtcaacatattgttgggtcgtccaacactgatcggactaggggcagtcaatgtaaagcttcaagaggtatgatctttcttttagtagtttagatataatttatatatattatgatgagtaccttgagcttatggttcatattagataaaaactatttttatcaaaatttgctcccgctattataactctaatatggaccataaaaactaacatataattgcttatttgattggagaatgtaggacaaagtgacttttaaagtgactaagatatttggaacttaagaatcaatcaaggcttaggagcgtctcttttgtagaaagtttcacgatcctaagaaaatagggactcaacttgattattagatttaattttatttatgttggataacattagacatattctattttttatgatttataaaaatgcttcaaaaattaaaaacttaatctacatatttttctgaactgttttggggcactgagtgccaaatatattttttttacaattatttatgcagattatgatttttaagtttattcaaattataaccattatgttgtcggattcactaaaataaaagagaatatattcttttgttattcatatttgtttgcttttgtttatattaatgagagtcatgctgatcataatttgtgcatattgctatttcacaacctagtttctgtatcatcataagtaaatcatgtgtgcactcacctctaggtgaaaagacctagaatctatacaggaatgaattaaatttaagtcctagtaatatggtggttatcaggtgcgactattcaatttaggatgatattttctatgattggtattgagagctaaatgtctagtggacggtgtgatatgcacgagaagcttgtatcttgtgattatttgtggtctctctattttgttaataaatgacgacgacgacgacgatgacgatgctgatgagatgtttcgtaagagccaaaccatgcaagagtttttattaaactactggtcctttaatattagttattttcttattgagctttataagctcaccccctatactttcccttctaggaactcaatttagtacttgtggatgggagagaatcgttggtggagaacaatgtagttggcttagtcctatcttaattattaataaattattcttttaaagaccaaatatgtatcagattattagtggatggtctgtatcatttaaatagctatgaacagttagagatgaagaaaatagtagatgttgtaagtattattttgatatttttcaatttattaatctaattatttggtatacataattgtaaaaatattattgttctatatatattaagatattattgttatatatactgatagataattctattttattacacttattttttatttattataagatttctttcattgtttcaaatatatattttatataattttgaaagataatttaaggattatctaagtattaggtttttttttaatggaaaattcatctttattaaccattaaactccgctaccaaaagaggtaacaactcagttggaacaaactccaaactgaaacgacgatcagggtataaattatcggctctagcgaagctatgagcaaccatatttgctgaccgtttaataaaataaacagaatcattagacaattcacttaatatagctttacaatcattaataatgctaccaaacaaagatatcatattagtagcactccgtaaagcttgagtcacactgaggcagtcggcctccacatgcactcctatccaccc

SEQ ID NO: 45397 - DNA, 567 bp, Cannabis sativa
aaaaaaaaaaaaaaaagcataaaggatcactcctagctgttaactcattagagttaattttagcttggagacccctccatcatcttgggtgtcttgcaactcagatgtcaatgtgattgtcgatggttctatgtagttgttgttattaggaatgaatggggagacattttggccatcaaaatagcatggtgccattttactgaacccttactctgtgaagctcatgtaatttgtctggtagcagaactcacagtggagcttggtcataataaattggtaattttccaatgtgataacgatgtggtcacaaaatctttcaacaccaacactgaccttgatgtggaccatactctctccacaactagaggacgttttctcaatttctacagtcagttcagggagtgggaagtaattcacatctcaagaagctgcaattacatggcgcataacatcgccaaatgggcattcaacactagaggtgttcataaaatagttgattcaatccaatccaataaagtgcgaatatccgcacttgtgcggattggaaaattcaaaatctgcacttgt

SEQ ID NO: 45398 - DNA, 2057 bp, Cannabis sativa
ccggagtcggactacagcccccatgaaccacaatgttcctaacattccatacttgccacattatcaccagaaagaactcaaaattttctttgtcccactcccgggccaatcgcataaggaaggacaaatgatcctccccctcaaaccgtctcaactcctgcaaaaggccactaactcgccaaaatttcttacttgtcgtacactcccataaggcatgactaatggactcattagcttgattagagcagcgcatacacaccatacctgaaggaaccccccgtttagctaacacggcattagatggtaaccagttgtgaacaagcttccattcaaagtgtttgatctttggtggtaccttcaatcgccatagcttccgccaccactccacaataacatgatcatccgaatgatgctgttcagaatccaatgagctagccattctatacccactcttcacagtatattccccattcttactatagtgccacataattttgtcatccacttcccaatccgaaaaaggtgtggcaagaatcaagtcggcatctgtcttgttgaacacattccttataaattcctcatcccatcggccatctgcacacttgagatcagcaacataaagattagctggcagtggaggtttatcatatatcttaaatgtgacaggtcttggcagccacgggtcctccaaaaccttgaccaattccccattaccaatacgccatcggtagcccttcaatatcagctttttaccccacaccaaactacgtcaaacaaaggatgcgttagccccgcaatttgcctccaacacacctttacgagggaagtaagaggctttcagaacctgactacagagattatggggatggcgaatacatctccatatttgtttagcgaggagcgcttgattaaacattcccaagtctctaaaccccagtcctcccttgtccttcggcttacacaaataccaccacttacaccaatggatcttcttgtctttatcagatgaaccccaccaaaatcgagccgacatacgatgaagacttgaaatagtcttctttggcaatttgaagcacgacatagtataagttgggatcgcttgcactatagctttaataagaaactctttcccggccattgagaacatggattgtttccaccctttcattttagcccacaccttgttcttaatctcatctaaaaactccttcttgttacgtcccacaaaggaaggtaatcccaaatacttccaatggttatcaactaaccgcacccccaaaaactcagcaaggtgactccgggtctcattattcacattccgaccaaaacaaacttccgacttatgatagttaataagctgtcccgaagcagccgagtatttactcaatacttgctgaaattgttgacaactcatcatagtagcatctaagaagactaaactatcatccgcgaaaaaaagatgagagaccgaaagaccttggcggccaaaccaaattcctcttaaccggccttccctctcctctttttgaatcaagttcgagaatgcttcagcacagaaaaggaataaaaaaggggatagcggatcaccttgacgcaaaccacgctccggtatcaacttccctttaacttcaccattgatcagaaaggagagactcgtggatgtaacacatttcatgactttagcaacccatatgcagttgaaccccagtcttagcataacctcctgaagaaaaggtcattcaactctatcgtaagcttttgccatgtcaagtttcaacgccatcttatcaccattctgaaatctgttcttacgcatacaatggagcccttcataagcaacaattgcattgtcatggataagcctatcctgtacaaaagcactctgagtgtccgagataaccgaccccatcacacctctcaaacggttcaccaagcacttcgacacaatcttgtatataacattacacaaactaatgggccgaaactcctctactctagttggccgatccactttcggtataagtgttataatagtctcattcaaacaagccaaatcc

SEQ ID NO: 45399 - DNA, 1898 bp, Cannabis sativa
gtgttaccaaacgacacctataataataatatatattaataaaatattaatatattaataaaaactttattattaatggttatcttattattccttaaccattaagaaatctctactgctattttaattatctcaatacttacactatcaacttatcataatattcctataaaatccattaattaaacctgttatgatatttttgatcccagatcgagttttcaaagtcgccaaacctgaaaaatattattattccacaaataggtcatgttatattcataatgctatataaacttctgtaattaataaattatgcttatttatccatttggaacaaaattaaaatttatgctgaagtagatgatagtagtatcataatcacacttattactcgattagcctacaatatatacaatctttaattatttattattagtcttatcgagatattatagtaggtcattactcgctatctaaggggccgaagttctataaaatattgtctcgttttatttacttgttcttattgtgtacacatgatgatatcagtcataaatacaactctactctcgcttgactaaatcttaagttaacaatttaaaaaaaaaatgctacaaagaagtttcaaaaagaatattaaaagtaattttgaaaaataatttaattaagttaattatttggtgcaaataaattttctattatggagaagcaaaattttaaagaaggtatatttaagcggtcggtagaagtgtccaattattctaaaaaaaaattataagatgtctgtctgtactctgtactctgtagtctgtgaaagtgggacttctaaaaatacagcctgagttcttcaaggaaaaaagtaatgttattaaatggtaagagtacgggggagtgagagatccaacggcaaaagatcaataaagaaagatgatcgaacggccaatgataagattacggggctggagcgaacaagcgagtcgcggaaacacggagccgctctcgcccagagtttggaagatattcctcctgagacagccccatcatgggacccacatttctcaccacaaacaaaaggtccaccgtagaaaccatttccttctctctctctttttcttatatttaaataaaataaaccaaaaataaaaagtataaagcaaactcaaccatggtttggcctttttatgtttttttttgttagttctaaaactcattactctcatcttaacttaaccccaattcccatggcttcctttactcaaatgcctttctatatttgaagtttccaaacccacacaaacaagtgagctgaactgttagctttcttgagaaactaacaacacctcactcacccacctctccagtctccctctctcacacacactttcccagatcatacctttgctttcgtttcaagaaatcaatcgatcaaagatttaatattttcatcaccaccatcatatcattattatcttctttcttattttctttcttaatagcatattgatttaaaaactatataataatatatttataagcatgagctgcaatggttgccgagtcctccggaaggggtgcggtgagtcgtgtgtactgaggtcttgcctacactggatcgaatcccccgaagcccaaggcaacgccaccttgttccttgccaagtttttcggccgtagtgacctcatgtccttcatctccgccgttcccgaccaccaccgtcctggtatataagctttcccttttttttttgttaaaaaatatttacttttatagttttatacttattgtttgtatcgacctatatatatatttatagcgttgttccaatcgttgctgttcgaggcgtgtgggcgcacggtgaatccggtgaacggagcagtggggcttctatcgagcgggaa

SEQ ID NO: 45400 - DNA, 1665 bp, Cannabis sativa
gtgttttgtttctcatggaaactaagttacaatctggtagtatttctaaattccgaaatagtttgcactttcctcatggtattgaagttcctcgaattggcttaagtggtggtgttatgcttctatggaaatcggataaggacattgcaattaacaactactcttctaaccacattgattgttttcttgaattccatgatggtcaatcttttcactttacggggttttatggtcatccccaagtcaatcaacgcattcatacacggactaagctcaagagatgttttaatatagctcctcttagaccatggcttgtcatgggtgatttcaatgaggttctttcaaataatgacaagattggtggtcctattagaaaccaacatcaaatacaaccttttcaatctaccattgatctatgccatcttactccacttatttttgaaggtgaactttgtacttggacaaataagtgtcaaggcgatggacatgtaaaggaaaggcttgattatggattttgtaatgagttctgggacaactttttcgaacctgggacaattcagcatctcaacttttatcattctgaccaccgtgcgttgaaaactcatgttttggcgcttagggagcagcaactaaaacctgcctttaaatcaaggtttagatttgagaaaatttggcgccaggatgatcaacgtcttgatatgattcagaggcaatggactgagaattcacctgatcctatcctacagattactaacaatttggtcttttgtgcatctcatttgcaaacttgggatcatcagaagtttggtaagatgaagaaaaaaattaagaaatcccatgagcatgtggctgccttacagaattctactgacacttcccaatcgcattttactgctctcaaaaattggcacaagaggtcaagaatttattggttaaaattgggtgattccaacacaaaattcttccaccaccatgccaataacagaaactcaaacaatcgtattaaaaagcttgaagattctgttggtgttactcacaccagtagtcaagagattgtccaaatcattgctgattatttttttgcaatttattcttctcaaggaattgatcagttcgctcttgaggcagtgctttccaccattccaaccaccatttcaatagagaatcaagctattttgtctcagccatacacatcagaagatgtttatcatgccttaaaatccatgtttgaagatagaaagccctggtttggatggtatgtctgtaatgttctacactaattactggcctgttgttggttcacttgtaacctctgttgtccttgatgttctcaataatggctgtgatccaaccttgcttgatagaaccttgattaccctcatacccaaagttaaaaagcctaccaagatcacccaataccgacctataagtctttgcaatgttctgtacaaactagtatcaaagaccattgttcttcggctgcaaccttttcttcatttgggtatctcagaatttcaaagtgcatttctatcacaacgccttattactgataatgtacttgttgcctttgaagttcttcattcactcaaaaataggaagagaggtaacaaaggttttgcggctatgaaattggacacgagtaaggctttcgatagggtggagtgg

SEQ ID NO: 45401 - DNA, 2279 bp, Cannabis sativa
taaaagtaaagaatgagattacatgtttatcattctgtcaacagcttcttgtgtagtcccatgctcatccagcaggtacactctccatccccttcatttcgaaaagagaatttaagttcagacagttgagactcatcagtatagcaaaatatgcttctcaacccaagtgaattagctccataaacacaaaaccttctaaatgtaagctaagagaaaaagaatgaaagtgaataacctgtaagcagctcgaacagcaagcctccccgcaacactccgaactttgttcgactgtggcgtctccttgccatcactggatttcggaagcccaattatgaattcatcagcttcctacattttttttctttttctcagcaaaaagattacaaaatactactttctagattttagttttcaaagaactcattctacctgcttttgtgcaatctcaagaagctgcatctcaagtttatctcccctcaatttcaaaacctatccaaatagtgaaaatgagaaaccaatatcaataccttaacaaatacaatatatcatttaaacaaacaataatgatggaaaaaaaaaaaagacatggaataatttggagaggtaattacagtgagaggacgaacggagaaacctttgctgagcgcaactccggtgcgagacattccaaggtctacccctaaactgaaccctcctctccaatctggttccctcttccgccgcgccgcattcggccaaatttcatctgccgaaattgccctcactcttccctccttttggaccttaagaacatggggagagaagggggcattttgggggttataaagaggaaacagtgacggagttggtgttggcaacagttgctgcgaccacatcccggagaattagaagaacctaccaagaaagatttaattgagtgtttatttgctgttgtgaagtgaagatatattgcaatttgcattggactgccttagccactaaacgacgtgtttttcttttaaccaaaaacgacatctttatagttcgaaaaggttgttttgtttgtcgagtaaagatcgttgttgttctttttctttaggtaaatcacttgaaattgaaaccatgaaaatgactatctatgctagagaaactattagaggaaattagtggcatatgtacacacatacaaacatgcatgttttgtataattgtatattccttcattaataataattgaatgaaagaaaaaataacttcattaacaaaaaaaaaggaaaattcttgaattttaaaaaattattatcaccactgttaattaatcagaatcaatacaaatatgtgcgccgccgaccccaatattctcggctccatcaacggccacaccagcacggcggactgaatcgaataagggcgaaatcatgaggcggtaatgggcggggcgagaaagttcctcgcgaaggtcgatctgtacggcggtgacgccgatttctttaagacgaaaggctagcttctcaccaacgcgggaggcgatcttagcgtcccagaagttgtgtgaacgagggaatcggttgagcttggcgcggtagtgggacaagaactcctgctcggtggaggaagccatagctacgatcgaagaggaggaagggctcgtcacttgagccgtgatttttcgacatgaaagggccaggcgaaggaggtgatggtggcttgcgctggacattgcgactgggaaatgggaaccgtaatttttcctattattgttattatgtttttgtttgttaaatgtattttctttttattattctaatatattttatggagaaggaatacaaaaacatgcctgcacggtgtcatgtgtcattagtttgtttgtgaaagtaatttatttatcaacaaagaaattgggtgtttggtgtttgttgtaatcagatttgagtgtggaaaggaaaagagggtaaagagaaagagaaagagaactcaccaataacaccttaagaactcagtgaggaattatatcaaacactttgtaagcactaaaaccaacacatatcatcaaatcaaagaattaaagataaaattgtttcagtctattggaatggaaatcaacactacaatgcttaaaccaatgtttaaaaaggcgtttttgaggcgcgtctagtgcctcaaggcgtgcgcctgagaagaagtgaggcgtacacctcatgtggtgaggcgttgagttgaggcgtgaggcgttgaggcgtaagaggcgtgcgcctcaaattttgtgtgtgaaatgggctatttcagccctaaaaaaa

SEQ ID NO: 45402 - DNA, 1323 bp, Cannabis sativa
ttttacaaaaatattatttttttataaaacaacctaaatgaactataaaacaacaaaatataacatttaaaaataataattgaacaattaaaaaacaattgtgtaacaacagtaaaaatttattactgtacataatataaaacctatacagtattttgaagaaaaaaacacaatattttttttaaaaaaattcgcgccatattagaaatgaaaaaaaaaattgaaaatattagtatgtggtgtaaaaattgagtgtaaggactaatttgtgtctcatatagattgacattgagcccttgtttgcttcctaatacctaaagagacttaagcgcacgcaaaggtaggatcccatgcatgggatggattgatctttgggcttgggttaaggatattccatttggggttgtaactcgataactacaaaagactaagaaccaaacagatacatatgctagctttcttacttcacatataggctttgtttggagcattggattcatgcctacgcctgtttgctctaccaaacctaaacaagaatctattctacacaatagttttggacatggaaagcccaatgatcagtcagcatatgaaatccacgtgacttttcaaagtttaagaaagaatgaataatgaacagctgtatatgttttgaacaatccttgtcaagaaatttgataaagaaaatcattgttttctcatctaaatgataaataatataaacatatattattaaatataaaaatgttgaattaagagcatccagttttttatgtttctttctttttttgagtacttttttggctttggatcatagagagtagaaaattcctcctgactcgactgaattagtgcctaaattataattctgtggttctattttgaaatcgcacgtagttttgcttttataagctgtcagaatatatataaaccaactctgttaattacttaattggcatcatcaccgatgaataccttttctaattataacattttaagtaatgctaatacagaatataagcaccaatgctaaaaggcgtccgaggccgagagctccaattcgtaattaaatttaatgtaatgacttgtataaactataaagtactgctatttaattgggaatttgggaatcgcaattctagggagccatgctctttattaatttgttttttttatctaatgttcctatattttttacccttattcttattcagccggctcaatttaaattggtaattggccctaccagtgtttaaagcacttttgccgcaaaattttataaaaggatataagacactattttttatttaaaaagaaaaacta

SEQ ID NO: 45403 - DNA, 2179 bp, Cannabis sativa
aagaaagcaatattttactgcaaaaaaaaaaaaaaaaaggcaatatttattaagttgatctaataagttgtaacttccttttctaactttttaaaaaaaaaaaaaagtttagctatttattaaatttaagttttcagcattaaattaagttaatatattgtaatttatagctacgtattaattaataaatatgtcatagtaatgtaatctttattaatattatcgaaacaaaagaaaaatacagttgaagaataaaaaaactcaataattcggtatgagtccctaaattttgattattgggagactcttttggccgagtgctttctattaatggtaataattaattcatttttcttaaagaaagaaatgggtacaactccattattaaaaataaaaaacaaaaacactatgggcgcaaacaagcaaataagaaagaatattcaccaaaaatgtcagtaagctttatctatcaactatataatatactaaaattggctatatcttatcaatcattgaaatttcagtaatgtaaattaaattcaaatattttttattaataattataagagaaatttacacctctattatacctattttatactacactttaaaatgttcttgaagaaacgtatttgaatatttggtatggtatacgcagtcctttcttcactcattttttcctctttacttattctttctctctttcttcttttttcctcttctacttaagtttaaaagaaatatattgttctattcaacgttagatgttattttttttttaactatttctaaaagaaaccattaaattactaattagttattattttatatatatttttaaatcttagttaatatttatcttaaaattttattaattaaattgtattatattatacaataactaattatcttttaaaataataaaaatatataaaataagtatataaaaattgtagcttaaacaaaaacagaaactgaaacttgatgagatcaggtaacaaaattattattgtaaattagattgaaacttaagatgaagtaataacattattattgtaaattagatacaaataaatataatgcatcgataataataatataataataatgcatcgatcaatcgagctatcattatctagttatatgtaatttttttttttaaatcaggctatcatatatataatactactctaacttcaaaaacttactatgatcatgtaatttgttatatataaatatatatatatatatgtttcgtttcagttacgtttgtttgggcaaggcaccagaaaattgttcggctgtggagatgcggcagcggcagagagggcaggaatcacatacggatatccaagcggcgatgcaatctgcgtggtacacgtgtccacaggggattcgtaggccggtgcgtccgccagagtagtggaagctttccatacagaccatgcaagaatattctacgtttggcgcggttaaggttccagacgaccccttttgaagatctgttaggcttgtgtatattttggcttgtgatcccagtactaccgaattatctctcaccacttctgtgatttgatggttgtgatcatccccagaaggtcgaattgaatcttgatcggctaaagtcagaacctcgtccaggtcgaacacctggtcaatcatcggaaaattcgatggtcgtacgtttgaatttgaaaaaaccaaggtagccatatatatatatatatatatttatagagagagagagagaggggtatggtagatattcgatgagattgagagagtaatagagatcagtggaattttgtagaggtatacatataaatagcgtggatattaacgcgcccatttttttttttttttctgtacaagatgatggttacatcatagagcattatatataacgataaaaacattgagaaaattgactcattcaattcatttataagaccatctgtttttttttttttttttgtgaggaagacataaatgtattcaatcaaatcagcttacagtagtatttaaaaatttaagaccaacatcaatttatacacgaacaattattgaattagtaacagacttagttagtgtatgtagtatattatttacataacacgaaatggtacaacaagaatcactaccaactaatctcggatcaataataaatttaaacgtaaaa

SEQ ID NO: 45404 - DNA, 749 bp, Cannabis sativa
tttatcagtagggatgttacttttgatgaaaacagggtgtatagggatactctcaaaactcagcaagatgtaccaatctcttctgaacctgaacagaatatggatagccagtttgaggtggagcttagaagtgatcaaacacagaaccagagagagattcaagaacaaggagcaactgaggttaatgaagatataattgaagatgatgatgatgctgataatgatgaagaagagggtcaggactatcaattggtgagagataggaaaagaagagccatcaagccaccaagtagatttggctttgcagacctggttcactatgctctgtctattgctgcagtagatgaacctctgaactatagagaggctatgaattcagcatacaagcatgagtggaatcaagccatggaagatgaaatgacatcacttaaaagaaatcagacatggattctgatcagaaagcttgctggtatgaaagtagtgggatgcaaatgggtactaaaatacaaagaaggaattgaaggagtgacacaagctagattcaaggccagacttgtagcaaaggggtactctcaaagagaaggtatagactataatgagattttttctcctgttgtaaaacatacatctattaggttgctgttgagcctagtagcaagtgatgacttagaacttgagcaattagatgtgaaaactgcattcctacatggagatttagaagaaaagattttcatgaagcaaccagaagg

SEQ ID NO: 45405 - DNA, 1230 bp, Cannabis sativa
ttggtgagaaaattgaacttgagcgtctttatgattctgttaattttttactctctttacaggtaataatttttcataacaatgatatatatatttgttttctttcgcttataattttcataaaatattgaaaaattaaatcaaataggtgcatcggtacatttattttttagcaatgtattgttgaaaccctaaaattatatgattaacataatttacttgcttgctagaggaaaaatggtggtttaactgtttgggagcaagcaatagggcaagagtggatggaggtatagaattgtcttttataatacgatagaaataattaaataattagtatttttgtttcttgaactttttaaactattaagttatgccctttaaaatcaactgcttgtataaataatactctacaaaatataactttcacattatatgatcctttcatcacactctattcaaatttttcatgaaataaatgacgatgtgaatagttgatgaatggatgcaaattatatacttttcaccttttttattattcaccacatcactcgtttcatgaaataattgaataaaatgtaatgaaagagccacgttaatattttaaacattatatttcaagtggtattatttacaaactgtatatattaggagacgcaacttaatagtgtaaaaagttcaaggtaaaaatactaattattctaaatactttgattaaataattttgaaagagactagatatttgtgtttggtaattaatttgaatgcaattcaaaatttgattagatattgaatccaagtgaatttgctgagggaattgtgattgagcatgaatatgtggaatgcacttcttcagcaatcgaagcactttttttgtttaagagtttatatccaaaccataagaaatatgaaattgaaaattttataaccaaggctgtacatttcattgagcactcacagcttcctgacggttcatggtaataatattctccttcattttcctatctaaatatatttatatatagttattatattattaattaagggaggaataatttcaaaaaacacagaaacaataaaaaaaattacaaaaaatacgttctatacatggttatcaatatttttttacagtttttatgaatgtcagtagtcccgtgattcgtaagggaaaataccgggtaagttgtgcaatcccacaccgcatggggatggtcaagtgggatgattctaaga

SEQ ID NO: 45406 - DNA, 2413 bp, Cannabis sativa
ataggcagccatgcaggttggactgggttgacttggatccgtagaattttcttaagatttaggcccactggtagggtatttacatattgttatgaaattgggcatttagtttaaaggcccagtgccaaaagtggtaggtgtgaggcattgttgaaggtattgttgatatttgacgtgcctgaacacgcgtgatcctctaatacataaggaaatagcagtgtcagagtagtggtcgtttcaatccctaggatgatcatacctgttagttaagccttcaccttggacaagacaaaggggacattttagaaatttggtgggatgtcgttagagggaagccacgtaggatatttgcccgaaaggcaatatcagatggcatgggacctaagaggtctcgttcatgtgttacatgcacctagatagttgtttcgttctgtgatattcagtcaaggcaggttagtcagattctagctatacgctcttcttctcaaggccaaaaaatggaagtataacttgtagtcggctcctcaaccttcccaacttggaaatgtgtggctgagtaaactattaaatcgggaatagaccaagtctaggcttggtagatatctaatttttcttacccgtgttaggtgttaatttttgttatttttttgggtcatgtttttaattagttttgtttcatttagttctgttgtatgatttagtttgttaatgctttcaagtttagtgaataaggaagaacttgaatgagttgagaaaaaatagttgcaaatcaaagtaataattgtgttttcattgttggcgtgctaaaagtggagtcctttgaagctttgtcaagttttggtaaatctcaagcctctaaaattaaagaattgaagaagtttgagtaacaccatggcatagaaattcaatgtcaatgcgcttctttgaaaaaatatggtcaaaagttggagtgctaaaagttgtacatggaccatgcatgggagtcaccatgccgtggcaaaataaattgttgcccaaaattttgatacgcaagccacggcatgatggaacctatgccgcgatctggcacccacattttgcgccaaggagtttgtcacttgaagacatgggccacgacatagggtagcccatacagcggcccacgtaggggtttttttggccaattagttttataagcctaattcaaaaaaaatgtgcaagttatttctaaggtgttccaagctctatcctccttcttttgttgaagttgtggcgattctcattgttttggaagttgttgtgaagcagaagtggcacgaaattactttcttttcaaattgcaaaactctgattgataccttgcatatggatatgtaagggtcctaagtagagatgtattccaattattgagcataatttggctcttctattgtgttttgattaatgttctctctattctattgcaagactttctaatgattttgcagactctatcgccaagtgggctcatgtttcaaattccactggttgttttctcttcagggagctggccctttgtggtaacttagtgcctttttgaatgatttttcactttgaaaaaaaaaccttgtaaaatattaatgaatatgtttatgatttataatttacatatttcaaacaatttgatgaggatggatttttttttatttagtttttttaggtcaaattttaaaatctgtaaaaaaatttatggtgctcgttgttgagctccatttagctttaaaaaaaataaaatttttattataaaaaaaataataagaataattttggttaatgggtgctcgttgtagttaaatgtaatttatgtaaaatatataatttttatagaaaaatactttaaatactattttttattttaattttgtttttacggtttgggttgctccagtggttgttgcatgagttgcgatgtggatttgggttgcggtttagattgctttgttaattactcggtgtatgtccgtataaatgcaaaaaaaaaaaagttttaaatgtataaataataaaaaaaaaaaacctcattttataactaaagggtttcaaatttttgtaagtagggagactttcattgaataaagttttttcgagatgtcattgaataaagttaattgaactaaaaaaactaaattaaccaaatttaaaatgagttttaagaatttgtacttttcttttgggatgacatttgattgtttatttattttcttaaaaaaaaaattgattgtttacttggagtacatgaaagggtggttccatttaattgaaccgaaccgatctaatttaatttaattacaaaaaaattggatatcccattataattggattggattggatgctaaaagttggattctaattgaattggatcggttattatatgtcaatttcaaaatccaattaa

SEQ ID NO: 45407 - DNA, 2306 bp, Cannabis sativa
ttttttttacatttttacggaaattcacatagcaactaacaaagcaacttaaatcgcaattcaaattcacataacaatccacgtagaaataatcgaaacaatcgttgaagcatcttaaactataaaaatgaaaaataaagttaaaaaatagtatatgaggtgatttttttaaaaacaaacaaacgacatgttgtagtattttcaaaaaaagaaactaaaaaaaacaaatgacatgtcgtagtattttcaaaaaagaaaaaaaaaaacaaacaaacgacatgtcgtaatattttcagtagcaaattagcaatttggtcattcgcctaaaccttggtttttcacacagaaaatccctcccgacctgtgaaaaaccccaaaaccctagtttcagtaacttaagaagcaacaatggcggcaaatgataattccaagaggaagaagcccaacatactcatcaccggaacacccggcacaggaaagacaacgacctcctctgctctagcagacgccacacagtttcgccacatcaacatcggagatctcgtcaaagaaaagaatctccacgacggttgggatgatgacctcgattgttacgtcatcaatgaagacttggtacgcttccgaaaacctaatccttttccatttaattttgaatcgaaagctcatttaatctgttcaagtataaaaaattcaggtgtgtgatgaattagaggatttgatggaaggaggaggtaacatcgtggattaccatggctgcgatttcttccctgaacgatggttcgatcttgtgattgtgcttcaaactgaaaactctgtattgtacgatcgcttgcataacaggtaaatcaatttggggataaagaatagattttgaaatttggttttgatacccaattcttgatatttggtttttctttgataggggttattcagagactaagcttaagaataatattgagtgtgagattttccaagtgttgcttgaggaagcaaaggaaagttactcagagaacatagtaatggcgttgaagagtgataccattgatgatatttcaagaaatgtggcaactttgactgattggattagagcttggtaaccctcccaccttctaattctatatattacaatcaaatattataaaaccctaattttcatttgggtttttgagtgtgtgattgattgtatgaaattattgatctctgttttggaggcttttctatcagtagttactgctcttattttggcttcagagttcagatagatatatttttggtgtgaaatgaaaatgtttataaatatttatgtgatgatgttcatagaagtaggggcaattcattcattatatggattttgttagaactttgaacctttcattttatgaccaaagctctactgtaatggcttttttggaattggattcagttgtcttaatctctcttctatgatctctaatcaatcaatataacttttgtatggattagtatatttaagtttcaggctattattaagtaattttaaggctattatacacaaggaccccactgattttataatcgattagattatacttttgaatcccaatttaaatgaaacctgtaaattaatactggattaattaataacttcgataaattatccagtctgattaatttatagaggtttcactgttatgtgtgtatcttcgagaaaatcaaagagggacatggaccattttattaaagttgactaaccatgtgatgattctactaaataaatattcatgtgaatgttattttttgaaaaaatacatcaataaaggaggtttatggaatattgtaggtgcattttatttaaatataatttttgattttatattttaaacattttcataatgatttttgcaacaaaaataattcttgttagaaatatgtatggataatgtttttaggaaatttagtgataaactattttttgttgaaagaagtatgacaagtgacaactctacacaaattctcttttcacttgcaagatcaactcaacaccatctttctcatttcgcattgcaagaacatattttcgctacaacactaaattctgcagattctataatgaacacgatcacaactgtaaatcccaagtgaacgcccaagaagataggtgcctgaggtcaacactgaaccgaacaatggcggctgctcgccctacaatttcgataattgctcggttaacagtagatgctttttaactctttatccttgtgcataaaatgagtttgatcctcacttttttgaaaataaaatactgccctaaagcctatgtcattcta

SEQ ID NO: 45408 - DNA, 2782 bp, Cannabis sativa
attttatggcataaaattattatttacaaattacgtttgtaaaattttaaaattacaaaaataaattttatttagcaaaaagtaagaaaaaaaaaactaaataacaacgaaaaatcaacctcactataactataaataaattataaaataataaaaaataacatgacaactataaataaactatataaaaaaattagtatttatactgaaaatatatttttgtaaataaaatattaaaagagtaaaagtaaaaaagaaaaattgtattaacttatttttgaaatttttttaaaaaattttattctatatgaattttttaaaaataaaaatatattagatacgatagaaaatatatatttttttttgttttgaatatgaactttcgtataggttaaataattctattcgtataaattccctccaacaaatctgtgagtggaattattttttctcaaaagtaaaaacacatttttgtttgttagattctcagattttctttttcacctatattttcgtttgtgaagtaatttcttttcaacaatttgtaatgtatgtctgatttattgtgtagtaattaccatatcaacttaagattttttaaaaaacaattagttgttattatttagaaagaaaaacccaataaacagtaatgaagaaatatataatatcttcatagtatacaatacaattaatctctagaaaaatctcgtacaattccaacacatatacgcataacagatattatccctttaaaaatcgtaaacgtctaattagattcaattaattaagtttttccttttctaaaaccagaaacaataaattagtgtgaacaaagaaccgaccatgtttttttgtaataatttttaatgtaaatgaaatagaaaaataataaaaagataaattttatattattttttgaaggaaaataaaaataaaaatatatataaataagaaaaagtaagcttatggtccacgagaagagtctaccattcattttcattctacgctgttttgcgtcaaaatcaaataccgctgtattcctttcggtttttctcgggaaacaaacaaaactaactcaaacagcctagcgtccgtgtaccaaagtatacccatatatcttaaaccaccattaacacccatgtattacctcaatcagattctttagaaccctctcttatctgggatttctttgttatcaagttgttttttttttttttggctttcttgtatgggtcttggtttctctttgtttttcaattcgggcccagatgggtcgatgggttcgcaatcaaagcctggtcttggggacttgcccgagagctgtgtcgcttcgattatgggatatttggaaccctctgagatttgtcaattggcgaagctgaatcgggtttttcgtggagcttctatggcggattttgtttgggaatcgaaattgccttcaaattatcggattcttgtcgaaaaagtattgggggattccatgggaaatttggggaaacgagagatttacgcgaggctttgtcggcctaatacttatgatgatggtaccaaggtgtgttctgattttcatattcttctctgctgtttatttaccgagaaaacccaaaacccccaaaaaaaatcagttttcgtttttggttagaaaatgaaaataataatcatggaaaccctcttctttttcatttctttagtaaaaatctcgtgtttggctgatgagtaaacatggtagaaaatgagaaattctcaggtttggatctcaaatttctaattctttcatatgggattagaaatacttctatggttatgtcttctagaagattaattttctttttttgcttcgagtccataggaaaacttaataggaagaaggtgcatagaactgtgaactctaaatttaattctttagtagttttagaaagaccattgactaagtcattggaagaagtagaaggtattgaattggaacaaagatggtattggtagactagtctcttatctcttatcatgttttctcggtgaccaaacagaatttcatgctttgaataattcaggccatttagaaagactattgactaagccatttgtgttgcttgcagaaagtttggttggacaaaaccacaggtggagtttgcttgtctgttgcttcaaaaggattatccatcaccggaattgatgatcgaagatattggaactacattccaacagaagaatctaggtaaaaatcgagtatcattttttattgtttgtttgttttccatgttattttttctctcttattgtcttactttatgttgtgaggtttcattgaaacgggaatgtttgtatcagtattatcatgtatattatcgatggatgaggaaagttcaagttttacggggatttccttgctcgaattttctgaagtatgtttttttggttaccctttttgtaaaatctctattctgtggtttttgatttttaaatgaattgactttttatttgcaatgaaagtttgtggttattgcattttttaaaatcgcttttagattttgtttgtttatatgctgtcttatgtcttctaatctgaaaagcaaagctacagattagattttgtaaaaaaagagatgcttttgttttctgtttctgtccaaaaagaaaatcaaaatcacttactagaaaatagagtgtaaattatatttatgtttgtctgaaactacttagagtcagaaaatcgacactctcctcacaaaagggaggtcctaagttcgaatcccctctcttcaatatcaaaaaaaaaaaaaaa

SEQ ID NO: 45409 - DNA, 1177 bp, Cannabis sativa
ggtgactgaggagatccttaacaaaaaaaaagtcttggttgtttcaggtgtaatgagagtaaaataggagagagagaccagagaaatataaaatatggtattccgaagttttattataaaaatatggcataatttttttttttatatagtgagaaattttccatattattataaattaacagtcatttacaatagagaaaatagaataaggtatttttcatatagcgtactttgttaagccacaagcagcttgattagcttgcctatgagcatgagtaccagtaacttcaaggaaagaggataaaagacaacgaacatcatcaattagatcagaaaaacaagataaatctctatgaagagaatttaatgcagaggatactcttagggcgtctgttttcacatgtgctattggcaattgttgttgagtagcccaattaagactgtaaaagagtgtctttgcttctatttcatcacttctgaaacaactttggactgatttagaaaacgcagcaattacttctcctttatagttgcgcaccactgttccatttcctaatatcttgtcttgaaaattggcagcaacatcaatattcattttaagcaaattaccatatggtggcatccatgctatctcatatggggaggatcggccacggtgagcccatggtggtggccggtcctccccattgaactttactcaaaatatatgcatatatattcagatgtatatattgtatttatattatatattgtatgtatatatatagtgaatacacaatgtatatacagtataaattatcattaaattatttaatgtaaataattgattattattttagatgtttatttttcaaatttaattttgaatttaaaataaatattatagttattaatttgaaatttaaattcaaaaacaagccataaacaactaaaatcaagctttaaaataacttctaacacaattcattctcaaataaaactaaactcccaaattctcaaaaattttaaaagagaaccaagcttaaaacttcaaaaacaacaaggagtaaagtatctaaggcttacctttgatcttggcttaaggtttctcctcaatccttgctaaaaatggcttgaatatggtagtctaaccttggttttttctttcaaaaagggtcacgagagagagagagagaga

SEQ ID NO: 45410 - DNA, 3734 bp, Cannabis sativa
  modified_base (304)..(320): a, c, t, g, unknown or other
  modified_base (722)..(722): a, c, t, g, unknown or other
ttttttaattttaaaaacagaaataaaaatgtgttctgtaaaatttatttttatttttattttttgattttattaaagtctggtctaggtataaggtcgaatttgagttcggggtcagaggtcgagttcagcgacagggccgtggggagtgatttgggtccgagtctggtcggatctaaaatattaattaagaaaaaaaaaactatttgaaaaaatattgaaagtgattttgttttgtttttaaaattttgaatctgtattaaaaaattaaaaagtgaaaatatttttatagaacatgtttttnnnnnnnnnnnnnnnnnttttaattttaaaaacagaaaactctgcttaaaaaagtgttactaaacgtcaccatgtaagtgctctaatttgcatctccattaattgtttcttttaatcattgtaatagtgtatttaatcaaaaatagttgtaaagataaagttttttgattaagaagatgaagtaaagttggtttgaaagtaatacgattgtaagtacgagcagaatcacgtttttaattttcaaactgttacaattcacttttttaatgccaaaacagttctacactgaatttttttattagttaataatatcaacaaaacatttattagcatagttcattaataagaatgggtggaatttatttataaatgcattaataaaattcgttcatatacagtattttttttttttaaaaaantatacaattttattaataacaatcctctaaaataatagtcaaacttaaggacatttttccccttagaaatacaaccatgattagaataagaaaaacgagtcaactaatcggctgcataagtcccgaatcgtttgacaaaataaactcagataaagttagatgaaaaagattgcagcatcagagtttaccttaagaacacctatatttagtttcctccactactcagaagactcaaccgtaaatttatcgcagcaggttcattcaattctttagcttgaatactcaactattgtacaagatacgtaactgcactagtactagccacaaataacttattgttcacaaccacataacaacaatttgacggcaatgcattgaataacaaagaagacgaaccaataataaaataaaattatgtcatagagacaagactaattgcagtaacttaaataaaagacactcaaaactatgttacagaaaaaattaattacattagcaaactcacatatccgggccaagccacgcctaagtctaaggagaacagggacggacccactttgattgatgtgggggctatagccccactaacaaaaatattgcattttaaaaaattaaatgcaatttttttaatttcataattatatattaaaatagtagaaaaagctcccacaaaattaaataaatctagtaattataatattggtataattattttttaatgataaataagctcccacaaagtaaaatttctgagtccatcactaaaggagaaccactcgtctggccggaggaaatgacaaccggctaagaatttcaggagagaaaacctaggagacaatataaaatatttgttaaataattcaactgttcggtcaaaaaaaaacatttgttaatatttaaaatttgactaaaaaaaattaaatttgcaatcttctaataaattaaattaaataacatgttataagctcaaaaacttataaacatttaaatttataatcatataattcttaacggcatggttttataatacaataaaactaattaagatctgccaacccaaataaaaagcagcaaataactaattaagtaagaagttattattattattattattatttgatagaaaagtaagaagttattatatttaatattttttgtttgacaatggtaacagttaactattttttattttctaaggagttacaattaactattaaaataagaacagttttaccttttttttaatatggtatttagaaagataatatatcattattattgctactgatactatgtcctaatttgttgactctaagtttcggattatggaattaatatccaaaaaataaattatattaatgatttgttatatttccaataagaagtaaatgtcataataatgaatattgaatttctctctttcaccgtaattttcattgatgaattaaacctgccttctacttttcaaaaaaataaaataataaataaataaataaacctgccttctatacttaattccatttttttttcaatgaatacttaattcgaacttgattttctaaaatttcatttattttttggttgaattaagatttttttttaggttgagaataaatttaattggtcgaattttcttgtgtaagcttgggcaagaatgttcagcaaagcaattcaaatccttgatagtattttcagttttggtaagaactaatataattccttatctaaccctcttttgtacgtcccatcataattttttctttttgaacaacacatctcattgataatcatgattgtattttttttttaagaaaatactttattattataaattaatgggtaagtcatttacaataacagaaataaataaatagtggaacaatctcgaactaatagcaagctccatccaatcttaaagtatatctagtcaaaccatgagcaatcatattagttgtacgtttgacatgtacgacatgcacactaaagagaaagaaaagaagacacaaaatatcaataatcagatcattaaaattggaaattgcagtaaaatgaccatataaggtattagtaaccgtaaaggcatctgtttcgacttgtaaaatttgtagttgcatatgaagcacctaattcaagctgtggaaaattgccttattccatatcatgagaaacaaaatttccaacaagaggcttcgagaggggcagctaccacctgaccaatgttttcacgaatcacaacaccaactcctattatatttctctgagcatccaaagccgcatcaacatttagtttcagattccccaaattaggtggcttccacaaaacagagatagcatgagagtttagaggctttagggcaaaataaactggtgggtgatacttggcttgagcagatctacagttagacaaataattttccgcgaaagaggcaagttggctagcaattagttcggtaatttgtccatggaccgcacgatttcgttcagtccacatgcaccaaagtgtaaaaaaaatcagctccatctcagctttcgaatgcattgtcgataggtaaacaagataatctcccctcttcatagaagaagaagcatttccgtcaaaacatagtttaaccaaaaagtgcatgtccatatgtcttagagcaacttaaaacatatgttgtctctattatctcaactacgttgtttctattatctcaacttaaaacattggagcacatgtccaagcctgttgacaaattgagcaattgaaattagtaataacctttcttcgaacaagagatgtggcaattggaagagtatcatgaaggactcgcaacgcaaaaattttaatttttgtttaccactaaaaattggcctgataatgccttgtcaacaagtttatgtagacactcgcttttttgatgactcttggacgatgcctctcgaagaagatggtcggagtgtaattgtcatctttgtctaggacagtgacagaagatgagagttctgttcaaaatgactcaaaatattcag

SEQ ID NO: 45411 - DNA, 2060 bp, Cannabis sativa
taatccctctagtgcctctgtcaagttatctctcaaagaaggagaaccatttcaggatatcactttatatcgcagcacacttggtgctttgcaatatttgacattgacacgaccggatgtggctttcatcatcaacaagctaagccaatttcttcatgcaccaacagtctcccactgggaagcctgcaagaaactgctgagatatctcaagggcacagtctcatatggcctacatattacacctgctgaatctttaaatcttcaagggtattcggatgccgattgggcttcatgcttggatgacaggaaaagtacaggaggttatgctatgttctttggtggaaacttggtttcttggtctgcaaaaaaacaaaatgtagtggctcgatctagtacggaaagtgaatttcgatctcttgccaatactgctgcagaaatcaaatggttaatgtcacttctctctgaacttcaatgctccatgtcccactgtcccatactttgggttgacaaccaaagtgcagcagcaattgcagccaaccccgtgtttcatgctcgatcaaagcatatcgagatcgacttacactttgtacgagagcacattatgaccaagcaactctctgtcagatatgttccagccgtggaccaaattgctgatgttctcaccaaatcactctctacagaaaggttcttatatctgaggtccaaactcaaaatgtccgagacaccttttcgtttgaggggggatgttaaccacattcttgattctgttacttgatacagttagttagttattactgtttgtattttcagtttttctgttatcctcttgtacccttgaattgctatataaataaagcttgagctactcagttgagtaaggctcctaattctttcatttctggttactctgttttctactttctctgctctggcttctgccattactggtctgaaggtatctaccttctacatggtatcatcgtccaattgacttgcgtccatggagtcttcctcctccgatcctcatactacgcttcctactgcaacaactcagaatctccaatggagtcccttctccaattccctctcttcttcattaaccctaaagctcgatcgtcacaattacctttcttggaaatcacaagtggttcccacggtaattggtcacgatcttgatcatgtgctgttctccgatgcttctcctcccccaactctgatcaccggcgccgttaatcctgaattcactcaatggaaaaagagagatcagttactactctcctggctacgatcatcgatgtccgaaccggttctcgcttcagttgccacactgacttcctcatactctgtttggcgtgccttggaacagaggttctctagcgtgacaaaggctcgtctccttcagctcaagggtcagttctcccaactccacaaagccaatttgtcaatctccgactatgtggacaaggctcagaatcttgctgatgcactatcaattgctggttctcctgtcaccaatcaagatttggtgttacaactcttaaatggcttagggcccgactacgatcctgtggtctcagggatcacatctcgaagcgattttctttcctttgaagaggttcaagctcttcttctctctcacgagactagacttgaacatcaccactcagcagctgatctttctataaaaatgcaagctaatcttgcatttcagcactccagaaacgggaactctcgttcctatggtcgtgctatggatcgtagtcaacccagtgacaccaatcgccctcgcacttatggtcgtggcaacatgaataaactgctatgtcaagtctgcctccgaactggacacacggctgctgtttgtcactatcgcttcgacagaaattgggtcactcccaaatatggtaccttcactccccaggcccatttaactgaatctgatgttgtttatgacccgcaggcacatctcacaaccatgatccctgatcttggtgatgatgagtcttggtacgtggacacaggtgccacaaatcatgtgaccaatggccttgacagtcatg

SEQ ID NO: 45412 - DNA, 3313 bp, Cannabis sativa
cgagaagccaaacaagttccaaccgatgcttcttaagtagctgtgtttttcaagttggagaataaggccgagtcaagtacaatttttgttatttttttttcaaatatttgaaggctcttgttaaatggggctcgaagcactgatctgacccgccaatgtcttgataatatgagaagaggaaagccaaacaagtttccaaatgatgctggctaagtagttgtgtctttcaagttcaagaataaggctgagtccaatacaatttttgttatttttctaataattggaggccttcgccctaggcatagctctaactcgcctgtatttagataatatgagatgagaagccaaacaagttcctaaatgatgcttattaagtagagttgtgtcattcaagttcgagaataaagctgccgagttcaataaaatttttggtaattttctcatatttggaggccttcgttaagtggggccctaagcacagatctacctatatccacagccgagcttgttggagaatcaaggcttgtgtagatgcaactagagtttttcttttgtaattttcctagtaagtgtgaactagacaatttttgttagtgtgatttgatctttgattttagttccatttcatctttgatttttctattggtgttgtttcttgcagtattttttgtcttgctaacaatggtaatgctcacacaaaagacttgaaaaatctatggcaagggacaacaatgaagaagttattacctttaatgcaaacattccaaagagggaagaaccccgaagagcgcgatcaacatcagaaggcacatcaggaggaacattactaatgaacaatccatacaagcccataccaaagatcaacatcacagtcccagcaagataaacatctgttatgtgatcattacattatgttgtcattattagcaaaagcaaagaaactcatgataagaaaaagctaagaccaaaaagacagttttctgttgaaatatcagtttttatataacatgtcttcgaattgttgtaaaagtgagaaagagtcaaaagggaattcatggggaattaggccaatgtttaggcgaaactcgaaacaaacatctttgcaatttcatttacttgggtctgtgttttagtgcagatcatcaagttggtgttggtatttgccaacattttccactagttcaaagggagttcatggggaattaggccattctttaggcgaaactcgaaacaagcatctttgcattttcatttgcttgtgtctgtgttttagtgcagatcatcaagttggtgttggtgttggtttttgccaacattttccactagttcatttataatcatattcataattgcatacacaatgagagaaggaaaataattcttgaaaagttaccaatagcttcaactagtctgagaaccatttgaccagtatgaatccctttaacacagctactccagtaaactctataagcatcaacaatgtaaatgcagccctgcaaagattgaatctaatcttttacacttctgttgatgatcactataatttgtacataagtataactaaaatggctatggaatttttaattttgtagatgagagaaattacattgagaaagcacaagagggaaccagccaatgaacctgcaactgcaaaaagtgccaaaaaccgaaagtcgaaaatcacctgttcaaacaacaaaatagtaaagaataatctagggtttgtttggtacgccgtattagactgtattgtattttatagtattacattgaattacatttgatataatattttttatgtaaaattataggccgttttgacttttatgtgtgtataaatatgtaatattttaatattatgatatttacaacccatttgctatttcctagttttaatttccaaagattaaagctttaactaacataacaatcaactagattaaaacaacttcaaaaatcaccaaacccatagagtattatgaaattttttattagcaaaacaacttcctaacaaaatttattaacaaaataatcatgtttggttgcactaatacaaccataaaatgaccattacgatcgttttgcaaccataaatttacactttcagtgaaattcaatgcagttattttgctaatttaacattttcatcacaaatttcctgaaatctgataatttcatacaatttctaccacaattaagattaacccttcactacaaaaccccaaaagaactcaactttacacaagtgattaaaaaattaatcaaactaaccctttcaatgctggattcagttgctctaacaaaccgaaaaagagggttagccgcggagttggggaacgcgtaattgaagccggaattaggctgttttgttgaggaggagtgtgaagaagtagatgagacatgaatggggtcaacatgagttggacttgagtttgtgtttgaggttgttgattttgattcaggggaagaagaagggctaagagaagaagctgtaatgggtgaaaaggtggcaatgggggagaagttttttctggggttcttgaaaagaccaccatggatgatggtgagtggtcttggagttgtggagatggaagtgaacagagccattggaaaaaaaaaaagtaaagatgggatttttttcagaagagagtgtagatatttttatgtattcaatactcattttggtgttgttttgctactcaatgaccggtaataccggtaatttgtaaagaaaaagacaaaaggtttacacgtgcgtgtatggaatcactattcatttcacacgtgctaccaatgtttttcctacctaaatttgatcagtcaagttctatatcaatttgaacttttgttcttaaaaaaataaaagaagagttctatatgaaaaaagagaaagtgccaaactcaaatttggaattttcgagacagtattaaatgagagattacattctatactcattttattttatatattttgatttttatattttttaagttatacttacttttatagatgatattcttattacatccttaagttaataaaaattatgtactagatttaagtagaaggtgacagtaaattagacaacccactcacaaaaatagctacatattaataaaatataatatgaatatatttttgattagtgtatataaaaaaaaaaaatattactcaacttatcttgtattaaatttactctaatataaaatcacttttaattttcattcatttcatttgggaaatttcaatttttgaccctaataatacaacctatatcaaaatttatacccctttataatttgtacaaattta

SEQ ID NO: 45413 - DNA, 3014 bp, Cannabis sativa
taactttgccgtgtcacagtatatttgaaagaaaaaaggaaaagttagtaaaggatgtaaatttcccaaaaaaaatgtatgtgtctgtacttaacttaaatcttaaatgagtagagtctctcaatgcgaaccttgtgggtgaggagtttaatttactaacttttatttctaaatctaatgatactcttagtgaactatatagaagtaagaaatttatatatatatatatagaggaatttggccccattacttaattatgctaatctttctcaaataaacactactcttattttcaattttctcaatttttctccttctctcgcctttttctatttcgaacccacactgaaccaccactaatgacaaatcaaccttcaccaccatccactcccgtcaccattttatcaatttttaggtacgtagagggaaaactttcataaaaacatatggctttcgaaaagatttatgcctttatttgtctgttgtcttgattttcttgcaaaaaatttttatatggttttttttttttttttgcattttttgagttttttgtgccttttgcttgcaagaaagtcaataggttcaatggttactcgatacttgatataagcatgctcttaatgttagggttgaattttcaatatatattatgctaattaataatattattatgttatttgatttaaagcattcgttgtactcgatagtactcgatataattgtacttgatataatagtactatcgagcatttgataattatgttgtttgtttatttttaattgaaactataactctctaaaaccatcgtgtacgggtcctaggtttgatgtttgggtatatgtttaaggttcgggtctaaaggcagtgtttggggccaataaggtcgaagttttgatcggggtccaaaatattaatagaaggatatacatatagattataattaagaaataaaaactatttaaataatttttgaaagtgatttttttcaaaattttcaaaagtttgatttttatttttaaaattaaaaagtgaaaaacttttatagtaattgttttttaaaatatttttatttttctaattaaaaaaaattatcaaacacattttacttaaaatatttataactgaaccaaaccgatcgaataagttaaaccctactaaaatgtgacaaatgcaatgcaccgaatgtgacattactagaacatgacaattaaggactaattaaatattccatcacacattcttcttacaatatatatttattatttatatacaatagatattccatcacacattaattaatatcattaaatactgtgatagttaatgcttttgtaacaatttatttcacaagattcttgttaattataattttgaaatgcaaataatagtaaatacgacttcattcaaaggttcgaaaccttaattgaagatgtgattcggcaaatcacacaaagcatattatcataaaatagatccataataacataaactattttgcttcactttataaagagaatcatttttaattaataagaataaggagttttatttgcattctcaaaactcataaaagcaatcattttaataaattttactatagtttatattaatttttttaaaaaaaaaattctctcctaatatacatattaaacaaaactaaattatattttaaaaattataataaaaataaaataaaataaaataaaaaataatatgtattgcggcttagaaatgaaaatgagagaaatattttattgagtaatcgaatgaataaattacagagtataaccaattatatatataggttgtgacccaaaaccaattaaactgacttaattaactaattagttaataacaagaataaaaacgagacaaaacaaacatgatcacaactaactaactcctgacagtagagacaaataataaccgaaataatagaaccaattcttgtaatccccccactcaaggtggactgtataaatcgtatacaaacatcttagtcacgtgagaagaaagtgttgttgaaggtaatggtttggtaaacacatcagcaagttgtaagttgctggggacaaagtataagtcgaatggtggagttgttgattttgtcacgaatgaagtgacagtcgagttcgatgtgtttcgttcgtttatgaaatgttagattattggcaatgtgttttgcagattgattgtcacattatatgaatgccggtgttggttgatgtaaatggaggtctgagaagagatattgaagccaagttatctcgctagtggtggcagtaagagctctgtattctgttttagcagaacttttggaaatagtaggttattttttggtcttccgtgagatgaggcaatctccgatgaatatgaagaaaccagttatggagcgtcgagtgattggaaaagaggcccaatctgaatcagaaaagcctcttaggtgcagagatgaacttagtgaatagaggagaccttgtcctggattgtctttgaggtaacgaagcaagtggttgaagagcctgtaagtgtgtattttgagggttagacacgaattggctgagacagtccactgcaaatgtgatgccaagccgtgacaatgtcaaatatagaagtttttcaatgagttgtcaataggtagacagattagttaaaggttctccttgctggtcatcgagcttggttcaaggatccatgggagttttagcaggtttgcatcctgcatagccgacatcttcgagaagttggacattatacttgcattgggagagaatgaggccatctttgcttctagcaatttcaaagcccaaaaagtaacgaagaggtccaagggccttgagcttgaacttttggagtaaagaagattggacatgttggagagcatcaaggtttggtccagtgagcacgatattgtcaacataaacaagtagtgaaatgaattgatcatccgagcctcatgtgaacaaattgtgatttgcctgagattgtttgaagccttcttaaattaaggcgt

SEQ ID NO: 45414 - DNA, 774 bp, Cannabis sativa
attttgctaaaatgccctcaaaacctaaaacctttatttatttatatggtttaatattatactacttttcattacagttggctctttactgcctttacttgaattctggtccttttaaagttaagtaggtcccaaaaccaaatccctcttctttatgtttttattaaaaacattattgtatatttgtactataattatataatctactttttcaatacatgttttgtttggttgtggtgtaaatgttggtcaaacctaaaatcccttcttcttagctaataattaagcttgacccacttattattattattttaattatcatccctatcatttttcctttgaagtttgggcttttatagctttttttttgtttatttattcatattgtataagaacctttattcatatgggttttgtattaaaatataagtggaaaaagcaatagtatttgttgtctacagaaacatgtatagacactaacactaataccattatttaagtatttcaaataaaaatgttttacttatttcaaaattaaggttaatatttttttaaaaaaaggatattaagtattttgggttttctataaagtattaacatttattaagttttatttaatatattactctattcatctttatattgtatttttagtgacttattctaatagaaaatacaatgtataaataatttcaatgattttatttattattactatgtgtttcattttcactattgtgtttatgtatatggatataaaactttgtgttttta

SEQ ID NO: 45415 - DNA, 1259 bp, Cannabis sativa
taattctaaatatcaaaatttgaaaatattttttaataaaaaaaataaactgaacaaatttattattaattgcaaaattttaggtggataaatttatatttaggtttaacttaccctttacctttacgtggcaacatttgttattttttttatttaaaaaaaatcacccaataattttttataaactaaaattcttattgtatagccacattttatatagaatagatataatttaataataaggaacaaaagaataatggcccgccccagcctaatttaactggatgtgcttaaataatagaaattttataaaatattttttttaactaaatcaagttttgttttttttttaagtgaattttcactagaacgagttgaaacgtattattaataagaatgttccaacttaaagttttgcatgcatgtgaaattacaccgtttgcgttttttaaaatataatgtatataaattttaggaaatttgttctgataaattttatttgttttatatgaaggtgactgcatggggaattttttaaagagaaaaaatacgtggcttttgaacttaaaacttaaaactattttggagtatatatcttagataggcggaaaattaaatttaatggtatctaattaaaagtcaaacgttttctttaagacaaagtcaaatgttacaaaaataaactttatattgttgtgttataaaagtagggtatttctaccgtaaggcttggtgtattgtacctgtgctataaggaagttattttaaccaatcttaagttaaaaaagaaaaggtgcacataacttttgttgaaaaaatctagaggattattttaaactttattatattgtttcattgattgagtgaccattggcacaggggtcatccaagtggacttgaatttggactttagccctctcttgataagtaataatgttattttattatttattcttatgcttttatcatttgtaaaatgagtaatttgcgacataaatacttaaatttaacttccaattataaataaatacttaagttcaatttttaatggtaataatacataattatatttttaaaacttctgtaggtacctaaccattaagtgtaaatgttaataatcacgtgacattctttgatttgtcaaactcataaatttatattatttatttaaaaattaatttaaatataccaataataaatgacataataacttgacatttaatggtcaggtaccaacagaattttaaaaatataactta

SEQ ID NO: 45416 - DNA, 1544 bp, Cannabis sativa
gtctaattccttccaccacctaattattatataattaatattattaattatatatgcaaagagagattagagaagatataaatttctatatatatatgtacatatagagatagtaggtaatttattcgttttcttttttattattattatttttaaataatttatgatgacaaaaataaaatttaaaatagtcagttccatatagtaaatcaattgtacgtattaaatgcttgataaaaattaaaaaccaacattaatctatttataccttgagatttcactaagttcctttttgtgcatgcattgcaataaattgaaatctaactttgcaagttgcaacaatactttgttatgtgaagcatctttttcatatattgaaatgaaatgccttgcatgaagattcactagggtctttcttaagggcctctctagggcttgggatatttctttcgataatggatcatcatcgggatgttcttttttattatttgccaaaaatttagttaggtgtgtggtagtgaaagatagggcttcatctagaacattttctccaacacagctcaaatgtgaggcctcgtataagctaagcaaactgatgatgtcactccccaaacattctttaaagtttccattctcatctttgaacttgtcaaatatatctgcatgcataagttcatactaattaaataattaagatcatttgaataatatacatagctataagtaataggataataaaatatataattaatcattaaataaaaatttaatgacgtaattggagcatattgaaaactggaagatcttacgttttcggtttttatataataattgaagagataggtaccttttctcttcggttaatatataaaaaccgaagagaaaaggtacctactacctatctcttcggttattacataataaccgaagacataggccccccttaagtctttggtattttagaacatacgtcatcgcctcaaataacttcggtagcgaatttttataaaaaccgaagaaaaactgacctaaaaactgaagagaaaaaggccctttttctagttgtgaactacttgcaagtcaccatctcgtgatgattatagacactattagtgcctaatagcaattctcttttgtaaaaataacttctagatataggtatcgagaactagatgctgatcgagtgtatcgaacaaggtatcgagggatctctcaaagatttttctgtaaaaaattatcaaaacgagattatagatatgtacttacctaaagaaaccctgtatccatgttgtcgtagaagtctaaaccgaatagaagcatcatgcaaagtttcatgtttgaaattattatcattattaatgcttattttgttgtaaatgtgttgaagctcattttgtatttcactctcaaaatgataggacaatcccaaacgttctaccacatcaattaacttcaatcgattattccaatcatcacataataattctccaaatatctcctttcttaccacttctttcaattcttcaacttggccttgtttataa

SEQ ID NO: 45417 - DNA, 2576 bp, Cannabis sativa
  modified_base (2528)..(2538): a, c, t, g, unknown or other
tttactgtattaaattttaaaaatataaaaaatacatttatatttttctaaggcatttttttttctttaacttatatcttcttcagttcacttccgctgcaaactaactcccattgtcgtcacagtcgctagctctccctcatcgctagctctgtcacgcacctttatttcaagtccctcccaacatccatctctcattcaagccgattccctcttgtttaaggggtttttttcttcaaagcttgtaaatttttacattattgttatttaaattacatgattataattagtttggatctaaatgttttttttttcttttttacaatgttattgattcatctatttttctcacaagtcttgtgttttttttttttttctttttcaagttcatttttgtatatttttaaagcttgtaagttattttcttaatttaaattacatgaatataatttagtttggatctaaatattttttccttatattttaactttttacatttgttatttaactaaaaaaaagtgtagtttttaattttaaaaggaatccttttttttttttttggattgtattgcattttcttttattttattttttttttggcttttttgttttccaactttgcaatccattggtttaaaattacttaagtaaaaaataaataggattgtgctataagcatctgtcactgctctgactctgaggcaattatgtcccttagtggtattctattagtttttttttttttttttcttagttaacttcaactttatcttcttttttctccataaataactaattttcaaatgttcttgtgagaaccttcataaattgctccctcaatctaaaaaataacttgtttcctctttattttgtgtttttttaggattcaatatggatccgttaactgatagaatgaaagtaaaaatgactttaactgatgaagaacaagcagtgttcgagtttgatgctggaggagttattgatgtttaatcagcctcgaatgatgattttccaaatccaattactaattaaattggattgaatgaggaaacaaatgttggattggatcggatgtccacccctacctttgcccatgttgcaaagtttaatactttaaaattattgcttgctattgcggccattaataattggtctttgtaccaacttgatattaacaacgccttcttcattgcaatttacatgaaactctctacatgtcactctctaagggatataaatctaaaggacatattcctacaaatgttgtacgtaaactaaacaaaagtttctatagcttgaaacaagcctctagacaatagtttaccaaactcagtgactagcttttatccactggttttactcaatctcttacatatcgcacattgtttattaaaaatcacaaaggcatttttcttgtcctttcaatatatgttgatgacattgtggttactgatcaaataatgatcttgttgttatttcatttaaacaataacttaattcaatttttcagcttaaggatctttttcctttacgttatttttcctaggcttggagattggtcgctttctctctagagtttctgtattccaatgaccattcacctttcaacttttgattgacatgggttatttaggagcttctactgcttctactccaatggaacccaacattcgactctcatctgatgttgaaaaaccattaaaaaaactccaaaatatgtcgcaccatcattggtaaactcatttacttaaccattactcgccttgatatttattttgctataaataaactaaattagtttttttttatctaattccggaattcctcatcttgctgcaactcataaagtattacaatatcttaaaggcacctctagccaagggctattttttcactcagcattttctattagcttatctgcttatgctgaaactaatatgtccaatacagactttcatcttaagattttttcagatgctgattgggcttgtaacttgaaggtccgtttctggctattgtatcttccttgccagaacattaatctcttgaaaatccaaaaaatagtccaccatctctcattcatccactgaagtattgggctatggccaatgccacatgtgagattacctggttgttagccctccttcgggactttggcatccaccataaaaatcgtgccattctttattatgacaatacaaccgccatccacattttcgagaatcttgtatttcatgaacgaacaaagcatattgaaattgactgtcatgttgttcgaaagaaggtacactgaaactaattcatgtcaccaccataaacaacatcggtgatatttttacaaagcctctatttcctatttatttccatacacttgtagctaagataaacttaagaaacttatatagttcatcttcaaaggaagtattagaacttatttaggcccaatatatctcaacccattttattattaggcctttacttttgtattatacatatacatcttattattatgggtaaataccattttnnnnnnnnnnntttacaaaagttaccaattggaccttctgttttgttaa

SEQ ID NO: 45418 - DNA, 1536 bp, Cannabis sativa
aggatttggatcaagcaaaaggtaccagtggtatttttagtcattatagcaaatttatttgtttttatgttggaaagatgcaagagtcaatgaggataaagtccaacatgaatttcagtacggtcgacaatgaaatcagtgaatttttcgaatggttcttcttcacaagagtttaaagacaccacttttctttgtgttgttgagctggaaggaatctttaatgatttttcttcttcttcttcttgattttgtgctattatttttttttttaaaaaagagacagtggttatatgtctgagactgacctcttgtgctattgttgcttgtcgttacatgtaaaagtgaacttttctattgcgaagaaactatttttaattcatctcctaactgagcctagactttccgtttgctaattggatttagtttgattgagaggagtttagacaatcattatgtcaaacacccttaccacccgatcagttgtggttgcgtactatcggtggaccattaagagaggatttatggtaaaacgatgtctgtcagaaagaaatcaaaactttgaatgatgataatttatacgagtatattattctttctcactctctgcttgtgagttgcctaaataatgtttatggtacaatagcagcttaatataactttttgtgaaaccacttctgcttaatcttcactcaggttattaccaacatcttccctaagcttttgagaggttcagaagaaaattctgctaaagtcaggtaagttctgttctgttttatcccctttatgggtggcatgctatgcttactctctgaccacatttttattatttttctatgatgattgatgaaagtggggcatttatatagattttagggatactaccaaaactagaatatatatatatatatttatgtatattttaactaaataccatttaaaattattgttcctaaaacgttaaagcatctctatttttcattttgaaactaggatctgcacctaaccgaaccctacaatatttgcatcccctctatttttaaaacaggaagtattattaccttattacttgttgtgtctttgtctttttggtcatagttttgtcatactgtatttacaaatgcaatgtaattattactacgaattactctttttactcattattgatgctatttttgaacgaaggacaaaagaaaagaggaaaccttaatctgttgagggatttggcttagagttcctctcgtaacactgttttccaaaataacctccctctttcctattccctttttcaaatacgatgggtgaaaaacatagaatattcttattgagctttgactggacctagtcaatatgaaaataatatgactcaagtccagttgacctcgactgttcttttcccattgcaaattttcacctttgagaaagtacagttctgagcttcaaatcaatattttttttttgaaaaagagagaggatccttttgtcattgacaggatccttcccgataaatattagaagcctcccttgtggtgggagaaa

SEQ ID NO: 45419 - DNA, 1077 bp, Cannabis sativa
aaaaaatatttatataaataaatttgcagttgcttttttcttttaatcagaaagaacaaaacactgtgaaaatactttatggtatgattttaaaattgtgtgaggaatttgaaattaacacctcaacattagatattttatttcatttttttagtatcttacacttttattttataatttaatttaaaatgggaaaatttaaattatacacccctatgtaaaaaattaatttaagttaattatgttttaataacaaattaatattgtcttttcttgagggaaaagaatattacaaatatggacccactataacaattccttaaagagccagcaataatctcatttcctttttaatttcttaatttttagaagttgtaattttttttcaatagtttttttgtttataaaaaaataatattcaatgttgatattgtagagcaaaattaatgagtataattttttaaaaaataatattaaatatgctcaaaagatttttagtttggccttgaaatttagtagatcaaaggaaaaaatatatttttaagtctttatttgaaaaatatggtatttttcaaaactaataaaaaatgtgtacttttaaaaaagaaatagttttttaaagtataagtacaaggctaacccacctataccaaaaatcgaccgtgagtcataataaacaaagtcataaaattgtttgctcgccgtatttttatcaaaaaaataaataagtctaataataaattaattgactcgtgtcatcttaaattatttataaattaaaataattagacaatttgttttctaaatatgaggtatttcaatattttcttctaaattataattatgttttaaaatgatatccatgccctaaaagtaaatttaaattgcaattagatattttgaaaatatcttggctaaatgatattttagatctcgtatttagcaaaagttaacgttaaattttttgaatcgttaaataaaaattttgacattttattttttaaaataaaacataataatatactaaactcaaaattgaacacaataatattctgagctgaaggtattatgaattga

SEQ ID NO: 45420 - DNA, 2325 bp, Cannabis sativa
ttcaattttgagtttgcttctgaaagttgagaatcgttggctagaaatggctttggttaacccatctgcaagttgatcaatggcagcaacatgtttcacatttagcattttgttcagcaccttctctctaacaaaatataggtcaagttctatatgctttgtcctagcatgtagaactggattctgtgtgagcattatagtgctaagattgtcacaccaaaccgtagggggctgaggaagttgaatgttaagctcagaaaacaagtagtgaagccaagtgagttcagctgtaacattagcaacactcctatactctgcctctgtactagacctggaaacggtctgttgctttttactcttccaagctattagattagtgccaagaaatatagcataacccgaagtcgatttcctgtcatctggatctgaagcccagtcagcatcacagaaagctgtgagatcataggattctggcttggtaaaatgaagtccatgactcattgtaccactaacatacctaagaatcctttttacagcttgccaatgagtggacaagggattttgcataaactggcatactttgtttacactgaaagatagctccggtcgtgtaattgtcaggtactgtaagcacctacaatggatctatacatctgaacatcatcaagaggctccccctcgtgagctgataagcgcaagccactggtcatcggagtaggagaagccttagatccaaacatctgagctttgactaacaagtcgcgggcatacttggtttgacaaagatgaagtccattctctgtgtaattcacctcaattcccaaaaagtatctaagaggaccaagatctttaagggaaaattgagtgttgagtgtagcaatcagactggtcacaaaagcctcatcactcccagttactaagatgtcatcaacatacacgagcacaagtgttgttgatttggaagattgatggataaacagtgagtgatcagaccttgaagagatgaaaccaagagaagctagactgtgttgtaacttatcaagccaagctctaggtgcttgtttaagtccatatagagccttgttcagtttgcacactaaatgctcttggccaggaatctcaaaacctggtggttgagtcatataaacttcctcttgtaaatcaccattcagaaatgcattgttgacatcaagttgtctcacagaccaacctttggaaagagcaagagttaatacaacccttatggtaactggcttaaccacagggctgaatgtttcagtgaagtcaaagcctgcttgttgatgaaacccctttgcaaccaacctagctttgtgcttgagaacactaccatcaggattttcctttcttttgtagacccatttgcaccctatggcttgtctcccttcaggtagctttactagaacccaagttttgtttcttgcaagagctagaatttcatcactcatagcattgttccaatgctcttgttgaagggcctcttttagtgatgacggctctctcaaagccatgagtgctttgggtttgaaaactcccaacttagatcgtgttatcattctgtgagcattgtttttaccaggggcattcaaacaaccagacagtaaaggtaaaactgctggtgaagaaaaagcaggagcaggtcttgtgtctggtaaaacagatgctctttgaggtggagagagcagtgatgtagctgtatctggtgtggcaaaaccagttccatgagaagataattcatgtgtcacagcagcaggttcaccaggagatgttgcagaaacctctgctgcatctggtgaagcaaatacaggtgcagaaacctctgcaacattattaccagttgcagcaccagtggaactcaatgatgcatctgcaatatcacctgggaaacaattgttagcagtatttgcatgaataataggatcaggtgcagtgttgtcaactacagcagtatggtcaatattagtaggaaaacctgggttatggacacttgtgtttaagcctggtggaagcaaatcagcactggtatagacaggtttcgagtgagggcagacaggtatgagtgcagaaacaagagaagagatttctgtggttttagtattagtatcttgactgaatttgagttcatatgggaaggaaaattcatcaaaaaccacatctctagaaatatacaacctgccctttgaatctaaacatttgtaacctttatggttaaggctataacccataaatgtacagggggcagacctaaactcaagcttatgcttgttgtaaggtctgatattaggatagcacttgcacccaaaggtt

SEQ ID NO: 45421 - DNA, 2566 bp, Cannabis sativa
taattctttgatctccgcaatctccaaaaacaatcaaattataattaaactggaaattaagaatacacatagaagaaaaagacaaaactaacccaacaaacacctttcaaaaaatctcaaaagattattaataatacaacacatcattattgaaataacaatctagcttaattattactctagctcatgatcactgcagctttgttccaacactgtcataaaaatactttcaaagtgtttgatgtgatgagtctgaagagagatatgtacacaaagatctcctttttgagtaggatcatcataaatacttgctcttccttcactaactgaaattccacaaatccccaatgccaaaccccaaccaaaatcacaatcattaactggaaaattagcccaactattaatcccaaaatttggtgacttacatctcattttaagctcaaggcgttttgtattaggattaacttttaaaaaatcaataatcttaagtaatcatcatctctactcatcaaactttcatgtacaagcccaactgcataccataatggctttgattgaagatcaccagccaaagcctcagccatagcttcaaaaactacattcccaaaatagccacgtggcagtggtggtcgcaatcttgaccgtccatcaacattgaaaaataatctagtctcttgatctttgggaagtgcacgtgctatgcatgcacatttccatataaggccagacataatacaaaatgtactaaagtacttattattattgttattaactaattctttagctttgtttttcaatttgttgagttgatccttggttacttttagaataaccactttgaagttttgttcgtcaacaatagatttaggttgattgggtagttggtattctttggtatgatcgaacattatttttggtggatttctaggattaagtaatgttcgatcaaaatatggtgtgattgtgttgggttggcctctaaaaatttcagaccatgacttgataatattgatagcagaatgcccatcaaatgcacgatgttctcctccaacacttagagaaattccaccacatccaaaataagttacctgtgtacgtacattttctcaactaattaaattagatgttttaaaaattcatataatattaaaagatgaatatagaaatttgggaatcaaaatcatatgtgggagaatcatgtgtaccaatatttttttattttttaaaattgaagttttataataattaactaattaactacattttatatataaaaattaatacatacctggaaggccattaaaggaaatgaagaaattccagcagagtaatgtgagggtggtggaattaagttagagatgattagtgaggagttggtaaaatctccaaggtcttcgatgtgggactttgtctcccccaccacaaacaaaacaccttcgtcgttgcatttaatctctaaccgctcttctcctccattctcggcccggctcaaccgccctgctaccggataatatagcacaagagtcttagcaagagcttccttgaggttgaggagatgatcatcaactgatgatgatgatgatgagttgttattgtagaaatagagtaatgtgctccttccctcattgtaaagttggtccaaattggataatggaatagtggaccatgatcttgaagggtctttctccgctggtctcactaagctactctcttttatcttcactttcatttcactcatcatcatcctcgatcacctcgatcatcatgtattaaaaccttttacatataatatttataggaaaattctttggaaccgacctcattcttattacactaattattataaaatattttatttttagttacaacaatatttgtgactaaaagtaaataattaagactaattataagatttttcttatattgtaattaaaaggtctgtgactaaaagtattagtcacaaaaatcataatttgttatgactaaatatgtttttagtcacaatacttgttgtgactaaatatttgtcatgactaaaattaaattaatgacaatttatatctaaatactctgttttagtcataataacttttttttgtcactaaaaattatatttaatcacaaaaaatttatgttgtcactaaaaatagttattttttctagtaaattaatttcacatgcattaatattgggggaatggaaataaacaactaaattagagtaatatcgattgtgatataaaaaaatgataaaatacaccttgtacatataattaaatatcgagtctcgcataatttaatttaatataactatcataacatatcattaactaattacaatgagtaacttttagttggtgttagaacatctctaatggtgacatttttaagagtgtcaaaaatctctacaaatacttaaaaatatattattttattttatctctctttcacatcgttttttgtatttttagttctaaaataatttaatggtaagcatctttaaaaattattaaaataatattatattattattaaataggggtttttctatttttacacttcaaaac

SEQ ID NO: 45422 - DNA, 2080 bp, Cannabis sativa
tagtattatagaggttcgaccccgtgatagtggtaatagcctactcccctttcagttatattactttgtgaggtaaagaataaagtattccctctcaaaagctcttataaggatttctgagcaaattactcttagatcgtgatttcactcttgagtgtcttttctttgattgatttgtgtccctgaatagtgagatgagaccactatttataggggctaattacatagtaatagttttctttaatctataagaaataaaataggaaactaccgtgtttctataattacaatgaagaaatgagaaaatctaggttgactatctttaaactttgaagatatgaattcatcccacaaaaatagggattatttcgcgacatgcaagcttaaagatgacatcgatcacctctgatatagccaactcacatctcctggtcgatgcatgcgagttgatcacgcgattgagctggtcggatgtccattaatgactttgttcgaacatcctgcattgtatatatgactttgatcttcacatcaatctttgtgggctgctaggggtaaaatcatcccactaggttatgaatgtaagacacgtgtcactcaatcaagtgccacgtcacaatgcaaaaattaggataacatttgtcccaaagtctgcacaggaccttcttggtcgcacgtggacttcattcgaccaagaaactgtctggatgggtgatgtgtgtctagttgttgaagttgatcccacatgacttgattgaggatctcttcaatgtctaaggcattaaatacctcttgaaagttatacctcgagttacgcactgacagtcgagtgataccacatgcatgtcgtgtgtactttcataatgagtacttaacgttcactttttggagggggatccccaaatttgaattttaaataaattaatttcctttttcaagtgcctataaaatgagatttaaaccttcaaggaatccttttagccattttatccttgaagaaccaaagcaaaattttcttcgtattttactctcaaatttttaaaggaaggttgctggaaaatctattgatgataccctctgagcatatcaaaaaagcttcgaacagtgagtaggttgcttttccctttactttatgcaatattcattgaatctatgtattactttttgaatttcttactacgaatttatttgttcttgaactgttcttgactgatcatagaatagatgaaattagggcttgtaaccttgactaacattcaattataacttctgattctgttattgtgtatcatttttaacttggaatcattcattttcacccatttttaagacttttagatatcttttaaggttttgaacttttgggtttgggaattctattcttcttgaacgaaatccctttttttatcttctttaatcttgcctggtcggcatattaaacttgttttacaactttccatccatctaactctcattttcttgtctcctatctttctatagatgaaccctgatgatttttggggatgcaaacaccatatcaaccaggacctactccaactcttatatgaagatcatcctcgactccatgcaagttcatcttcatccagtgacaatctgtcgaattctagctttaaagattaggaagtgagtagtgagcacataccgtctccggagcctgaggtataacatcattaatacccccgaccagatacgtggagaagggtacgcaaattttatctaggaattaaagaaatattggaggcattatctccatgcttcttggacgtacagggtttagcctggtgttactgacactctgcccgaagcatgcccaactctatttgctaagggagtcattattgctgagtgtgttgtaactgttgcaaggcatactactgaatcaaagtccccgcccaaatgtagaattatggtgcaaaaaaagcagacaatgaagaaagcttcaaaaacggatccacactttgctaggttattttctgcagctggtgtggagaaaactagaccttcaactgaagaaggaaaaattgttgatgaggactgtgaagtccaagaggtggaggac

SEQ ID NO: 45423 - DNA, 2589 bp, Cannabis sativa
cccgaaggtcctttggtagtctactagtggtcagaccaccatgctggcgaagatcgatgctgatcgtaggggccatagtccctcgatgcaatcggcttccatggctggccagcgttgaaggagtggaggggcacaaaacctaagaccactcaggtggtcttatatggtcggggttcctccacgaaatcgagctcacatacatgtgatttcaaacgtgcagggtcatgtttcaaaattaaaatccgagctcacatgtaatgtacattacatgggtatataatataaaattaaaattacattaaaaaaaatttatgccccataacgacttatattattttcttaaaaaaataacaacaaaacttacacatatttttatcatataattaatcacctctcatacattcacaataatataactatccattcacatacaaatcacatatatataaatatataaaacccacaaaatatttaatgtatatacattcatagaactgctcttgatactaatttttagttttatggtactaaatctggtacatagctgaagaattcgtatatctaattcttactgtaccataacccaagaatatccatatatataaacattaaaatcaaaacataatttacatgaaacaaatatatgtagacctgttgatgactatcattgtatcatcaaaaaattttgtaagttagatctaataattttcacaccgtaatcttccaaatcgatctactatacacaaggagtagcgtgtgctactaggataaagtatataactattcttgataaattctcaacacatgagcaacaattattttagagagaaattttttttttcttttcttcctatatttcaaaaattaaagtgtgaaaacctttttctaatttcttaaatcaagcttctatttatagtagttaattctcaattaattaaatcatatttaattatttaaataaatatctataaccgaattcggttactgatatttctgatgagggaatctttcaactaactttgaggaaatatctcaaccaacttgaaatatctttaactactttttaaatttaaatatttatcaattcgaattaattaaaaaattaattaacccaaaaagacaaaatagcgtaatatcttgagattaaaaaatagattagtaaccataattaaaatttattaagtataatgactaattacattattatataatgaattatgtgaaattatttgagaatttttatatttaaaccccatttatgggttaagagcatttttgttatgttgacccgagaaaggtaaaattataattttaatatatattgtgctaatggactatattattatatagcatgttcatattattttatttcaggtgacttttgataagttagcgtgatatagtcacaatcaaacattctggctcaaaccgagtttggaatccaaaattcataaactttgtgattagggcataatctgaattatataatatgtgaatatataagtgtagatatgattgactaaattgcctttaattgttctttatattgactttggcctaaagggtataatgatcatttgaccaaaaacgagataaatgaattatgtgtttcatttgtgaaaaaatgaaaaagaaaaatcatttatggtctagactctctcaaccgatctcctctctctctctctctctccctaattcaagctgttcattttgagttttgaagaaaaaatcgaaggaattttatggctttggtgttagaactttgaggtagtaatttaacttttgtcatgtttaattctatgttaattctcgaatttgattttttcaaggtatttagttgtttgttgatggttttgttatgatcttcttttgattttgagagtgttcacaagttcaaaagcaaagaaattatagattattgtttattgtgcttgaatctgagtttcaggtcagatccttagtgtgctattgttgctttcttggctgtttttgagaattttagttttgagctgagtattttgagcataaagttatcttgtgttcaatttgactttaaaaaacatgaatttttgtaacttgagctttgtgttttgtgtgtgagttcaagcatgttaattggggagtgggtaatgcttgaaaaatactttatttggcatgaaaatcaattattgtgttgtggtaggttttattgtgaagtggtgtatgttgaaaatctataaaactggtattttttgggttttaagccagttgtcgtgactagatatggggtcgttgcgacgaggctcaaacctagaactagggttggcccttgcctcaacctggtcgttgcgagcctaatcttgtcgcgacaataattgataattgatttaaacattttaacattacgtacaaacaccatagagccggtgagctcgtgtgttgggatatgaattggaaactcacagcttaccatgtcagagacgttgtcgtacttaatataagaatggattaaaatgtctttcatttattctttaaatatttactttgattaatattatcatttaatgtataagcggttctgaaattggtcagttatgtaatcctaaagga

SEQ ID NO: 45424 - DNA, 1510 bp, Cannabis sativa
taaattaagggtaattaaatttttggtggatttactaaattatgctaattgaattttttaataaatttgagattccttctgaattgatatcctatcaataaatattaagtacttatcaaattttgatagttaagaccaaacaaaacaatatatcgataaatcattaatactatgtcgataactaatcaataactgccaaagttgacaaaaataaatgtaaaaagaaggaaccatcgagaatctattgataaagtatcgataacctatcgataatcaaatttagctgaaaaacaccataaccaccctcatctttcacacaaatccaagaaacacagtgtattacgctataaacaatgattaatcaaacttaatcaactaaaaatattcttaaccaaatatttttttttacaaaaagaaaaatacaaaatctaatctttgagggtcaacccaagtttgcgggaatctgatggtgctttggcgtttagtgtctcctggatttcgtccttcaatggtctcaacagtatgggtctagggcaaggcgtctaggtcaattggggtctgggtcgactatggtctggatcgaatggggtttgggtcgagaggggtctaggtcgagacgagactgagtcgagaatggttgtagtcttgggggtcagacggtggtctcgggattcctcgtcgttcaaggttacaaagagaaaatgtagagaaaaagagaatcagagttagagtgagagggggaagttcaaatgtcgaggatatttttggtaaatcaaccaaatattagcataaggagcttatatttacactccagcaatttatacgtacatctctaatttaaatacacttcattttatttatttaaatattattttttataaacacacctctttttatttattaagttgggtttctcttaaaaaaattcaccccatataataaatgtccaacttacttcttttttaaatttatcttcttttttgttattttttcttctttatttttatttttttcaattaatcattactttttggggatgaaaatatgcatacttgcatgtattattattattaacaatcaatcaaaaaaaaattatgatcttaaaaaaaatgagaattgaatagtatgatgaagtaaatcttttatatatagaaatagataaatatatatatatatataaaaaaaatagagaatataaaatttaatgaaataattaaacatataatttttttatggttatattaaatgtgaaacctcaattgttttcctccatcaataatttttttaggacttggaagaaatacttaattttaattttataagcaaagggtgtaattattaaaaataaaaattgaaatagactcatcatttgaaattatatatttttgataattttgtaaaagataaaaatgtaattaagtattccatttaaaataaggtgtatttataatttattagggtacaaatataatttttcgattcttaataaaaaaaaaagtccaagaagaat

SEQ ID NO: 45425 - DNA, 1406 bp, Cannabis sativa
aaataaaattatcatttaatttatttattaattagatttttcatagtctcttaattaataaataaatcctaaaacttatttttcttcttaaaattgtccttgcttaataaaactcataaataagacataatcattatttagaatcctagctgattaaataaacaattaattaagtctacaagataatattatgtcaactagtgtggggaccatggactcatataatcaagctcccaacaagtagttttagaatttaacgattaaaactcggtgagtcttttatagcggtattcaacccttgattcatctctagtttttggtaagtgaatcatttgtccttggggaagtggtttaagagcagagagtttgactcagacacgcaaaaaatgactccaaccttcattagtagaatcttcaaagacttttatgaatttgacaattgtgttaccaagggcctcgaccaaggcggacttgcttacgaaaggcaaacggtaaatttggacacaaaatggggtgtagatcatatccttctttgtagcgatttgcaaaacatctagcgcgtataaaatgataagatgattttgaaagtgtcatggttctttggtaagaactcgacgtttatcaccctcacaaccaaaaacaatgtagaacaaattaaccttataattagtgattgtaacgggaaagtgccccttccaatgacccgacatttgttcataaaaactaggcttgtaaactggtcttttagaaaggacacgacccaacataacatgggcagattgtggaaatggcgaaggattagggaaatcaggaagtgcgattattgaactctcctcatcaataaaggaaagggtagaattcaaagtattcatgagtggttatattagaaactttgcaaagaaaaagcaagggatagaagagaaaacaaatgctgggctgtggtggagaaaaatcagggcaagaaggcttgaggaacatatgggcgggaacagttattaaaggaaaaaatttgaaaaattgaagaatagaggagaaagagaaaatgaagattgttggaaaaaatagttaaaatgaaaaacaacggctacataccctacacgagtactctaatttttaactttaaaaaataaattatgcatttatctttataaatatatatttatatatatatatataaatatgtgcgaatttgattgaatcagttactaaattaatatttgatccgcacaagtgtagattttagatttctcaattcaattcaatccacacaagtacaatatatgcattttacggattgggattggatcgtacaaatttaattaaattggatattttatgaacataattaattaatttaataaatgggaaaaaaacaggaatattctaaaaagggaaaaatattacaa

SEQ ID NO: 45426 - DNA, 1342 bp, Cannabis sativa
aattactaattggattggatcagatgaggaaaaaaatgttggattggatcggatgcccacccctactttaaatttactatcagctcagtagtttggaggattttacagctaaaaattggagcttggaaagttaaatgcaagtaaaacgatagttagatgggtttagccgccaaaaactctaaataaaactcgtaagtaatttgtagtgtaaatttagctctcagttgtagataaattaatgtccccgcttcaagcctcaattgggtcttctcccacagatttatggctcttatacataagtacgttactcttggatgcttcctgaattgacgactgaccctacagatcaatacgaatatttccagtgtgctttatcctcactcacacgcttccatccttactccaggtcaaacacgcttaactgtggagttctttcgtgatgggctactagaaaataagatgcacattgttgatataagtagtaccaatcaatctattaagttctcttcaactgtatagtctcatatctacacaatctaaaaatcatcacatttgaccttccctaggtaatgtgggattacacagcttacccagtattttttcttacggatgacgggactactgactatcacataaatacttaattttaatttttaacgttacttaagttatatttttggagttgtatctaagtcattatctacatatcattcttttattggtatatttaaataattttttttaaaaaaataaaaatataataacctagatcaaatagtattgtcacatgattattgacttaacacttaacaattaagtaactataaaaattctaaaaaaataataagtattattattataaaaaattaaatttgaatatttataccgcaaattattttaatattaaattattatttaacatacgtataaattattgctcataaaaaacaaaatattagagtaaatattacaattggatcccattagattaacctctgcttataactgtttatttaattagttcttcttttttttctttatcttttcttttctatatttttttttttttttgaaactagttctttaaaaaagaatagatcataaattcacaattaatacaatttaattttcaactttattacaagattctattgcttcaaaaatggtatctacaaggaattacaaagtaaaaaccactttttggacatatagtgaaaaaaataaacgacataaaagataagaagtttgtatattatttaatatttattgtggctgacaaaatataagtggaattatttatcaaccctatttttaacgcattaaatgattaagaaagagattt

SEQ ID NO: 45427 - DNA, 1497 bp, Cannabis sativa
  modified_base (1219)..(1257): a, c, t, g, unknown or other
agggccgagtctgagtcaagggtttgagtccgagccagggttggttctggctccggatctgagacgaggtctaggtctccaactccgaaccctttgtaaatattataatacaagctaatattaatcgtgtgttatgtattaataatacgatttatattatattaaaatttataattgtaataattaataaaatataaaatttcatctaaagataatgttcctcaatttaaaattcgcttaagggtttaaaatagttatgatgatatggaagatattttatttaattttaagtcattattaattagtgttttcggcaaatgagtatcaatttgtcataatattggtgtaccaaaaagctaatcacttgaaattttagctaataaagttggcaatagttggccaaaccaaaatctaataaattttaatcatatcccaaattttaataaagtgatttttggatgataattatctatttttttttttcaataccttgaataatttggtgtcctctaaccattataattttgacttgtaatctgagcacagattaagcctgtgactaagacatctaattctttaaaatcctagtttttctactatacaaaaaaagctcttaaaaaaaaccatcttatatacaaaattttagataataacaaattttgtattgggtatcatccatattatagggtcggtcatgcttgtatatcactgtttatccacatttgttattgtttacaattgtcatttgggttgtgctttggtaacgaatattttggattttgcttactataaaaagagaaaaagaataagatacactactgatcttgaaggctgctgctgccacactcaactgtgaaagatatcataggtacttagcttagctatacatgaaaacttgggtattactctactcttccatatatttcagtgtcacactcacgtggattccagttagaatgagctaaagggcattgaattgaactaaagctgtttttatttttattgacgaaataagatggggaaggatttaatcatgtgagaccaaaagttgttgtctctctatagaagccttgggactaaagcaaagctatacccaattaataatagtcattacccactacaccacaccgtacaacacaacatttttcaagtctcttgcctcttgcaatttgcatgagagtgagacctttcatcttacttataataataataataatannnnnnnnnnnnnnnnnnnnnnnnnnnnnnnnnnnnnnnataataataataataataagattagaatctaattatgattatctctattgctagtatcaactcattttgctataattgtcatctaaaaacttgagacccatttgccaaaccaattaaagttcataattaattaacaatgatgaagatgatgatttgaagtcatttagctagtgaacttaaaaaccgaaatgcgttgaagatcatttctttgcatttaaattaaagggataattagataag

SEQ ID NO: 45428 - DNA, 1419 bp, Cannabis sativa
ggccaatcctcgacagttccaagagaggacaatcattggggggtggggggcttgataagggccgcctcctcacccacatacaaaccattagaactttctactcttacctcaaccaagttcaatgatttctccaaatttctcacaatattctcgtcagtatctcctccttgtctcgccatcttctttttctggattgagctttgtgaccgagttctcattcttttcttcttttcattttttgaggatgtcgaaggatgtcccgcaccaactttaaaggatgaattggagtgcgatggggagaaaggttccatcacaggcaattcttttgtgaattcctttgaattttcttcagtacgggggatgtatggcattagatttagacttgcctttctcttaggggcttgagggcaaggatggatctcctctgtgacatctaatggatcatggtagagtgttaaagtaggatcataattatccacttggatcgggcccattagttcttctgcaagcccacttccctcagaaaagggaggccaagggaaatgggtatgctcaggaaacttatggggctgtcttgacttgcaaaattgttcatgaggcccatcaatcatctgtccataggtaggcccatttctagacataatagtagccaaaaccccattgtctctatccgttgggattggtctggaggagtgcttttttaaaatttcttcatcagtcaacaccactttttttccttcatttcgtttcctccaaatacccggggatgtggaacttgcacgccttgccttatttatcacttcctgactttttttgttggctgtatcagagcttgctgtgacctttggatccgagccatcaacattaatcaccttcaatctattacttttttctgcccctggtgaaatcccctgtactctgaccactttccttcttgaacctccaatggtttgagccctgttgtcgtggcctgaattgtcactttcccgccgtgattttcctttatccgccatctccggctgtttcatggtggctctcctagactgctggaaattcactccggcctcattgttgaaccaatctagttggtttctagtgttgaagcaactaataaccgccgtctccgctttcgtccatgggccaaatgccatgacagccttcccctcaggggggtacgcatagaccgtctctctccagcaactattcttgtcatggcctatccttccacaattgtagcagaatttgggcaatttgaaatagcggaattggatccactctttccttcctctcataatatccagatagaagcccggaataagttgttgcgtcgagtctatttcaacctggaatttgaaaaatcctcgtctggaaatggttcgctggtcccaggtatcgctattgatgaatgtcccaacttta

SEQ ID NO: 45429 - DNA, 1096 bp, Cannabis sativa
aaaaaaaaaaaaaagaagaagcttctatcttgcacactcggacagaactaccacaacaatatcagaacagctagaaaaaagactattaattcgagcaaggtgaagcagaaacattaaatctattaatattggagctgttatagtttttctaatgttatttttggattgttctactattgtttaatatgtttaacaaatattagtttcaaattacacaggttaaactaatcactaaatatttgtttgaggtaaccagaataaaagaattatagacaaaaatagtaccccattgaaagggcgaaatctgaaagaccgaaaaaaaagatggaagttgactgggaaaagaaacaacataacaaatgcagcaaaataggggagttgggacacaacaagaaaatatacaggaaaaagcatcaaaaatgaaaataaacagaacaactaaaaaacaataataaaacaacggaaaaaaaactaaacatatataggaacataggatactgaataaaaaacaaatattttaaagaaaaaaaaaataaaaactgttacaaaagtaacatgagccatcaaattaaaaattttcaagctttcacatatatataaacacacataaaaatttcatacttttatatatataaaatatgtgggctgttgaccaaaagtaaaaaaaaatagtatacaatattaaaaataagtaaaaatgtaattttttttttcttgcaacaataaaaataaaataaaatgaaaaaatagtatggaatgtaaattccccttattaaatatgtggtctgccaatttttttatcgcgattaagtagttgaaaaatatattttttttatatccattaatcaaaaatacattcatattatattttattaaaatatattcacttttatgagttggttgaccaatataacttcactctctacgtaagtttagcatataatttacattaacctaagaaatctaatgagaacatgatctataaaagtaagtttatcttaaagaatatgaaaatagaggtaaaaattaaaacaagtaaaataaagtgggcatacaatgtaatttccttaattttacctttgtaagcccaagtaga

SEQ ID NO: 45430 - DNA, 893 bp, Cannabis sativa
taggtccaatatgtgaaggcccaacccaaacccactaattattatattgtggaaactggaaacattttttttaaaatttatttttaagctttatggtatttttgacaagtgttactaaagatttgttgtatttgtgatactttgattatttattgataggctacacaacagaaacttgataaaccgcaccgcaccatttcttgcggtgcattttttatggctttttagttttgccgtgcaggtgcggtttggaaaattgaaaaaaccgcatgtgcgtgttggtttgaaaaaatagtcaaaaatttcatcatccgcaccgcaaacacccttaaaaaatgtagtgcttagtatttatggttggtagttattatgtttgagtttatggttggtagttatcattgatgtaccaaatattgttaggaacaaaagtccaatctcaaactttcctctattatgcataattgaatcactgattttcataaagaaaaataagatttttacctaattaattttactaccaaatgaatccaacaatttatctttaaacaaaaaatacttaaaaacaacatcctccacaatgcaaaatttaataaattgttaaacatgtcttctatttttatttagaattcttttacctaatgaatttactaccaaataaatccaactatttatctaaaaaaatacttaaaaataatatcctccacaatgtaaaatcaacttaaggaaaatttaataaatttttaaacaagtcttctatttttattgggaattcatttacatagtgaattcagttattttttttttaaaaaaaatatattaataaacaaactgatttcttttttaaaaaaaaaaaaaatacgagtcgggctcgacccggctcgattatctcgagt

SEQ ID NO: 45431 - DNA, 1245 bp, Cannabis sativa
tatctgatcaacacaaaatgtagataacaggtagatcagattctaaattatcggtatactgatttgttgtttccttttattaatatgacatattaatttgctttattttttaatttcctttttgagtttaattataaatgaacagtgcccccacttaccaaataaacctagggtttctaaacaaaagcatttactacaaatatatagattctagttagtaaatttatgttaaaatttggatttgtcagaaagatgggtggagcgaagaggaagaaaaaatactagttgaagctcatgcagaggtgggaaaccggtgggcggagattgcgaaacgcatttcggggagaacggagaatgcgatcaagaaccactggaatgctactaaaaggaggcaaaattcaaggaggaagaacactcataataataacaataatatgcagataagtactgaatcacacaaaagtaataacgataataataataacaaggctcaatcttcaatacttcaaaattacattaggggcaagagtctcatgctcatgctcaacaacaataataatggtattgagaatagtaatgctcctgaatcaacaacaactagtagtagcattactactactactacagctcatgatcattctggtgtggaatcttctttagtacttgcatctgatcagatttacgacgatgaagtgcttttcatgcagaatctctttagtgataaccccacaactactattgattattgttcatcaaacaaaaccaatagtggggaccatgataatcatcaacaaaagctcatgcataatagtagtactgctactccaagtactactcacctttactctgacctctacttatctcatctattgaatggagcaccgccggatacttctttgtcttcgatctttaatgttaatcgtgatgatgatttctatactcagatgagtaagatgaagatggtggacgatgctgaagatcatcgttcgtgtggtgacatggaaacctcttcgaatgacaagaaagagatggatttgatagagatggtcacttcttctgtcttcaccaaagattaattagctaataataaactttgaagaactatcccaagttctctctatttctctattatatttattccataacgttgttgtgtggggttttctgttatgcgtttctttggtttagttatgtaaagcattggactttcctgaacaattcaaacggtgtttttttttttttttt

SEQ ID NO: 45432 - DNA, 2842 bp, Cannabis sativa
  modified_base (26)..(51): a, c, t, g, unknown or other
ctctttctctcttcatcttcttcttnnnnnnnnnnnnnnnnnnnnnnnnnntttatattattttataacaattaacgaattattctaatactcaacccctcttcagcgttttgcttcaaggaagtgtttcctaaagctattctctctaaaaaaaaatcatattcaaagttttcatagattttaaaaaataaataataatttcaacgaactattttaataatgtttctaaaagaaaaaaaaaacttaaaaaaataaaatgataaatgtatatttgagttttgtttctaactagtatatattatatatataaaaaaattttaaaatatacttttggctcaaacaaaatttagaaaatgctaaaaagtactatcatcaaaagttatttaatttttctttaaaaaaatattttgttaagaaaaggcaactaattttttttttttgaaataaaatcataatctttattaattgcaatccatagtgattacatgattaaaatctggagtaacatcactactcctgataacacgatcagtaactaaataggatgctcgaactaagaagtgagcaacatatttacagaacgtctaataaaaaataaccaaattttaaattaaaagaaaactaaagagtagtctcaattttttgttttatattaatgttaccaaatgatgtacttagaaaaaatttatttaatatgagtttaaaaaacttataaaataatagatggtatcttaaatatataaaattacattttgaaaactattatatttattaattttactaataagctatataataaataattatactttattttatcttattattaaattctcgaatatgttttgaaagtaataatagtaaaagtaacataagagtatcttaaacaataaaacaatataatattacctaaaataatatttctgtaatgtaactaattttatgatgtttaaaatagaatttagtttttctataagtttttttgtttaaaaaattgcacgaactttttaaatactatcaaattattttaaatatgaactaataagatatttatagtaactcgctataaaattaataatatattaaattttatttgaatttaaaatataaaaaatgctaaaatattatttttaattatagttaattttctaatgtcgacaaaaaaatatatgttttacacattttaaaatatctcatcaatcaattgcatatgcaaccggctactgaatctagcatgtacctaggcctccctagcacgatgggaagaaacaagactgcagcaatgggttttctacttgataaagtgagaaaacggttacaagggtgggaaggaaaacttttatcaaaagctggaaaggaagttttagtgaaatcagtggcgcaggctctccctagttatgctatgagtgtttttcttcttcccatagagattacagagatataaagaagatgataacgagattttggtggcaatcttcggggaaatcaagtaaaggcatccattggctttcttgggatcggcttagcaagcacaaagacttagggggcatgggttttcgcaactttcgtgacttcaacctggcacttcttggtaaacaaggttggaggcttctaactcggtcaaactctttggtcgctcgggttttcaaggctcgatactatccaaacgggtcatatctttcggcggaattaggcaacaacccaagttttgtgtggcgaagtgtactagaagctcagtctttggtggatatgggggttcggtggtgtgtagggacgggtgagaatatttcagttttgggggagccttggttgcaagatcactcaaatccgtgtatcatctctgatcacccggcacttgtgaatgcaaaagtgtcgaatcttatgcatggagaaggtggaggttgggatttggagctgataaatgatttattcctggagagggataggggacttattcttgctataccaatcaacttgtcttcaacggaagaccatctcacttggcacaaagatgtatctggcagctacacggttcgaagtgcttacaacttgcttcaggaaagtcaaggacaatggcatagtactgaagattcatcgatctggaagagtttttggaagctcaaagttccaccgaaagccaaaaacacagtatggagagcggccatgaattgtcttcctaccactgttatgttgcgaactaaaaaggtagaggtaagtgctatctgtcctatctgtaatggtgaccaagagactattgttcatactttaattacttgtcaagtggttaaagaatgctggaatagggtgggcattgggacatcttatgtggatggggggagttttttggaatggtgtacaactatctttaagggactgagtgaggagaaaagatgcatgatagttatggtgtgttgggcgatgtggggagctcgtaatgagttagtgtggaataagaaggctgttttggttgataatattgtggcttctgcaaataaaaatctttatcaatggagaaatgctcagaactccttcttggagtcatcatggtccttgtttaaggaaggtgatggtgctgagtgctggtctgcacctagtattaatagtgtaaagatcaatgtggatgccgcgttatttggagatgaacaaggttttggtattggagttgtagcacgagacgacaaaggccttcttattgaaggtgtttgcaagcactttcaagggaaaatggagcccctcctagccgaagccttaggagtcaaggaagctcttagttggataaaactaagagattggcagcaagttctagtggagacggattgcatgggggttgttcaagccctca

SEQ ID NO: 45433 - DNA, 1753 bp, Cannabis sativa
tgaacaacgtgaaccacacatgaaaaaacaacaacacgaacatgaacaaccaaaacaacaacatgagcaacaacaacaacatgaacaacaacaacatgaacaacgacaacaacaacatgaacaacacgatcatgattatgatcatcgtctaatgatcaacaggatgatattcaatgaatatcttgatgatgatgctgaagctcgtcagatcatgttggatgatctattttttaactaccttcaagaatctcgaaatcgaagacgctagagagaattatgatatgcattatttgtacgtatttatgttttttttgcttagttttaaacattaacttagcttttctaaggtgatgaagtattaaaatcactttgaatcttctttagttgaacccattattattttcggtttaattagtttattctagtttaatgctaataatatatgaggaaatttcaatcatttaaattaaatctttgttttttgtttgtgaaatatgtttgcacatacctttttattgtagattaattaacgtaacggagaagactactcttcatatctgtgatgatatttatctaaactaaaaatttcaaacaaataaaaaggttttcttttttaattttgaataacacattattaaaaagttttttttaatctatctaattaattttgaataaacaaattaaaaagtttataaaaaaaagtcatattatatttttagctactacaaattaaaatcttactttttagttacaataaaatttgtgactaaaagtaaaaaaattgtgactgattataaatcttatttttagtcacaatagaattacaatttgttgagattaaatgtgtttttaatattttagtaattttttgttgtgactagtctaactttttattatgactaaaagtcacatttaatatttccattttattttatacatatatattttagtaatttttgaacatgcatttctttcatataaatttaagttaattttcattggctctttttttatataaaaaaaaaatgttggttcctttaacaatgcattggggacattttttaaatgtgatgatcattttttttaaatgtaaaataacagggtaggcccaccaaaatatctaacacttttacgtataatatgatattagataatgtttcaatagtagaagtattaaaaaaaaaaattatagtcattttttttttaatgtgtgtcattattattatattttatgttcattaaatattattttcttgttttttttttttacatatataaattaattatttgttaaaaatactattattttcttaaaaaaaaaaaaaaaaatatcatttacttctcggtttttctcctccctctctctttaaaaattcttaagttgtttatcaaagaacataaactataactaaaactaagagttttgattctttttttaaacgaaaaatagagggtgcattcaaaaaatttcaaatggcaaagtcaaaaaacaatataaattttttttgtgtgcatatcgctcttctcagatcatattcacaaaaaaaaaaatagtaaatatgaatgtttttgacaaataattattataaaataagaaaataaaataaaaatatagatataaaataaagtaatgagacatttattaaaaaaaaaaaatctctacataaagtcatttttaatacctctattaaagtattatcctataatagtttatataattgaataatatataattttttataatttttattaa

SEQ ID NO: 45434 - DNA, 1415 bp, Cannabis sativa
agtgtttgtatggcttgaagcaagcttcaagaccatggattgagaaattttaaagtgctttactttgaataaggatttcatcgttctacaatacaccactccttgttcataggacattctaaagaaaattttatcattcttcttgtctatgttgatgatgtgatacttgcgagcaacaacatagcagaattgaagcctatcaatgttcaattgaacaacaggttcaagcttaaagtcttgggaaaattaaagtacttccttggccacaaagggatttttatatctcaaaggccacatgtcctatagttgttagaagatcttggaaacttggggtgtaaatcagtcaacaatttaatagaagctaatctcaagcttagtcaagataaagtgtactatccctgaagcctaattatgaatgtttatggtttagtatacattatgggattaattaggattctgatcttgctaatctaatttagtgtaaattatgaatttttccataagtgggtaaataagtttaatttattagttacatagatttatttagaatatgtgggcataatgtgagttattggtggaataaaaatattttcaagttttgcaaccttagagactcaattagacgctaaaaatatcacgacgggtttagtaagtggttttaatgggattattgtggtaatttcattttagaactacgggatattttggaatactcgtgatcgaccaaataccctaaggtgagagatttcttagtagctaagaaacagtaaaataacctattataaactaattttactattattactattattactcgtattattataaatatatttattattataatctaattacatatatacattaagttttaaaaagaaaacataaaatctaaccctcccctttctccttctctctcgagcaagaaaccaagacaaacgaacctagtttttttattttccttgtctgaattcagctcctccatccctagtagcagccaaggaagtgatcttatcttgaagagggtaacttgaggtaaggtttaccccttttattttaaaaagctataggttttaaggggtgacttttgttcttttaatactgggagtttcctcagccttggtttttctttctagagtgtttgggactagttgtaatgctcattcgataggtttgttggttgtggggtgaaagagaatcaagtttgagtttcgcggtcaaagcttgagcttttaatggcatttttcatgttaaggtgtgactttgatttttgttacgtagagaatgttatattgatgccatagaaatgttctgtgaagtttggaaacaatgggttaggtttggagcaagttttggggcataagcttgaaatttttgagtccttactattatgaactggaattatggattgtaca

SEQ ID NO: 45435 - DNA, 1812 bp, Cannabis sativa
cctgtttctgcacttattattatatgtacattatcatcaaatatatatacatattataaaaagaaatcaataataataataataataataataacgtcttattactctatcatatctttgttcctttttcaggttagccaagcctccgcatagaagagatgtaccaagaactaggaggaggtttgaaatgatggaacccagaagtgagtacttcactacatctattttcttttgttgaagagcaaataatgctattattaactctgttgcattgccacatgttgcgttaagtaaccccccaactgcatatatattatatatgtcagcaataattaattaatgtattatacattaatgtaattaaatagtactttagacacgtacctgttggcccggtgaagtaagcaatttgtctgacattttttggaggagaaattttttgcaaattttcacgtgatcagtaattatctagttataataataataataaaaatgcaatataatatatttaagctgcttactcagtcaggaagctgactcgttcggcaagcggagtgagtccaagcaaactcaaagcgaaaatccatggctacgtacgtacgtgtggcacaataaggaagtaatttaataattattaaagataattatataaaaaaaaatatcagttaagaaatgattaattaattaattacttactctaccgaagtgataaaaatcggctgcgacagcaagaggaacggctgggaagagaacagcgagtttggttccaagaataacctcctgcaagtttgtgagaaaggctctaagcatttggaaccgaacgtgggacactaatatggggtctgatttctttcgcagtaaagacgacgacatgttttgcggcgaacgacaaccactcttccctcctaataatccgtaagattctcccttattattattattaccattaataatattttggtggtgatcgtcttcataactactcacaatgccattttccatgtcgtttaatgtactaccctgatcgtttctgccgtgatgattcatgatatgatatatgatcacaatatatatgtgcgataatacacgtatatatagtatagtagtagtaccaagatatatagaggccgttagttattataataatttggccaaagagacgttagaaaagtggaagttatataaggtggtttacatataaatatatagaacaattaataaggggatcgatagtacttcaaagtattgaggttaattaagagatatatatgtacgtgaggcagcttcgttgaattttcgtgggttttggtcccattattgcatgaaacttggagtttacacgtacttggttttcactgccactaacatgatttgcgtgttgctttgtgactgtgtgcaaagttggcaccataacgtttcctttttctttttggagggtcactgctcaatttatctaatatgcacaatatattaggttattttatatttgtcagtaaatataacatgcatatatataaatatattataacatactttttgtagcatattataaaataattaatataatacaaaataaaataatatggataaaaacatttcttaaattaaacataaattgatcattactgtttatcaagtttaattataattggacaaaaacacttgcctaataattataatgatatgcccatataaattatacacaattttgacatgtagcaaaatattttcccaaacatcttaattaaaacactacaagaaatattatttttgccagcatatttttgtgctggtaaaatagaatttatttct

SEQ ID NO: 45436 - DNA, 746 bp, Cannabis sativa
atatgaaacaataaaaagaaccataagaaaccttatcaagtaattctattgatgacatgaccaaataaagactactatgataaagttgttcattgaaagaaacagccaaaaaaaaaaagaagttatttttgtacataacaacttggttattcttccataataatataagaccatttttttgagagagagagttatatgggaataattttgggagcttgcatattaaagatcgaaactgaatgatgcaacatgttgcatgggacaactatatatatacttcacatccattttctttctttctttttctctttaagaaaaaaagaacttaggcaataattaatgttttgatgatacatagattttgtgagaaaataatatttttattccttaacctactatattttaaagttttactttttttttgagaagttcacaaagaaataaattacggtaaaatttttaaaatttttatctcgctagcaattaattttaaaaacttaaattttagcagttaaactccccaaaactcatgttttatttgtatttagtcatttccattaatattttagcagttagattgactgtccatgtgtatatagagtattgtcgacatagacacagtgtacacgtgatacaatttaatttgtctatgtaaataaatatttcaaaaaaaaaataaactttaaataaaaaaacgtataaaaatttgttcaaaattaaagatttaattaataaataaagaatta

SEQ ID NO: 45437 - DNA, 3160 bp, Cannabis sativa
gtaaaataaatttccaacatgatcaacttatatgttgggaactgtgtcagtactcaggttgatattaattagggagcatcaatgtaagcaccaagattcagcgaagtcgtttttaagtgttatccttcaacaagacaaaaaaaatatatcacaatcaccctaaaaaggtgaaccatgaagatgttgatgtcacctggatatcttggaattcaacctgggtccagtacaagtactaggcgcccaggttgacatgatgtgccctgagttgcatcattatcagtttcaaaccctaggacacatggacacatgagagacatgccccgaccaagtttcaaaccctagagacatgcttggaaaaaaccctacctgaaaacaccaggtgcacatgggtgcctaggttgacattctataatgactgcatacttattgtatgtaattagtagacaattaatattaattatttagattatatgattatgtgtgtgtatcatgtcatatgggagctatttttaagaaataggcatttgatttataatttatcaattctagagattttattgaattctaggtgtatcatagaggatatacatgaattttaatatttttatgattttatgcctaataacaatggaaatacgacgaatgatcgttaaagtcacatagatacaggtttgtatcaaatatttaacgggacaatattattagacattattaaatatcaaggtttagtggggtaatgaaattggatcatcttctccctagggttactagcttacttagtaagcaagtaagggcattttggtcatgggttaggaaacctagtcaccttaggcatgccatttgggctggtgattcactttgtgtgtgaggagagttttgaggtgtttatcgagatttttagaaacagaatatgaataataagaactaaagaataaataatcaaaagataaattgtaaaatgagacaaaccgtttttaacgtggttggggcgttaactagccttagtccacgagtcagtattattcaataagtctttttcttgtaaatgccttaggaaatacacagaatgtctgttctcaagtttgcctgagcaaagtttgtaagagagtttaacactaatccataggatttgtgagatatttatagtagtttgagaattacattgggttttccatttccctttattagggagtttagtaaataattctattgggctttctcatgaagtccagcccatagagaagacaatctactgactaggcagattgaatttggattgatctggttaacaccgcgtacactgattgtgggtaattaatcaagattaatttcataatatttgttatagaagtttcccctataatctagatacaatactctgatgtgatctgacaactgaaatttccttatttatgtgcatgattaaaaagggaaaccagaagggtcttttgggaacacattgcctcatctctccaatctcctggtactagagatgtctttcgagtacatattgttgaaggcaaaggtctttgcgactgcagaaccaagatacaatcttagaaagacatgtccaggtgggcttggcccactttatctttgtttagggtcccactggtgggtctatggtgctgacctagagtccacgtatctaatgctagaaatacggataacatttaccacccaagcctccagaatgttgcgtagggtggaagcttccatcactctcttaatttggacatgtggaaattaaggaatgaaattatggcactttgaatacttcttgaccgtgaaaggtggcttccgtttgtgatgatgatatgtccatgtgtcaatcgcgcgtgagttacaaggcacgaccatcaaggagttgctttttagaaacgactgtatttttttacagctattcatttttttgcacgaatatccagaaagaacattttcttcattgatctacgccttggttatggggaacattaattgtaaggatacacgcagattgttaggctccccgaccattggatgaagacttatgtctatggaagtggaatcgtgactgttcacatcttcttcacggggatcacttccagttaccacttttctttctttttcaagtttttcaacccttcaaagcttatagacttttttgcacttttcaaaactacaattcgaactcagggcaatgtctccttctctaatctggaaagcgccatagatttttgccttagtctgttgttgaggattagggcacgagagttcccatatcatcaactcccagtgatcaaaacttttacaataggagaaatcgcgagcctggatttcaacatagaagttgattcgtttatcgccttagcatctcatcttcgtgaaaggtaaaatcaacatcctgggccaaatctaacgacgattagcttaacctctccattatcaatatcaggtatgttgtttcttcatctatggattgtgttttctaaatttgttgctataaattgtatttgtatgctctattgggggatgcaattagggtttgttgtttgtgcaattgtaaacttaggtagatttaagcatcaccatccatattatttttcaaatttcttgttttaaagagttggtcgatttgtggcacaagtgctggcaaaattttcttctgtcgaaaatccttctagttttggggttgttactaatgtctgtcatctttctctctgcatcgttgctaacttcctttttggaatgagtaactaatggaagttcttgtttctaaatagttagtctagtcgggacctctccaagcagtttatgggggaggacctctagctccctttctatactaggtagttagggtggctaactgatttgattttcttctttttatactgaaactatgcctaagaaaacatgtcaagaggaagctaactcagaggaggacatatggagcgagaagacgctccaaaattgatcctgaacgataatccatgggagttagaccaacatgtcaacatgttcaggaattataacaatctgaggaagtatgagatcatatgaaggctcgaaagtgttctagggttgttctggaataggcttcccattctcagggagaggcctaacaagggcttggaaggaggcttcggtgtttggagcagggctcatattgagatgggggcac

SEQ ID NO: 45438 - DNA, 857 bp, Cannabis sativa
tttcttttttttttttcaattattctatttttaactttttcattaagtttgatatttacatttgtctatgagcatattatatgaactttaaaattttgttttagattacttacattaatttttatcaattttattaaaatttagattgattgaataattttttattgtgttagttatattattagtgatgaattttaataggttttaactatgtataaagtttagttgaaacagaaataacagaagtgtgatgtgagtttttttaactaactgaaacatttgatgataatgtttgataaaactttgtaaacagattgataatgttttcttttatcatattaatcggtctgttaactatattgctgatgccttagttgcttgggcccgttgtgccaaggtgaatgcgaagggtcgtcttcgggaggtagcccccgttgaggctactactatgttctaattttctttcgtaatatatcattcttaattattaaaaaaaaaattttaacatttaatgtagttaagtctcatccctaactttataaatatatattgttatcataattgtatattttttgatcattagataaataatattgtagtttcgatttagagatctaaaaagaaaatttatttgatagtattgcattaataaattgtaattattaagaattaattaaattcgtatatttaattattatctaatatttgtattttaaattatatacaaattaatatcttgggtatatttaattttttaacatttgtatccaacttatatttgcaaaattcatataattttaaattagagttgatttttagattatgaggtgaaattagtttatgttatgtgtaaaaaa

SEQ ID NO: 45439 - DNA, 1950 bp, Cannabis sativa
gattttatgtgtataaatatacacataaataatagtaattgttataataatactaattcaaatgaaaagatgcggcgaggtgaacaacttaccaacacttagcaatttttttttattaagatagacaatgaggataactcatatcaagcgagatacaaccttccaagtcaccaataaccgtctaaatgataaaaacaacgaacagttgggtagttattagatattatctcacatgtgattaaatgaaacataaagaaccttttgaagcatatcattttgtgatggtggagagcgattctgagatagttattaattatctaaaatgaatttctactgactggagaattaataactaagttgaccaatgtaatagactctttaatttatttatgggttgtaagttctctttaatttcaaggctctattattttgcgactcacaataatagagtgacattattctataccgggtgacattatttgtaatgaccgttaggtctaagtttatttatctattgaccgagtctttttcaaaagtaaactttccacttatttattattatgaaaaaaaaatattttgtttgatttgggccgatttagtattttcaattgggtaatttttttaaaatgtgaaataggtgtggttaggacatattttaaggggaagagtccaagctattggggctattgagtgtcgcgcactagtgcatgggcttggcgcacccctctttaaagttaaatcttccccatgatacgcccaaattgtattagtatgttgtatacctttctctatcaaatgatgttcacctgtgttcaaatcgtggaaatttcggttcaagcgaaccactcatggaaatctaatttgaccactctcatatattagtgtaaatcttggctctttcagtttcaacatactcgtcagataatctatccttcacactcatccaactcttgtcaaccaacatattctgttgagataaaagaaagaataaaataaaaagcaagtgtttcataatcatcttatagaaaaagtacttgtctttcaaaactgtgttctttcacacacactataagctatagttaaatgattacacaatgaagtgttgtgcaaaaaaattgaggaatcctaatatgtaatttgttttattatgggtatgcaaaggaaatagacatatatatttcatttttgagagagtgcatacgtgaaaggaagagtttccttaaaaaaatcaaaaaaagaaagaaagaaataggagtaatgatgtcaaaattgtttaggtctgcaattgtctaggtggaaattttagttgaggtgtcaagttttagtgtaaaaatatcagttcattaattttttttttctttaagcgtttatatattacacaatgtttaatttggaactcgaacacaggacctgcaacacacacgcaccttcttttttagaatggcttcttggggacaaggttgagagcagttttcttacagatagtaagagaatgaccagcaatctcgtccatgttgaaatcttggtccttcattccatcagccaatttccaatcaaagctgtataagagatttgcaagtccaacctctattattgtggttcccatgtgaattgcaggacacatccttcgccccgaaccaaatggcaacagctcgaactgttgacctttgaaatcaatggggctatccgaaaacctctcagggatgaactcttcaggatccttccagctgttggggtctcttccaattgcccaaacattcacttggagtagtgtttttggcataatctgatatccattgatggtgaagtgtgatatggtctctcttagaagcataggagatggagggtgcaatctaagagtttctttgactatcattttgaggtattgaagctgatcagtgtcagtttctgagacttttcctttgtttccaatgcaagttctaacttcat

SEQ ID NO: 45440 - DNA, 2700 bp, Cannabis sativa
  modified_base (51)..(59): a, c, t, g, unknown or other
gttttcgtgttttttttggaaaaccgtaaaaatgtaaaaaaacattctttnnnnnnnnnaatgtaaatattttacaaaaaattgtgccttatgtaattattctcttatattaattttcagtgactattaccattatttaacataatatttttaattaatgaaaaaacataatattcttaatcattatttatttatttaaaaaaaaatattaatttgatttactttaatattttcttatctttttctatattttaaatttatagctacaggaggttgtctttattaccttctttgggcataggtaaagcttggttgggttgtatattactattgcgattcaattttactactgtgattagtcttgtctctgtcatggttttgagtgttttagccttgtctcttttacatgatttttagtattttagtcttgtctgtgtgacatgattttgtgttgtttcattattggttcttcattattcttggatggctcgccattaaattactcttggtagctggaaataataagttcccttggactgaaagggttgttagtactacaattatacgtatcttgcacaatagctgagtgctcaattacctacaaggttgaatgaaccttcttcaacagttcttaatgatgtgtcttctgagtagtagataaaactaaatattaggtgtttttaagtttaattgtgatgctgcaatctttttaaatttattttatttttagtttttttgtcaaacatggaattaggcagatgattatttgacgtatttttctaattctaatctcgaacgtgtctccaacgagaaagatgtcttgattggaaatttctattaataaattgcatgatttattaaaaaaaacattatttatcacaatatacttaaatatttattatttgaaagatttttttttaaaaaatatattagtttaactattttttcttcaaactttaaaagtatattctatattaattttctctataaaaaattaaaagagtcttagtaaattactttttaaataaataaataatgtcatgcgtgttttcaaaggagggagacgtgtacttccaagacacaaatataattaacaaaggccatgtttacaagcccaatcaggataatggaccgaaatcaagaagtcatgtcatcaggatctggaaagacatctcgtcaaaacaaaagaagattccaacaaagagaacatccagataccttcaagctatgcttccgaaaaagtaattaataggcccccgaatattaaggctaattcatcgctcatttaatacctaattccacaacattaggacttggtttccaaagttaagtccaaaaatcatacattccacaaaaagaaagatagtgattgtcaattagtcattaaattgtctttattacacgtagagatgacacgtgttttctacctggcatcatcaagtagattccacacgtacagataactattgcctcatgggatgggcctcaccaaattgacctaatgtcaatatattacttttatttattccattagtgaaccatgtttacatggaaaccctagcctataaatataattgttgactcataaatctagattagacttctaagtcacacacgctcgctagatttgtgagaataagaaaattagtaaagtaattaatgagagacacaacaatttatagtagttcaacccctatatcacgatagtaatggggatgtgtctacttcaagtttttatttctcaagagatggtaattatagaaagtgtttaagtataaaaagcttcgaattctagagagagaaattctagaaagagaagctctgaccttttcggtagttttttgaatgtgataaatgagctaagggagctctccttatataggtgaaagaggcccacaaggagataaaatacaaataaagtattttctaccgttgatgatcatttgatggagaaaattagcttctggcggtgagggctaatttttgatgtctggcgggtctcgcttcgagttacccagatcttatttttgttacttccttggaggtaattttttgtaatgaatagattttagaattttgactagagtgcgatacttgacatgatagagggcttaaatagctttaaaacacaagtttaattgcgttaatcagatataaattgagtgagttatggctgttttactgaaggcagtccatgtcccagtgcctaggttgacatccagcgccaagcttgacattctagcatcgaggttgacatcaggttgacttctgacgtcaacctggatgctgtataagtgtaaaaacatctaagggaagtcctttgagatgcctaaatgatgatttgacaccccttagtccttttatatgttttggtgactctggtgacacattctcggagatgttgctgttttgcaaaaatagaagacttgaaacttcttacttccgaatgagtcaaaattgaagttgtgaattttaatgatctaacttcatggatcattgcactcataaaaaaatatatatagatgatcaaaacgacctcagatttgaacaagtagaacccagcgaacatggccatttgttgacttgggcgttggggccttttaagatagctacaaaaatgtcactagaaaaagtagtgagttaggcaaaatagcttagtgtaggttgttctcctcgacgagttgagtctagtggtgaaga

SEQ ID NO: 45441 - DNA, 2748 bp, Cannabis sativa
  modified_base (36)..(44): a, c, t, g, unknown or other
gccaaattgttttcaaaaaacaattttctgtttttnnnnnnnnnaaacagttttttagttatgatgtcaaacatgcactaagtgttccattttcatattccgtgacagggtggggatactttttctaactatttttacagttctgttgggaatcaccatcccttttgttgaaccagcccacatattataatattaccagactccttttgtaaataaaaaaatatactattgtgctagtatgcatatttaaagccatcaaaatcttcattctatgatagaagggcagttagcactcatttgttactttgaaccatttaataagaagcaccgagtgaaaagagaaagctgcattaagttttctcataacacttcacttttccttcatgaattttttcagtatctttagcaagaggaaagaatagaaacactaggaaaaaagaaaagagattgatgtatatacccgaaaaagacttgatgcccactcatcaacaacagcctgcataaagttattaattttgaatttcagaacagtcgaacttgatattaaaaagtaaatggagaaagataaaattaatgaaatagtgaaaccacagaagacattattagataatcttaattatttcctaacaaagaagtttgttagaacttgttttcccgaatgacaaggtcacatgaaactatagtacctgaagatctgtattgagttttcctgctctttttatcagtcctgcaaggtaacgcaatattaatatatctagggaaatagcagcttgtactccaggccgttgtactttgactgcaacaagctgtcccttttggcgaagcctagcttgataaacctaatatgggagagagatattcatgaatgtgacacgtcaagcttaggttgataagcacaattcttgatgttaatgatgctgcatttgcataatcaagaattgaaaaatggttttatgtaaacataaacctgccccagggatgctgcagccacaggctctggtgaaatctccgaaaaaatatcatctatctgtaagccaagctcttgctctattatggtgatagcatcttcagtagagaagggagatatttgatcttgcaacagtgaaagttcatccaaatacgacggtggaatcaaatcctacagtatttgagacattcataaatctcatttagttatgactgctgacgccgcaactaactctcttctccaaggtaaggcagagctaatcatagtacattgcagtgttgctttacttgttttcataaacttcgggcagtttagacaaaatttgcataaaagtccaacgtgtataagaatacatttggaacttcacagcaaaacgtagcccaggaaatgctactgagtttaattttctaaaattattaagaagctcaatagcatttcttaagctaaattatgtcattgtccttttactattttaaagcagtttttattttaaatttcaatcggttaataattgtaaattgaccagttgagcttatcacaacaatgtcacttagttaaaagtattgtacagcagatattaaatttaagaaatcctattattaatgttcactgatgcttaaattgactagcatgatataggggctcttaacaaaatataccacgtgtaaaattagatataccaattacaaaaatcatattaacacattctgtatacagtaatgtgtgtaaaatttgatacatgctaaaaagaaatgtaaaagagggctaccctactaatttctatgcaaaaaatgtaaagatcaaaagagattatatacatatattatatatattgtgttaatttgaatgataagaacttaagaatatgaaagataaaccgttaagcaaatagcttcctcaaacgaaacaagtacagtacaatcagaagcaatttagaaaacttacagctcgagaagagactgcctgagcaattttgatatacgcctatactcagcccaaaaaaaaaaaaatcaacgaaactcaagtcaggacaacactctaaaccaaactacttatatacacagatatttttacttttctgctcgaaaactaaaattctggaagctcaaattagtaaaacacaccgggccaagttctaccaagattttccgaagttctgcagctctaacctgaaaacgaaacaaaatcagaacatgttcaccattacaatatatatagtatatgtacaacaaacctcgaacatttgatcggagcgttccatgaggctatcaacatagcgaagagcgaaccacttgccgaaagtagtaccaatctggaacagtcggcgagcgacaatgaacggcctacgtttgaaaatgtcagtgattctggaaatatcgtaggcggccaaagaatcggcttccaatacgctaagctggaagaggtaaccggagttttccgtgaaggcgtcgacatctccggaagcagaggttaatcggagaaaggatcggaggcggcgggggcgagggaggtggaagagttgagaaggcggcgatgggaggcggagagagtggagtttggggaaattggcgggaaaggaagagagggaaagcgaagattggagaaggtgtgggtatggcattgggtgggttttggtacgaaaatgaattgagttttgggattatcaagtatgaagtatgaaccaagtgatttcttccaagtgtgtttttaacacaaaaataaaataaaaaagagagattttgtgaggctacgaagccactactggtttgggagcttaacgt

SEQ ID NO: 45442 - DNA, 1580 bp, Cannabis sativa
tattttataaatatacaaaaataacaaaaaattacaaaaatatagttgtacggaattttaaatatgtttacgatttttataattttttttttatagaaaatactatattttgatgtattttatgttgaaaacttattaattgttgttattttttatcatttatatgttattttgatgttgtttggatgtcatttttatggaataccgtaaaaatatttaaaaaaatctttaaacgtaaaacaaaaataatattttatgtaattatttattatatttttataacataattaattatgtataaatcatattaaagaaattcatatatataaatatataacaaaattagtacattctgaatttaaataaatcttcacaaatgtgcaaatcataattaataattcaatctcataatttcttaattaattaataatccaacatattaaatttagacggttattacatgatacattcacaaaatcaattacacaaccattttattaaccagttacacacataatgtgaatcaactcatttatgtaatcattcattttgagttttaatattttgaaacaatcatcaactggattgaatttagattaagtattgttttcgtaatgcatgtcttttcaaatatgatacaatgaacataaattatcactcaaatttaaagatgttgggattaaactatcacttaatctctgtccaagtcagcacaagttagttaaaacagttgatttagtaattccaattcagcaagagcctttgtacaactataaatacccccacaattctctcatttaattctcagctattagaaattcaaattatttttgagaatttatctaaaatcacggtgtgtgtggagagttataatgagaaatcactctcagtgctgcgagttctaattttaattgaggtcttttatttttactgtgttaaattgtaattcatggactcgattgtgtattattgatcattcaaatcaataaagacccattttgatccatctattttttgagctaagttcttcattatcattgatttaattctttgcttgcatttagttttgtctattctgtttttggttgagttcttgaaccctattagtggtgtaaaagtttttttctttatggtgatctaatcaccacaaaagaggtatcccataacaataatactaaatcaataatttattatagtggtagatagtaacaaccattttttttccttttagaaaaaccatcttttatgactctcacaaaaccataacaaagtcaaataagagtttcaagtggaatccacttaattaatgggtaaaaccctatacttagagaggtactactactaataataataaaataagtgtaatgctatatacatgcacacacttattaatacatattagtgatatataataaatattagtcataatattttttttaagtgagaccatattagttttaattatattgttgagattaattatatattattgtctgtaaaaagtatgtataatttgagtgtgtcttaattatttctcctaaaataataataattcaagaagagttttttacggctaaatt

SEQ ID NO: 45443 - DNA, 3030 bp, Cannabis sativa
ggccttaagtcactcatagtttcaggagaagacttcttaaggatcaaaacaatattcgtatcttttaaaaaattagggaattcaccaaacataaaaaaatgttgaactaaccataccacatccgttacgactacctcccaaagtttttggtagaaccctggattaagaccatctggccctgacgacttgttaggatgcatttggaacaccgcttttcgcacctcatctgcctccactggagctgtcaaccccacattctgatcctccgagacaacaccatcaacataggcattgacccttttccaattcagattagaagcactgaacaactcgcgaaagtaatcttccattacatcttttaagccattgtcccatccaacccaaaccccttctctattcttcaagcaaacaatgtgattattccattttcgagaagtagcacaagcatggaagtactttgtattcagattgcccgcttggagccataactgctttgaacgttgtcgccaaaacacttctttctgacttagtacctcatacaattgagtctgtgtctccttgtacttctttatagactccacatcccttctattctttagacttttcaacactttattgcacttattcagcctttctttgaagtttcctgttatatttttcccccattcggctagagctgtgctgcaacacttgattttttgctggaaggagtggccctcgatagttgcccaattatctttgacaatttggtggcacgttggctcccgagcccatgcattctcaaactgaaacctgggaggagcaatcaccaccggagtttgaacaagctgcaaacaagaggggactgtgatcagataccgaaacctccatgttaaaaagccttgcagtaggaaaaagatcattccaagcatgggacaccagtgccctatcaagtcgaatctccacccaattagtagtccctctaccacgttcccaagtatacggatggccaaacagagccatatcaataagtctacaatccgacaccacatcttgaaaccccttcaacaaagtgttcgggtagggtctccctcctcttttatcactttgattaaggacattattcaagtctccattgagacaccaaggaagcattgatcattgaactaactctcttatcaatctccacgtattacttctccgatttctactaggctccccataaaaccctgtcacacgaaccaccgtcaaaccattaagatttagctcaatatcaatgtgattttggctaaagctcaataatttcccatcattttcctgacgccacaacataattaacccaccactgtgcccccgagcctccacaataaagcttccttcaaactccaacatcttcttcaaaacctcaattttatcccttttacaaatagtctcacataagaaaataaggtggggtctctttcggaaagtaatttccttaaataattgcatcacccgcgggttcccaagcccccaacaatttcaacttaacaaactcataatgattggcgggacccaaaatgagtacccgccaaaaaaatgttttttttgaacaataccaacttgagatgtacctcctagtatctcgggaaccgtgctctttccaacctcttgtgacatagacttatcattttcaacaccaatatgttctttttccttttgtggtccactaacctcatccccacttacttccatatcattctggcccacattcttaccaatattctcctgacccatattactaccatcatctaaaggcccaccctcaactaccacgtgggtccttcttctcttattatcaattatcaccaaatcatcaagttgaccctcttccacattttcctccatctcagaattaaatgcatgtcccatattccttcccataatatcacccagcccaatatttgactttccaatggaattattatttacaattatatctccatgatttcctccattaccattagacaccaccttccctttaggtccatgattttctccttgagaatcttcttgatccgccggagatcttccccttgtctcctcaccggctgtcccatgctatccctaagccaccgtgcaccaatttgccgatttggtcgacgatccagaactttcatgaacataccatacggtttcacaattgtatccaggggttcatcaaacaatcgatggcagaacttttccgaatgtctgatcaagccacatatgaaacaaaacgatggcaccctctcgtacttgaagttagcccagaaccattcctccttactcttgtaaactcgcattcgtcttttgagtggcttttcaatgtttatcagtacccgcactcgataataatccctccaaattccattgaaattcttaggacacgatgacacatatgtcccaatataacctcctgctactttcagaactttatccgaccggaatcccacctctagatcatacacttgaacctagatctccatcgtgttaaaaggcatggctcacgtattatctccttcacgcactcgttgtataataaaaggtgaccgactaaatgtccactatgtcccctccaaaactctactgatgtcaacctcgtggaaaaattgaaacgaaaatctatttgtttctaattccttaacgtacatcccttacccggcctccacagtgatgccatcacattttttaaagaatcagaatcagcatgcatatcagttaacaatcttcccactagacaccaacgcgagtcaaagtcatcccccaaatcctcagattgatcgaaccatacacctgtatcttcttcatcttccaactgcaaatctgtccacctcctacccacatcctcgctgtcctgactactggatgccatcagaacaatctacaaaactttgatactcacaaactcacaaactcagttacagcaaacgacataaagaacatacatgtcagatgacaagacgatagatgtttttaattaaattttaatttccaatattttggttgctacacctgttggaaattatttta

SEQ ID NO: 45444 - DNA, 1070 bp, Cannabis sativa
ttcaaaaatgacctaataatattgttgctacttaaggcccaatatatcttaaagtctatctcccccattaatttctttactctatctttcaaagtacaccattaaaaccttcccattatttttattatacaactaatttttacattacactctacataagtttctttaaaataaattatcaaaacttaatttctttttaaaatataatataatttattcattttaaatatatataatatcaatatttacacacatattcaacgaaacctcaaaaaattaatattattgcataacaatacaatattaatagtaaattttaaagccctgattatgtaggatcgggtgtcaagggttttcacgtcatccattaccaagctttcgaggtgcctcttagagtaccctctctggatgtatctgagcattcctccagaaagttccaattacttcgtcttaggaaagtatgattcctcgatctgaatcaactttgtctcggaggtgtgtcctttgggcatcggatgggcttggactcgtcccccatgggtcagattatcctttcaataggactttttggtttgtgtcaaaccattacaggcttatcttggaagtgtcacacttcacccttgaattaacattgcttataagcacacattatatcttaaaccattcatggtttagtaataaaaactcaactatttttgtactattcttcctagtacttctaatgttataaccaacttacttttaataatatatattgactgaatttttagccaaccaatacaaagtcgtaataaatgagatttaaactaaaaaaatgaacaataaatgtaagtaatgacatcgaaatttaaagaggttcgaccatagatgtcagtaatagcctactccccttgtgtgtttattaattagagttgtaaaattaaaaacaaactctttgatgcgaaaaataacaattgcagagttcttttttctctaagtactccaattttttggatcccttttccaggtcatggctgactccttatacagagaaaaaagtcggtgcttctcgcttaaagagacgcgaccaa

SEQ ID NO: 45445 - DNA, 1434 bp, Cannabis sativa
tgagaagaagaaaccaagcaaccgcaaggaaactacaccagctaatgcagagcctgtttcttaacaacattggcccgaaaacaagtcagtagaaacgccaattaccgatttataggaagacttaatgctgaatgtttggaagattttgtcaagttgccaaaccttaattggaatgttttgtacataatatctctagttttcattggtatgttaacaaaagttggaatagttaaaaataaaaacagtaaaatgtgcacaatatgtactatgacaagatgattttattattaattttagttggatagtaaattattacacccaacttacaatttgaaataaaaaagcaacaaaatcttctaaaagaagaaaatcaaataataaatgagaagtaaatataacaatcattgaaacacaatcatcatcatcatcaattattgaaattaagaaagggttcttaattatctcttaattaatttgttactctgcatgatcttctaatttcacctttagttttatcagtgatgacctcaactcttcccaacttaaccatagcttgtccaaatttttgggcaaagttataggcattgccattagccaattgtgttacaacatttttggtttgtttatcaatggccaaatcttggtcaatctttagaactcctctcttcttcacaagttggttgaagaatgccttgtccacaaccatggaactccccggagtttggtccaagaaaaccgtgttggcggggtttggtttctgaggacactttgactttaaagatttgaccaacagtgagtccattgttgggtcagctttttttgtgccattgaaattgtatagacgatcttggaaaatagtgcaatgtgccactccaacagtatgaccacctatatagattattatagtattagaattttataattaaaattaaacgattttctaatgatgatattaattcaaaattaattggtaatgagtagattgtcacgttataattatagtatttctctaaattcagagatattttgaataaaaaaatatttatgtgattttttttaaagggaaagtattttattttatggtttttaaagtataaatttgtaaaaatataattttttctcaaaaaagttattttatagaaacgtttaaaaagaaaaaagaaaaaacagtatcaagtacttagttacccccttatggtaactggttacctttatttgatttccccatattttccaactttaattttaaacttcaaaatagtagttataacaggtcttgacattatttggaccttagaaaaaaaacaaaaaatttggacccttgttcaaagaaaatataataattttgaaaaataccaaaaaattatatacatttttgcaaatatacacatatatatatatttatagttatatatacataccaagaaggtaaac

SEQ ID NO: 45446 - DNA, 2420 bp, Cannabis sativa
atatatatgtgtgtgtgtgtgatcttagacaaattgtatctcatcttttacaaaatattctacaatacataactaatatgaaagtttttgaacacaaagagtacaactttctaaggataacaaaattacgtgaaaaactgatgaagcttattttgaagatacatacttaccacgattatagagaagataaagatgaaagtagatactgacttcttcatgtttgttgcttatttgaatggtatctccaatcagatcgttaatctataccttttatagacaaagttcagaataatagaatccaaccaaaaaatatattttgtttatttatttatttattgattattattttgaaagtctactatatattagtgacagatgattagacaacaacaaccattagtggaggagactacagactacagtattctccaactatatgcaactattatctacagtaaaaacatagctaataaatgagtctctattagtagattatgtgagatttgtgctcctaaaaaattggatacaaaataatgaaaaaaagtgggttaaagcttcttaaaagaataaaaaaaaaaaacataacgggtcttgtgatctaaatttaggttatgcaattatttaattgaattttgaaagattttatacaaagtacactaaattccttgcggttggtaccaaaactaacatatttaggcagcttctgctagttccgtaaattttattctttgcattatattttaatttttacagcaataatcgtggtaaatttttgctaaagttgctaatgattttcttctaactttttattggaaaatgtgtatatttgtatcactaataatgcatcgcactcctgtatgataagaaagagttgactttgtgatagttgacaatttttttttaaagatatatgacctttacccactaaaacatatcttaaataacagttgactttgttcttattttagattttaggcttgaattttttttttgcagcaagattttaggcttgaattgatgtataagtatatatttttttaagctcaaatcgtttatgggtagatataataatattttcacttataattatctcttatataatatagcttatcaaatttaaaatactatgataaaataatataaaatatataagaaaaaaataagaaaaaaaaaaaattgaatgaaaatttcttatttgtttattttaggtgaatccttatttaaaactaaatttatatatataataaacgaaaatacaaccaaatattaataatttatttagtaatttagagatgcataaataatattttattataaatacttagttatatatgttacgtgcatcgcacgtatgcaaattattttaaatgattattatgattttttacttattataatggactatattatatataatttaaattaataaataatactactttttaataattataaactttttaatataaagtataaagtaaaaacatacagtaatttgaaaaaataaagtccaaaaagaataatggtaacttttaatataatagttagtacctaaaggaaggtaattaggaaatgtaatttttaagtgataaaaaataaggtaaatttaattattttaatgtaatcaattaacttcatttattttagttaagtaataatggatgggtgtaaacaaatttcaacagtgatatgacatgtctatataaatcttggggatatgttggtgttatatagcaagttctaattttaaaagattgggaatctaacaggaaaaaatgattaatttaaaaaattaattaaatcagaatgatttaaaaaaattgagatgctcactttcataaaattaggatgctccatattgagggaaaagtactctacctattaatgatagttggattgagattttgacaatgactaagccttgttttgtattttcattttgctttagtttcagaccttttcttgtctgttggactttgttgattttctattttctttattaatgatatggtgcctaaggcactccactttcataaaataaaataaaaaaaaatgctttctcgataatgtacaatgcatgttctacttcatcatatgaaatcaaacaataaaagagacctagctaaaacctcactacttgtgttctattaagatgcaacacaaatgaaaatctccaccatctgcactatgtgaagaaaataaaatgattctatcacagcgtcaagcaatacattttggtcatctcctttttgggaatgcacattaacagtactaagaagaacgccaaggcacctgacaaaacataataagcaagaaagaataagatttacaattaaaaataagacaaatagatataaaatataccagtttatagactcgccaaccatccacatatagcatcagtaagaatatgaaattca

SEQ ID NO: 45447 - DNA, 1001 bp, Cannabis sativa
catccaatccgatccgatcacaattgaatatccaatgtttggcggtcagttgtgattaaatcggtcagttgtcattgaattggatcgatttatgcacacccctatatacttccaaatcgaatgaaattaagatatctgttcaattttatttagttaaactctacccaaatacacaccacatgattgcaaaataattaaattaaaattttgttttttggtaacattttaaaaaagttaaatcttagtagacacgttcatcaatttgattaataattgctgtaaatataaagtctatatatgaataatatactacttaatgattattttatttctacttctctgataattattattattattattattattattatttaaatatatttcattcctcttaccttttcaagaagcaacatatagattgtggacacatttataagtgtatctataaaatataaataaaaatgtgtactgtccagtgtttttgccattattttcaacatatttttagtctacatatacttccaaacaagtagtagtgtctgcttatttatttttaatttacaagttattctccttataattaaatataatcatacttaatctaaccatcaaagctggctatatagtactgaaatgacatctttccgcgttaattagtaatattttgacattaattccatccttgtttcagccattaaagttagagccgcgtgttcatcttccacacatctctatcattatctttcgatctatatataatacttcaaattattttctctagatgtttcttaaaaatatatgtatgaatttcgttaatatatacatacatatatattatactaagttgatgttagatatatataattaattttttaattagttttaataaagtaatattaagtgaaatatatatacttaatttttttttaattagataatattttttttttaatttttgaaatggatcgagtttaagattttgatctttaagaaatttt

SEQ ID NO: 45448 - DNA, 3935 bp, Cannabis sativa
  modified_base (3887)..(3908): a, c, t, g, unknown or other
atatgagacttgtattatttgatttttgtatcatgtgttatggaatgcattttagaattatatcaacacttctttaagtaggtaaaatgttggaagaataatttataatggtgactcttgagtgctatttgtatagtacttttttaaattcactaaaagaaaagtctagtagatatatatgaattaagatttataaaatttcttcccattaattaagatcatgaagtaagattgattgatcaggaatggaatactaaattttggagaaagttttatagaatgaagggttgatcatatgatatatatacatttccatctcaaaattataattggtcatgagtgaattaggtacttgttgagattgtctttctatcttaaatgtatgatttttgataggtcttaacttttccagttgttgggcttcaatacaaggtaagagtagacaaattaagttgtataagggttagagagagaatgagaaggaaatataacatagtagtggagtgagggattttgtaaatggagtttaatctcaaaattaatttatgtaatatatatatatatatggtcttataaatgagcttgtatatatcctcatatcgatttgatgatgtggatactctaatatatatggtattagaaatatgaaattaataagtggagtatatctttgtatttgttctttatttatttttttcttcagagtactatatatatattcttgatgtataatatatgagatattctaattttttttattatttattgttgcatgatcatatttgttaagctaatcatgatttaaattaattcattaaaaatatttacaaaacaaataaactaaattataattgatttaattaaattttgtagaaaaaatggacagctccaatcataatcgacgaagttcttgaatacattccagagatagagaaagagattaaacaacttactctcaaaaaggaagatatgttatcaaccattgacaacatgcaatcatttatcaacaaaaataatatgaataatcaatattcagaagttgactttttcactatttcagttaatgaagttaagaagaatcttgagttcatcttacaaattatatgcatgcaaagagatcatggaatgagtttgctctcaggtttattacaaagtatggaatatgaaggcttattccttattagtgcttcgactcttcatatttgtgatgagagagtgtgctacaatattcatcttcaggtatttgcctttttttttcttgtggtatataatagtatatatatataggttacctacacacatataagtatcatatttatcttcaattatcatttagaatggttaaattatttgctaaacagcacgaatagtatccaacgtagaacatgagttgttaaatcattattgcataatttaatattaaattttatatattttaattaagtaatattaaaattacttattatttataaaagtgctgatatctaactataatattaaatgttgagagaagtgaggcatattcctgctgtagaccagattgttgattgccttaccaaagccatatccaattcaaagtttcctactttgaggtccaaacccagcattgaaagctcctccaatctgagtttgagaggggatgttgagagaaagttagttaaggagcctttagcctataatgttagagtagttagtaactaattttagttagttatatttataacagaaattagtcgaattctgtgaggttgttggtttggtttcatgtacactaactcactctatttataggctttgtactcttctctttcaataatatatagaatattttttattcttgaatcttgacattaaacacattattaaggtatcaaataataatgcactttataataatcgtgtatggaaaaatactacaaggtgataattagatgattgataatgtgtgtaaagtatagacatgcatatatatatgcatgaacattgtttttaagttaataaatttatcagtttaaataagatatcaaacattgatattaggatatgacttgtgagtgtaaatgtatattggtttttgaacctaaatatataaattaaaaaataaaaactttaactactcattagttgttgttgtacaaatattttaagtgttaagaaattcataaagatcataacattttgataaagactttggatttgtaggctcaatgcagtgatgttgttggcaatagtcaactttgtgatgttcatagtgtttatggtaacactataacaatagtagaattattttagttttgtgtaattttatgtgaatattttactccattaataatgtctcatctttattgtttttgttcagtagaaatagtattaaaaaaatatgttcaatatttaacaattaattataggtgaagatctttctccacaatcttttacctacaaataaaaattatttgtttatttgtaggtaaagacttttagttacatttaaatgatttttatctacacttatgttttgtaggtaaagaccttattttcttgtagtgtaagaatatatatgaaatgttcatttatcaaaattagttctaaaataaaatcacggatcaagaattttctaactctcaaaggcattttttgatctaaactggtctaaccaatggtgagccctatcatatttacacaaataaaataaaaaaaaataataatagaaagcctttcaaaaaaaaaaaaaatttgattacccaaactattaatattcaatcaaatataatctagatagttaggtacctaatccgtatgatgtttttataatcaattcaaatattacaaaattttaattgataggaaaataagtagataattaatttgtattggtttgtacctatttcttttcaagaaaaaattaaaatacatgctctagttaatgcactggatagctgattaatattaacaactacaatttgtttttagcttacagtgtttgacaataaagtttgcatactcataataatttgaactttgtttctacatctttagatgctcatacaagcctttttgaaatttaaaaattaactattgatcatccaaaagcatgtgaatctacatccttaatatgtagtaataaactttttaactctcaaactaattgaggtttatgctaattaatatctattattttatacagatgaagaatgaatcttcaaattcaattatgaaagaagaagattgctctttaatgttaaaggaaaaggtggttacttggttaagtaagtcaattaattaaacttcgtttgtttatcgccatgaataatcaactttaacaaaaagctattttttgaaagaaaaaaaaaatcttataaattaatttgtgcatatatattatttagtatgtattgcacacatatatataatttattataatatgatttaatcttatcttagtgtaattttttgtttttgtttttgtaatgaactgggagaataataatactgtataaatttaggctacatagtacacagttaaaatcagtatgtcttgaatttgtgatgacataaaacttttgaaattgtataaatatgtagcagtatatgcttaattactttttaattgtaatgtttttttaatcatgttgtatcatgctggatattataattaaagtaattaatgttccattagagtaaatattttttagtaggtaattaatgtttgaaatatttaatatttgttaaattatttagtacagtgtaatgcattcatacaaatagaatatgaagtgttttttattttgagagaactagaatataatatattaataatagtaaaatttatttttttcacaagaatctatcgatccatatggttaaggtgccatttggtaacacttttnnnnnnnnnnnnnnnnnnnnnnaaatgaaagtaaaatttttgttttcaa

SEQ ID NO: 45449 - DNA, 1018 bp, Cannabis sativa
ttgtcatatagtgatcaatcacaacaatcaatatatctaatgaactatctcatataattctattgttggttcggttcagatagatgcaataagagctttgtactatgtctttatcataaatatgtgttcctttttatttatgttaaactttatgaatttttcattgaaaaattcaatcacctcattctcttcttttttcgacattaattaattttggagataattttgtatataagaccttctctttgaacaattctactagtcctccaaaccaagaaaatttaaacaagttagaataattgtaagttggtaacgctttgtttttgtttcattttctaataaagaatttaagttcttatttgcctatgttcaattatagtacattaagccaagaaatactccattgagacatgaatcatataatagattcttttattttgattgtttattcgataggcttattaagaactattatgaggaaggtactagtgatgatattgatactatttctataatccattaattttacttgctaggttgataatgatatacctattagaattatatattacttatctaaacattcatccttcatcacatgaaggaaacgaacgagtttgtgtatttgtgttagcagtggatagataatgtatttaaaagaatgtaagaatatgtgaaaggtacatgaaaaaaaaaatacaatttgtaatcaaaattaaaaacttccatattaattgaagattttttttttttgtactgtgatcttaattgatatgattttttttttttatcaaagaagataccaaaaatatatatatatatatatatattaaattggggaaaaaatgaattaattagagtaaagaggtaatgagatgggaataaaaaaataattgtcaaataataaattacctctacctcatcaagtaacccttccactagttttaaaaaataaatttgagttttttaaaatattaattaatacaattaatgtgaatcattagatttaatctaatgg

SEQ ID NO: 45450 - DNA, 6360 bp, Cannabis sativa
  modified_base (5742)..(5749): a, c, t, g, unknown or other
aaaccattgtttagcataccattattgagttttgatagagtgcttaatgtatgagtatggatactgtgtttataataggaaaaaaatccttaatggtcgaagtcgttaaagataaataacggtataagtatttaaattttaaattagtaagcaatataaatttaatttttatttttagcagtataattactaaatatttgtaaaactgtaattttcttccagtttcattagtatcgatttcgttttgactcaatgatttaaaatttgggcctcatatatatcatgtttaaaataataaagtttgtactggcgaaattaaaaaaattataattttacaaatattagatacgttaaaaatggtttgagtttatgattattttggacaaaagtaagcatatataagcaaggacgcgcacacgtatgggaactcaattagttctaaaactcatctattttaaaaagcttatcctctaacctaacttggaaataataactataataagcccaaactttttaaatttgtactagtctttcaatgacaagtattatattataacttaacatattattaacacattggactaatgaaacctcctactttttcacatcttctacaagacaaattaactcaaagtccaacccaaaattcactatttgaaattttgaacacaaaaaactcttcttagctattaactcaatggacccttttctccaaattgtcgtatcttgccttcttcctttgcttcttattttcatatgttaccaccttaaaaaatcatcatcatccactaattcagggccaattttggcgcctgaggcagccggggcatggccaatcataggccaccttcatctctttggaggcaaaaacctcactcacaaaacactaggagccatggcagacaaagatggtccaatcttcaccataaagcttggttcacacaaagttgtagttgtcaataatggtgaaattgccaaagactgtttcactactcatgacatggctttctcaacaagaccaaccatagtagcatccaagttgctaggctataactatgccatgtttggttttgctccttatggtgcttattggagagaaatgagaaaaatagcaactgttgaactcttgtcaaacaaaaggctagacttgcttaaacacatatggtcttcagaagtggacacttgggcaagtgagctttacaacaagttgtgtttggaaaagggtagtgaaaaaaacagagttttggttgatatgaaaagatggtttggtgatttaacaggtaatatatctgtgagaatgattggtgggaagaggtgttttggtgagaataatagtactaagtctggttttggtgaagaggaaagtattagatgtagaaatgttatgagggattttgcttatttgtttggtgtgtttgttttggctgatgctataccatttttggggtggtgggatattaatggttataaaaaagctatgaagaaaactgctagtgaattggatgtattgattgctggttggcttgaagaacataaacagaagagaaaattgtttggtgagaaaggaaataatgaataataacaataataatagtaatgaagagaaggatttcatggatgtgatgctcaatattttggatggagctaatgttgatggtgttgatgctgataccattaataaagctacttgtctggtaagaaagaactaaaatctctttctatttttatccataaataccatgctaatttatttgtcatgtaaatttttcctcatcataatttatcatgctagactagattaaaccctttatgatggctaaagcctcaaactaaatagggtgtagttcaaaattcttcaaaataattaaaaatgtgaaaactattgtttgttttgttcaatcaaatctttgaagagatcatatcttgcagtagtaaaactacttaatgtttttttataatccaaaaccaaaaccaagaattattgacttttttagtcagtgatgactctattaacctatgtaaatagaattatttattaaaaaatattttcacatcgtcataaaataatgtaaactttgatagtctcaatccaatgatgacatcattgataacaaaaccaagcttacaaacaaaaccagacctatttatttatcatgctagatcaaacttataatctttttattaaaaaaaactctttaatcttttcgtaagtgtgaaatttaattgggtgttagggtgcatttttttaacgtgtacattaatacattccgtttatatatttttgatacataaatagttgtaatctaatgtatattgcaaagttttagaaaattcaaagtaatttataatttaaaaagtaaagttgaaataatttatttcacacatataatataaaaaaatatgagtacaacaattttttgaaagtttacatattatctttaataaatacgttaccaactgttataaaatataaattaaaattaaaactatttagatgttgaaaatgtaaaatggtacactacactcttttcaaaacaacgtcaccatacgtatattcttctcttaaccaaatcttggcaaagatcacacaaagaatattaaaattattttaatctcaggcgggaattaatttattttttaagttattgactccattaactagtatgaatatagtttagtgaatattttcttaaaaaaatatagattcacataattccaaatccaaaatacaatatataatgcctgaatccatgacatcagtcaccaacaaaacacaaaactagatagaataatatatgaactagacctaatacattggataagatcatacacatatactaaatgatatgggacacaaaaaattacaatctaccttcttatataaaaacgaaactttaatcaatcacaatttttttaattaaaaatataaaagggcaatggtatccattttaaaatcttttttataatttctctctcctctcttaccacataatatagggtaccccaaaatataatataacccattattttttgggcaactatacagacaacacctattgagttcacaaacttttttaattaaaaatataaaaggacaatggtgtccattttgaaatctttttataacttctctttctcttttatcacataatatataatataacccactatattttttgggtaattatatgggcaacacctattggagttgacctgagagcatctccaatagaagacaatagttatagttatcaaaattcacacattatcttaaatattattttttttattttctctcacatccacataagatttatcttgatctcttaaaaaaatattccaataattgacaactctaaaaattacctaccatatcccacatcacattgaattaataactttttaggtaaaaataactttttttctaataaaaaaaaatgtcatgtggtcattctatattgagcaaacacttgacataaaattactcttgaaaattggatcacattgcatatgtagcaagaccattctaatagagattctccattggagttgacctaacaatcaaatagttaagatatgaaaaatgcttaaaagcactgtctaccaccctcctaaatgtcatatggttattagtgtaattaagtattgagtctcatataatttgaagaaatagcttttagggaatatcgataaccaatcaaaaaaaacgacacttattgaaagtgctaggcatagtgtccaataacaatgctcttaagtcttaactatctttaacaaggaaatacattgagaatcacaataatttatggagttcaaaataagagatctttttttacaatatatataaatataatcataaatggctccatatgaaattttgaggccaacatagaactaattttcattttttttttctttcgtagaaccttatgttagctggaagtgacacaaccatgatagcactaacatgggccttatctctacttctcaacaacccaaacaaactccaaaaagtccaattagaattggaccaaatagtgggccgagagagaaacgttgaagaatcagacattcaaaacctcatctatctccaggccataatcaaagaaaccataaggctttacccaccaagcccactactactaagagccacaaaggaagactgcaccctcacgtgcggctaccacgtgcgcaaggggacacgtctgatggtgaacacgtggaaaatccaacgggaggagcgagtgtggggccataactcggaggagttcgagccagaacgattcttgacgagtcacaaggaagtggatttgagaggtaaattagggtttgagattgtgtcgtttggtgggggaagaaggtcttgccctggagtgtcgttggctcttcgtatggtccatttgggtttggctaggtttttgcatgggtttgaagttagtaagaaattggataatgaagaggttgatatgactgagactactgggttgactaatttgagagctactccacttgaggtttttcttacacctcgtcttcattccaaactttatgaataatatgtatgattatgtgtgtgtgtaatgttttaatatttttaatgtttgatcacattgtattttctaatattgcaccatatgataataatctagtgacttgtgagtattatatataaccttaaattattagctgtgaatatatgatctaaaatctattgagtaaatgatgagtggatcaaatctcttgttttcatgatacttgtcaaaacttaaaaaatgagttttttgaaaaaacaaaaataaaattcaaataagtttttaaattgatttctagtaaattaattttggggggttttattttatggacaaatattaaaagattatcttgaaaaaaaaaaagagttaagactcttgagatgagagtaaggatgcatgcacacaaagtggagaattagccgtgagtgctccttctgttttcatttctattaacgattttaattctcatcctcgcttattcttcatcacggatggggcgaggaatccactgatgaggacggagatgagacaggaaattccctaatagaaaaataaagtttattataataaaatttttaatataatatacaaaaatattaaactatataaaaattaaaatatttcacattaattattattcaataaattaattattatccaaaacacaacttaaaattcataaaaaagatactgatatactaaaaaaatacaaacataaattataaattataaaatattactaaaaatttaagataaaaaacgggtcactgtcggggcagagagtgtgatccccgttctctctccgtttaacatttggagacaaaaagtaatctccgttcccgctcattccccatttagatggggaatctccgccccattaggggcaggtccctgcagggcccatccccgtgggacaaatgttcataaaatagttgatccaatcaaatccgcacgatccaatccaatcaaatccgcaaagtgtagatattcgcacttggcggattagatgttgattgacatgtaaaagtaaccgatacaatccaatccacacatatttataaaaaaattaaaaaaattatatatacaaataaaattttaatgtaaagaaaataataatttaaaagtctaatacatataatacaattatattgcaaaacttaataaatcaaatgtatattctattcttatatttttttttctacatacaatnnnnnnnnaaattaaatattttttatacatataatttttttcttcctttgaatttataatttgttattttatttattttaatgtggtattggaaacataaaataactataatttgttttattttgttggtagttatgtgaaaaaaaaatatttttaataaaaaaataatcctttctaaaaagcaaataataatataatttattaatcaaataatataataataaagaatatattttttagtctaatttttagtatttcgattgaaattggaaaaaaaaattcttttggtgttgatttaacactaaatttaacttccccattagagttgcacttacaacccatattttttaccaaatttatttgtatgatgcatagttactctctttttttttaaaaaaataaataacaaatatttacttatttatttatttatttttgaaagcatataaaaaaatatttatttattggtttgccattaatttattggtttatatcggaatgttcgcaaagccaatttcggtaatatttagttaccctacttaacacataagctaaaaatctctttctaataataacttaacctctaaacctctatacggactgcctcaatgtagtgcaa

SEQ ID NO: 45451 - DNA, 3587 bp, Cannabis sativa
  modified_base (2993)..(3016): a, c, t, g, unknown or other
tagcattcgcgagccagcatttggtcacctcgcactactcccacacctatcggtgtttgaaacttcagaaataagtgcttaattgaactaactgcccctagtccaattaaagttggtacccaacagcatgttgtaagctgatggcaagtcgacaactaaaaagtcttgcattatagtggtggataaaggtgcttcacccaatattaatgtgagctcgattattccttgactggcaacattgtcgcctgtaaatccacatagatttaccatgcaaggttttaatttggctttttcaagtcccattttcctcagtgtgtccttataaaggatgttcactgaacttccgttgtctaccagcaccctttttatccttttattggcgagctggatggtaattaccaatggatcgaggtgaggctcacgtgtttttcatcttcctccgataatacaatcggaggttcttcagtcttagttttcttagaaggttccaaagcaaaaacagactgcttatttttcacttcctttacatatttcttttgggcattgttactttcccctacaatatgtggccttcccgagataaccagaatatcctctccttcaagaggaggaggttgtaatccttggtttcctgggttattgggtgaatttggctggttttgtctattgccttgtcttttcacatattgccggaagtaacctcgcgcgataagactctctatctcgtctttcagttgacgacactcctctgtcgtatgcctaatgtccttgtgatacttacaaaatttggttccatctctcttatgcctcgcatgcctcatgggcttaggtttacaaaatgtgactctgtgcttatgtgcgagatagatgttttcctgagtttcattaagcttggtataaacagtgtagattggcacacacttttcgtgcttctttttcttttccttggctgactccttagagttatctttcatctttgaactagaggctcctgcattattagccttggtcaagacgatgcttgttgagacagtgctggatttacctcccaatccagtctttaacaacttcatctcttttcttgcttcctcttttcaaacaaacacttgagctctttcattgaactcactgatgttttccactgggcgacattgcaagtcatcccatagctcgcctccagtagtggaaagatcaggcgtcatccctgcctagagagtataagctgggtactatcgtctagatttctcaccctcgcagcagctatgctaaaatgacttaagtaggcctttagcatctcgctcggctgttgctttacgctagtgggtgaggattcctcaggtcgcctatcccttgctgcctggaactattttttaaagtccttagacaactgttcccaagagatgattgaataatgggtaaatttattgaaccagctgctcgctgctccaactagtaaagtggggaataaaatatagcataaattattcgtaacattgttggctcgcatgatggtattaaaattatttaaatgtgagaccgaatcccatcatatgacaagacgtgaggattcttgaatccctaagggaattcagcattcataatgtctggatggaaaggctcaagttcctcgtctgagtcgtatttagactactttccacattccccgacttgatacctcctgaatttgtcctctgactcatcaattcgcaattggataggatcctcttgcttttgaccgagttgatggcgaaggtcgggttttttatggatcacttctggttcaagtgattacggagattcggttgttgctggttatagttactaacagacctcgtcctactcatggatctcgtcctactcatgaatcttgtcctactcatggatctcgtccttgagtaactttcagttctacttgtgcatgtactctctcgatcagtattgcgatgagttctttcccctcctcacgttgatccactatgggttcttgtgcgtctcgagctggcactcgcctcatcacgtcccggccttctcccttcggtatgggttgttgtatgctccctgctagggtttgtacataccccttccatgttagttcgggaaggacgttgacaatgcctcggcggcaacccacctgtcccaagttgaaacctaggatttccctcgttctcacaggggatttcttattccctggtcccgggtcgccttctgttctcatttttatgagaaggctttggttggtcatttgattgttcattctcagggggaccctcagtttcccaaggttattcttcctgagcgttctgaggattctcctgagccgtctcctacctcctggttcgtgaaccgcgagatctacctcgcggtctcctcacaccagggtcaagttggttttttacgttgttttcctttgctgcccctgtcgcagctgcctctcgttccaactaagtatttcgtcagtttgcctcctctaggcggtgcctgagatggcaattttccaactcgacaacaggcacgtatctcgtgagatcataggcaccatcatcatcatattccatgggttgagcaccaccaacacttatattggggtcttcattccctatttctgggttctagccaccctcactatggtccttcttgaacgtgtggacagtgtattttggccatgttgggtccttcttgaacgagtggaccgtgtagatcgtgaattgggaggcctccatgagcccattggctcttttccaggacgataagtagtctcttcagggtgagtatcaacattttctctgttatcagccatggagaaagatttttctttttcttaggagggttttttctgagcttttttcacgtaggctctcaatgagagcaccaaactgttaacacagatttttgttgacgatataagtctattttcgtgataggttaggaataatataaaataaaaataagaagagtaatgcaaagatcacaccaagttttttacgtggttttgnnnnnnnnnnnnnnnnnnnnnnnngagtctatcttattagatttctcttatacaaactagggtctttctctcaaggattttccacccctttttcagtatattttgcccctatttatagttacatagggaggcagttaattacaatcagaatcatatcccacaataatatttccctgaaattatgggattttattacgtcccacgtaaaatgaatgcgattattatttgaacatcacacaactgtgatttatccacttttattgggtcaatgcttacgtggatttagatacgctacaaagtgtatctcgctaggtcatctcactgagatagcaataataaccctaacagcgagctgaagcttttcccatgtctttctgaggttgataatctgaatcccgtcgtttctgctattgaatacataaacctctatctgacaatcgcagttcttggtaacaaggtgaacttcagcagtcaacatcatttgaatgtcgaattctatctgagagagcagactcgacggagcagtggatctcattgaaagatgtctagagctgattagtgaaggtaccatgagtatgccttcctatagcaagat

SEQ ID NO: 45452 - DNA, 1279 bp, Cannabis sativa
aaaatagattacattgaaatggagttttatttagggcataaaaatccaacaggagtggtatgagctttctcgagaatctcattttgaagctctacactgcttggaatacaactctggttctatacaatagcatcccattacctgacaccgtaaaatccttagcttgaccagctaaaacctcttctcggatctaccaattctagatcagttaactgagtagctttaattctatctaacatatcagattgtaatgttaaattattaagtttgcccagaacaaactcaatacctgataactggggtgaaatcataattacactggttacttacccgtgactctttctgctcaaagcatctgccaccacattagccttcccgagatagtaaaggatttcacattcgtaatcctttaccaactccaaccaccgcttctgtctcatattcaaatctttctgagtaaaaaaatatttgaggctcttgtggtcggtgtaaatctcacacttttctccgtaaagataatgccgccaaatcttcaaagaaaaaactaccggaacaagttctaaattgtgagttgggtattgctatccatattcctttaactgatgggaggcataagcgattacccgatcaacttacatcaaaacacatcccagacccagtatggatgcatcacaacataaaccacgaacttctctttatcaaatgatagggccaatatcggagctgtgatcaaccgctatattaattcctaaaagcttgcttcacatttttctgtccatagaaattgtaaattgtttttagttagttcagttaagggtgttgaaatcataaaaaaatccctcaataaaccgatgataataaccagctaatcccagaaacttctgacttttgtaactatcttcggtcttgaccaatccctaacagattcaatcttccatggatcaaccttgatcccctctatactaacaatgtgtccaagaaacgacacttgagattgccagaattcgcactttttaaacttagcatagagtttatgttcttgtaatcactgtagaaccatccgcaggtgttgttcatgctccgcttttgattgagactgcacaagaatgtcatcgacaaatactataacacatatatctagtaaattcttgaataccctattcatcagatccatgaaagttgtcagagcactggtcaatccaaaggacataaccaaaaattcatagtgcccatacctagtgtagaaagtagtctttggaatgtcctcctctcgaattct

SEQ ID NO: 45453 - DNA, 860 bp, Cannabis sativa
taacttgttgtattgaagaagaaaaaagtgttggaaatgttattgcttagccgccagctaacaaagttataatgaggtaaaaattcattattatgctatttatatgatgtagatatttttgtaataataccacagcttattggaattatgacaagttttcagacatgttttgatattattaattagtctcgatctatagttctgtatactgaataatatataggcatgaaacttccacaaagataaaaataaaaccatggttgacattctgattggtctctcgctagaacagtcttcatcatatatatatttatgttatatatatgttataagttccttctcggttatgataccaatgagagcttgactagtaactagtaagagtttgtcacgtttagaatcaaagttcacactttggtgtatttggtcacctttaggcctaaacattttgggccaccagagtccagacccaacatgtattattgtttaaatcagtattttaatttcttggttataattgtttgttgttgtctgttatttttaggattcgatattgtcattactcaaagaatgtggttacttttttattatttaactaggtaacatactcgctcttcgcgcggttcttctttaaaatgttcttaaaatataatagaaaaaattattaatacaattaaaataataatttaaaatattgtaattacatgagaacaactccttaaaattctcaacaaaaaaaattccttaaagtaattttaattttaatttttgaagaaaaatacgtgttttgatgtgaaagaataactctaaacattaaaacataacatactcaaattcaattattctcgataaataagtaa

SEQ ID NO: 45454 - DNA, 2349 bp, Cannabis sativa
  modified_base (26)..(31): a, c, t, g, unknown or other
  modified_base (1879)..(1896): a, c, t, g, unknown or other
tgaaaccttcgtctgatgcaaccacnnnnnnaccacacaacaaccaccctgcaactatcatctatttttgtaaatgatagtgtaagtggtattttagtaattaaaattacataaaaggtataaatattgctcacaccttatggaggtattttgtaaataaagtgtcaatttaaattttttatataataattcctttttatattacttttttgttgggtaatttgcagttaaactttttaaattttgaagtttggcatgattgactcctagagttaaaaaatcagagctaaactctctaatatccataatcgttttgctctgttctgcattccttccatccattagggctgcacatttgtaacccaaaactatttatttttttttttaaaaaaaacaaattaatattaataatacttatattaatcacattgagaaaaaaaaaactattcatttcactaaaacgctgactattagtcggcttattactattacttttcattaattaagttttcaatacttaattaatagtatttattttttttaatcagactcaaaaaaaagactcttcagttcatattcgtattcgtgactctcacaccagacaaagagttatttggttctcacttctcaatcactcccttaaccaatttacaaaacttcttcttctccaagggcggcgactagttctcttctccgatggggttgtatccaagaacggtcagctctgttcagtatcacgtgtccacccacctgtgcggccgtgcggctgactgttcgccggtctgccgtgatcgccaagatctgaggtggtgactagtttggcgtctgccctagcgagtggcgactgtgtggtgaagtgaggtggtaaatttaatttactactaaaagtgaatagtttatatatattattataaaggtaatgaaggcattacatttttaatattattatatactactggaaatcttcataaagtatataatattattatatactttagttactggtatatatattaatattatatatattaaatttttaaaaggtctaaataatgttaaaaatataaaaatagcatttttaaaaattaaattttattttagcccataaattaaatatttgagctcagcccaataggacccgaacccgactacacccaacccgaaaaagcccgacccgacacctgacgcacctgaacacccaaaaatcgggttcggttgtgcatttccaatacccgaagcccaaaaacccaaatccgaccacccgaaaatccaaaaactcgacccgtgtgcacccctaccatccatgctctctaggtcccaaatcccagaaccccaagtgtaacaccctactagtttaggcgtgttatcgttattttatgttaattgtgctgcttattgctaatcaacgactttattgaaaattgtgagtaattaaaactttgtttaaatacttataaatatcaaaataagtgtcatatatagataaccaggatctcgtatataaaatatttacatctaattcaaaatgtttaatacaaaagttgtcgcctagtgactatacaaaacataaccaattgtcccaaagatcatatgtgttaagtctaacagtcccaaaatgtacaatcttcatccgctcgcctcacgactgctcaaccctagccttgcccttacctacacatgcatacaataattgtgagttgacagactcagtaagaaaagcataataataatcataaatgtaaccagactataattagacgtccatagccccaaatataatcaaatccccgcaccctaggcggtactccccacaccctaggcggtactgaatcaagaacatttaaatgacagtactgttgaccataatatcagcctatannnnnnnnnnnnnnnnnnctctagtcgtaccgatgtgataacatcaatcattactaaagtcaaaacatacattcatcgatatccaatataattctaaatatactaataccgttattctaatgtaatctaataggcttaacagaaaagtacgctaaacatgtaaacatatatacatatcattatactaatcttatttcatttccaaatttaactgtgtcggccaacctgagtggaactgctgctcgacgatttacaggccccttggtccttactacttgaatttagttataattcaccagaattgtgaagaaacaccctgagcttctttggtttgcagcagctgaataagaataaggggggttcaagaggtggagtttgtattttcttcaaatttctattttctcattattccactaaatgaaatgataaagttaaattattttatctaataatggccagctgccacactaa

SEQ ID NO: 45455 - DNA, 1974 bp, Cannabis sativa
gcagaaacttgtgaagcattgggcaagacttctgatgaggaggatgcaaattggccggagttattcgagtgacaacgcttaagagagtcagattctccctgccttttagtgatcttataaggattcatgttttccttgaaaggtgatattgatgagggaactggagttcaaagttgaccatattggttattagtatgcattggcaaatgaggaggaactgtagtgatggtggcagaggaaaacaaatgtggttgaggggttgcattgtggatatggcgagggctaaaaggtgaggctatagtgggtgaagatggggggtatgtagcaaaggaaggactgctagttactggagttgttgaaggcaaagatagaggtaagtatgagggaaatggtatctcaggaatatcattgtcaatgttatgggaagatgattgttgttgattgggatgaatatgggtaagggattgatgtccaaagttggtagtggtagtggtatgagatgaagattcaatatcagttaatggaaaagaatagggaggtggtcttgatgtaagtttaggaacagcaacagcaaaagatttctttgcaagtcttgtcataagaggccaagcattacccttcccgaaatcggtcctataacgatcatagccagaggatggaattggagatcccaaaagatcagggccataagaaagagaaggttcaattccattgtagagttgatcaaggaaaatagtacaactttcaaaagggtgtccaataactccacattcaaaacaaaattccggaagacgctcgtatcgaaattcaactcaaaactcatctcttgaatcccgaatcctagccatttttcctctaagaagaggtttggaaacatcaatcatggcctgaacccgaagaaagggtccccacccttcattcaaggagtcctcatccacttccaaataagaacccacaatattaccagcccatacagtaaacggtgtatttgaatccaaaatggagagtaatgcagtgagtcaactgtgacattttgtaattgtaaagcagatggtgaggccgaggccaatacaaatacaatatggtgattctgaaagtgccatggctccattataagggtcattttcttatctcctgggcatccaaaggtaaccatgaagagtccagtgtggtgatctgaaatggtaactgggtaacgtcctttccaatggccagacattttgatacgaaatgttttgcgattaatttccttagaggacagtacacgtgcaaagagtgtaacatcatcattttctgagtctcgtaagttgattgaagtagggagttcaaggacttctctctcaagatcagtaagagagatagaaggtcgagttgatgatgatccgatatgcatgaattcagtcatcagaagtaaagcacatagagtaaacaaagatagggtgaataaaacagagcaaatcgaacagagaagaaagaagaaaagaaaaaaactgaaggaaaaaaacacagaaagaaactgaagaaaactggagaaaaactgcaaagaaacagttgaaaaataagaaaacagttaaaaagaataaactgccacagagctttttaagggcacacgctcaaacaaaattagttatttttttaattgattttaggattaggtgcatatattatgatgtatattttattatgcttttgacatattttagttaatcttattgttttgtagttttattttattagtatttgtggggttgatattttgttatttttgcattgggttaatataatgagttaatatataagtgatttgtaattgtttttaattttttaaattattatttttaaaggttgtttttgtgttgttttaattttttttatttaacgcaatgccttattatcttgttaatttttaacttcattgtgtttatttgtggttattttatatatataaatatttgttgttatttagttgcatga

SEQ ID NO: 45456 - DNA, 1337 bp, Cannabis sativa
tttttttttttaacttttttgttattatttaaggtgaaagaaaatgaatggaagagataatggggtcaagatgttaggattttttcatatgtaaaagacccaaacatgtaaagtgtgttatatttaagtttcaggggcaacaaatgtggcccataatactattacctagagaaattttgcccaaacacaacaaataatttttatctttttgtattttaaaatattaaaatgtcatttcaataaagtaacttttctattattttgccataacaactaattcattttaaccattccaatacaataatttttttgtatacttttaaatttaattccatttcattttatattctaatttttatttttatttttttattctttccaaccaaacgctacctaaaataaatgagcattagttacccttgatctttcgtaatatggttccactaataaagatgcacttttttttttttttttttttggctacgaaaacacaactgcttattcattaagagaaagtaacgtgatgagtacaaggggattcacctcccagaagtttataaagccattacagttgtgttctatgccccattttgcaagaaagtgggcagattggttagcagtgcgaggcaccccaaaagatgcactcttggttcattaccatcgcagacgaagataaataaaaattcatatatactttaagctcatatatacattttccctaaatgttcagctagaaaaacctagatacaattacaaagcaaaataccctgactagtatccagaatctaatgaaagatacaattcaagctctgtaattagatcagatcaagagagagggcgagaggcgagatgtcaagattgcattggcatcatagaaagtgagtatggctcgtgaccgtgcatcctcaagcgataaatgcaagtatgagaagggcttccatggttggaagtgaaatcaagcctgatagtatcaacaacgttggacccaactgactccaacacattgaaggtctgtgcattgctcttctcaagctcataactgaactcggctagaagaaacatcttctctgaatcataagaccattcagtattacgctcctgcagccacccagagactctgcaattcttgggagcacttgatctgtcgaaagcaacactctatacatatatcttagccttaatacaatgtcattattttaaaaaataaaaataaaaatataccaattaatttacttttttaatttattttccacatgtaaaatttctacaaaaaaaattaagcactttttttccttgttgtggctgcaatatacaataatcttattatatatatatat

SEQ ID NO: 45457 - DNA, 1815 bp, Cannabis sativa
  modified_base (1284)..(1285): a, c, t, g, unknown or other
tcaaaccctgtgagtggtattattcaacttaagggtaaataagtgaatctgtaacaacagtatggttgttaaaattcttacctccaaaacactcaaacccgaatgggttggtaatgctataaaggaagcttgaatagctcgctttccatcaattgtctttgattatcattctagacttaatctggtgtgttttgggtgtgaaggtgattggagggggggttgttgaggaacaaccatgacattttgaccgctctctaatgctctttgctattcttgatggttttgacaccatcctttcaagccaactcaagtatatccctctttggatgcaagtgcattatataccctttggaactaggtcttataatctagccccgtttgtggctgatgctataggtgaccttattgaagtgcacatttcttctctttataactccataacccctttcatgagaatcaaggttctccttgacaccactaagcctctccttagaggcatgaatgttcattttagaaagttttcaataagtggctcaaatttttgtatgaggggatctagaactattgttaccactgtagtaagctcgatcacacttataattaatgtgtgaaaaattccttcagtcagtgcttatcccctttccttgagttacaaagattccctgagggctcctgctaaatctgtttacaaaaaaaaatgcatatttgaactgtccaacactctattcctttcgaggagcaccccgcactttccaatacttccagtcagtgccttcaagaacttgatgttcaatttttagtccctagcatagttaatacacaactttggttaatgtctcttctactggttgttctctttcacttgtctcggcaggtacctttatccaaatgtctagcttacatgtagtctcttgtgaccctgttatgagctctcttacttgtcccatcatctccaatcttgttatggttttgactgttatcactgtcacctctaagggtaaaggccttatgtatcctgaggtgtctaggggtcgtctctggtttcatcccctcccaagaccagggcaactctaggaactaagtctgggacaaagaggtctttgactagacaaagctgcaagtgggttcttctattagaggcatgctcaaatgagcttgatcttccaactttgagtttgttgtggttgttggggattattttacaaggatttagatttaccaacatgtatgttatttaacatcctaaatatgattttttttaaaacaatgaaattaaacacatannaagttaaaaaaaccttacattggtggcaacagaataatatgactccttccgctcagatctctaatccttgttcttttctgtcgcagagtattatcaagatttgagcccgattctccttcaagtgttgaattcttcacagtcttacacactatgattgagtatttgacttgctatgggtgggcatgtgctcttctttcactataaggctcgaaaataatgaagaagaagatagggagattcaaattctatagaagaaggttctcaagtctctagttgtctaacaaataatgaaaactagaatgacttaggttatgttggatagaatgaaaaccatcttattccttatataagatttctcttaggattatatttaaattatatggcattaaaaattgataattaacgctaaatataccttaagtggccggtcatttaatgtgggtctcacttaggggtgttcataaaaaccgaaaaactgaaaccgaccagaccgtaactgaattttcggttccacgtcatcaccgaatttg

SEQ ID NO: 45458 - DNA, 902 bp, Cannabis sativa
aatcttttagcttttgaatttaactaggggttaaatggtaattttattaattaagacatttgtctttttgtaaggttgtataatctgatttttctttactttattttaaaaataaatgatatatgagtttattggggaaaaacctagaggaaatcaagtcaacctctccatcaactctccttctctctctcgaattctctagaggaccaactagggatcaattcttcaacttctttgtgatattccagtaggttttgaacactacaattcaaggtaattttctttggctttatcctttatgacttttccaagcttaagttaggtttaatggtaaattttaattctaagctgttgtgttgtaaattaaagtttaatttggtgttctggagtgtatttgagatgatttgtgttagtttttgttggtttatttggatgtaataatgttttgacaaggtttgagttgaggaactcaaaccttgacgtctaatggtgtctttggattttgagtaaattgttgagttcttttggttggtttgggtctatttgagtgtttgcaggtatcctggaagtttttagaaagtttggggttgaattgatttaaagggatcgatttttgggttcccaccacaaaaccagaattctggttctaggggaccatttgaaccggtcgaccggttggtgcccaagaaccgaacttccggttgggtcattttccagaaccctagttttcttcgtttttgtattgtttaaggtgttagcatcctcattattgatagggttattcttggttttaattttaaatccccaataagtattttagcatgtctctcattgagttttgaacgttatggtttagggccctgtaaaacgttaagctacgcttccactcaggctgaccggca

SEQ ID NO: 45459 - DNA, 968 bp, Cannabis sativa
gaaaacgacatgtcgttttgtctatataatagacatgtcgtttttgttatgttttgcaacctatgtatgaaaactacatgtcgttttcttaatatacaattatttgtatctctatctgattattttgttatgtttgtatttagtgctataaatattggtcagatttttcgacacgatacaaaaatgacacgagttcgaaagatacgagtaagtctacgtacaaaaaaatatggacttaggcacaatatgacacaatgttataaattgacacgacatgatacgaaaaatatgtttttaaacacgacacagcacaagaaatacgaaagatacgatacgtaaacacaaataaattagcccgaaatgtacgacatacgacacgcacgaatatactttttctttaaatataaatgttatcaaaattttgcatgtataaaaatatcgaatttaactgagaacaaaagtcatagatattatgattaatttttttgtttattattattatttttattttccttttatttattttatttatgtatatcgagtttgtttagtagactgtataaagattgttttgtattaaaaaataaataatattatgtttaaataaaacaatgttttgtattaattattaagaccaaaaattttaatataatgtaagttgtattatttattatataacaaatgatccgtattaattagcttgacttataatatttacaaatgatctgaggtcaaccccaatctccgatccgaatctagggactgggtctgggttaaggcccaggccttaaaatcggacttggacctagtcccagaccccgaacttcgaacctggactagaactaaaccatggatcccgaatcccaaactaaaactggagtcagtgttagaatcgagtttattgaaaatatataataacttaatacaacttaacaagtcaataccaaatatagtattatattaaataa

SEQ ID NO: 45460 - DNA, 1184 bp, Cannabis sativa
taaataaataaagaaaaaaactaatttgagtcaaactccaaaaggttgctatgtaagttgtaatataactttctataaaaatgcaaaaaataaaataaataaatacaaattattttaaagtacaaaaatgaaaaaatctctaaaaattaatagctatataatattttcctcaatggacatatagtacacaaaaatgaattttaatcactaaaatttacacttgatgtgtatgttactattgaccccctactatttataattttagctcttccccctttgcaagagttttgtaaattgtaatattgtgaaataaaattatgaattgttaagaaatattattattttctatcgtgacaaaaagacaccaatctaattgttgttaaatttattattttcatataaatgttaagtgaaatggtctcttcccttccattgagtttttcataaaataattatagagttttcataaattattgtgttattcaaagtactaacatatttgcattaaaataaaattttaactagtatatacacgtttacacttttaatgggtattactcataaatgaataatattaaaaaaaaattttgagtttttttttatgattgatttttttatttaattagaaaattttcttatttttacattatatgggctggggttgttccatgaaaaaaaaataataaaaaaaacgttttcggcaaaaaagtaataaaaaaagttgagtttgacttttcatataaacatattgttgatataatataaaaaaataagtattttttgatatttttttttaagtagttaaattaagcataaaaataaaaatttatgttttattattcgctatcggactaatatttaatagtttaatatttttaaaattaatatttatagttgaatttgtttagtacccatcaacgggtaatatcgattaagaagtgttctctatatatttttttatatactttctctctcataagaaaatcttggatagagtgtggatccaaatccgaattccgtaccgagataagggtgaggctgcttggatttgtgtcatgatgtgtggtgtggaataataaagtatggtaaatttcggcataaatacctaacgtttcagattttatacacttaaatatcttatcttcgtttttagaggtaaaaatacctaatgttacaattctctt

SEQ ID NO: 45461 - DNA, 1786 bp, Cannabis sativa
acaaataccaataaaatgtatataactaagtttcaacttttattttttcaatgaaaggtgtgtgcttggagaagctacaaacacttttcgaaagattcttttaatcctaaaagttaaaaaagagcttatagaagttaagccaaacaggataatattatttacaaaaatcaagagtcttgttttttgtactaattccttactgtatcttctattggcactgaagtatccacacgatgctgataatacagatcaatatagtcaacttctagtctctttagactagcttcacagcattccctcacatattcaggggtaccctttaccccaaattgaaaattctctgatacaattataccaaatttagttgctaactggattttctctcttgggagctgctttagagcctgaaattatgttaagctaagtatcactgtcaaaacactgatgatatttaaataatgaaattcccttcaaataaaaacaaacaaactaaaagtaccttgccaatcatgatctcgttgtgatgtttattaccgtaaatatcagctgtatcaaagaaggttatacctctattgtaagcttcctttataatgttacatccttcttcatgaggcagaggagcgtttaacattccagacagtcctccacacccaaaacccaatactgacacctatataaaaaaaatacccataaaaataaaagactgaatcgatgacaattgtttgttttgtaagaatcaaatctatttatgtaataccacttttccctataaccttacttaaatcactgttctgagtccaatataaaacttcagcctttttgccaagttaatatatacaagaaaagtacaagttttcatctaaatgaatgaagggccaggtatcatattcagtactttatatcagtactttgataaacgtcagtcaaattcacaaattgtattcattttcatacatgtacttgtacaattgattatgctacatatatagttatctggaacagatttagtgctacccttaatttaagagttaaagttatgtgggttttgctcatggttttctaatacaaatatgggttggagaagaaagaagaaaaagaagcctacctccaatccttgactgccgaggtttactctcggaatctgtatttgagatttcacctccattttcaagaaaccaaagataagatttagatgttagagccaaaagaagaagatgaagatgaagagatattttcacacatatatgccgttttttcataagaagttactattgtgttgttggtttttttttattattataaaagcatatttgtattatggatactgatgtcacatttggactattccacgacacgttctttttgggtgggaatatgacccttttaactactacgaggaattcacttgttttgtgatgtaataatgtgaatgctttgccatccgaatctcaccacagttacttatgttcaaggattatggctggacctttagaaggtaaatttggtgtgtcattatcatcctaattaataataagatagaaactctcaagctacatctaccgataatccatccaagacaagatgaggtatgagtctcttgtagttagaaacctagtctcccaaattttgtctaagttaaatgaaagattggaaaaagaatctgttagaaaaattgtatataatttagaagatgataataagtatacattgatttatcttagatttttaaatcagaaacaaaacagttttatttatcaaaaaatttaatgagacaatatatatttat

SEQ ID NO: 45462 - DNA, 3830 bp, Cannabis sativa
ctatccattattcgatccgatctacttggatatttaaaaataacatccaattcaatccgatcacaattggatatttaatgtttggcggtcaactgtagttgaatcggtcggttctcattaaatttgatcgacttatgcacacccctagatttaaagattctgtttaattttattaataaatttttgatgtgtataaaaattcacgaaaacaatttaatacatatcaaagtttgagatacaattttattagatatcaaatatcaggaacataatatatagtacatgaataattaatatttttctaatgaacggaattgaacataaatttttaaatctcacaatctcaatagtataaataaatttttaacggcttaaaaaatttacgggtcataattaatatatcaatatataaaaaaaaaacattaaagagattatatgtcatctactgtacatcaatattttctattatgtgataatttcatattattatttgtctaatttaatattaatagaaatagttaattacttattatctatcataaataatatcattaactaattgattaaaataatattcatttagttccaaaattaattatcataacaaagtaaaagaatttgaatagtttctcatttttatatcttttcatactacttaattttgtatatgtttaggagggccaacctaagtgttgttggaggaatttagacaacattaaataacgtaaaattataattattttacataaaagaagcgagtactcaacttagaatatcgagtattcaaatgaagctacacagataaatggaaagctagtaaaaataatgaacacgaagagatatagtggtttagtcagaccttggtctgcttagtctactgttgcaagaattttctgtcctgtcttatgcatgttggatcactcctttatataaaaaacaagtgtcatttgattactcagaacttaattgattatcaaaccgttttactttgaatattagcattaaattaagaaaaacataaataaaataaatgaagaacaatttaagtttgttttactaaatacatcaacatatgagactttcataatgccagttgtctattcatctgctcgcacaagctcgtaggcttagggtgcgaaacgagactaacgattcttgttcttaggtatctgcattctaatcgcatatatggataccttgtcagcatcgatgatctaagacatgcgagttcttatcgaatcatcgagcatattaagtcttttggactaacttgctacgtaaagaaacgatccttactaagtcgcatgataagtctttatagacctcgcatatatcttggtatatgcgagacttgaacatttctttcttggtcctacatcatgcgaggtttaataatgcgactaaactctatcaaggtcacatcatctcgctaagtttggttcaggcgaggtttaatctcgagaggtcattttctgatagctcagcaatcctcaagggatgtgagtccacgtctcattctcacaagagcctggtctcgagtttctaggtaaaaaattcacactataacacatgcccctagtttcgcgattaacaaccatgtcatgagggaaattatcagagagaggcaggcgagtggttgtcacgagatggtgactcttggttgtcttgttgagggttttgaaaagacggctgtaataattattgtatttctttgaggtgccatgttatcaaaaccctttgggggtatgtgtaagcgagttcactgataaccattggattgagagaccttaggcattcctttgccacgtgtctctcatcccaataaatgagggataccagtatttaaacctcttgatatgaaaatggttcccattcatttttctttagaaattcaaatctttcaaaaatccttctggacccttttaaattatttcctacgaaagttgcttcctgagattccactatttgcaagactacccagggaaattagcactttgaggttagtaatttacttttcctatcatcattgtcttttctttgggtatttttatgcatttttgtttttaggagtaggaaatatatgaaatgatggaacccaaattctacagtttaggcaaaatgtggtattttttttggaaaatatttgcctaaaacttgaatacttgcgagtttcaggaagatctcctcgaatattcacgagtttttagaagaacatcttgaatactcgctaattcctagaagaacaccttgaatatttgtatgctcaaaataactttatctaacccatagttaacctttttgaccctttttttctagagttttaactcttaggcttttttttagcttttagattatacatacttttaatatgaaaactatctgagttctcgaaatggtgggggtgtcacattaacttaatgttcgtgcaatcatcgcatgccccttgggatactgtgacacgcccatccattttttgagacatgcagttagttttcattttctcgcattttattcattgttggaactgattggattcttgaagtggtgggtgttttcctgtgacttaatgttcatgtagcaacacgacccttaggacattgagaaacacctagccatttctagagatacacgactagttctatgaacgtttttctttaatatttataacgcgagtgggggcacttaactttgttaaaattgcactcgcaccacactgaaaagattttctatctttcagatgagtgacctgtcggatagccagaggtacgactctggagaaggagccttcgcggataaatcgaaaaggagcgatagcttcattccaacctcgatgtctaaggatgaggtccctgtagcaagagctcacgaggtcttgttgtctacaaatgagatagagaggatggttcaggaattagcagaaccagtgaccctagaagtgtgcgataacgagtctacagtatcagcccaaggctatcttgttcattggtaacttgccccagatatggaagtcgaggaaatgggtgaggacttcaaattatcagactatgagatggaagacgaggcagaaggtgaaggtagcaagacagattcagctgacaatgcctaattaaacgagcctttttcctgcgaggatttagtctcgcgagttaaaaaatctaatttgtcaacatttgtaaagttgaatctgatttacagggctaccaacaagcatttaccaacacagtgaccttaccttcccttcactaatcctatgatcatcccgacacagaatgtggtggtttcgattcccattctttgatgcggggtgatgcttccttttcatccctttgtgaaagagattctttctcgctatgacgtttctcctttccaacttaccccaaacagctatcgcataatcctcgggttctatgcgatgtatatggagtatacgtgaggagaaccaacagtcgaagattttagcttcttttatgacataaaaagtgttggccatgataatggtttctattgttttagtaaatgggccagctctgaaataaacagggtggaaggtacaatttccaatatgggggattagaaatcaaaatggttatacatgtttaaaatgccaggagtcaaaattgactttaatcaccgacctcgtatgtcgtgtacttttacacttagtatttattttgatcacctcatagatgctaagtttattttccttgttcgcagatggaccgactcgatctgtacttgaccaaattcgtttagaaattaccgaagtgttaagcagcctccctgtgcaagatcgcgactggcgcttattgtgtactactgcaaaattgtga

SEQ ID NO: 45463 - DNA, 2484 bp, Cannabis sativa
tatgcatttcaaggcactttatttcgtattgtacaaggtctattttttaatattgaattttgtagaatcacggctctagataattcagcacttttattgttaggcttgtgaagtgtgaacctatcttctcataattaaactcccaaacttttcaatgatttcccttttcctccatcattattaataattttaaatttaattcaatagacctcctttgattccggattatcagaagacgccaaaatcaacgggccaaaaaagaaaattaatccccccactaaacaaatcattttaaaaaatattttctaccatctctctcttgttaacatgctttgccaacctgtgttttctcatcatcttccaatctctgattgccacgtggtacttgaccccacgtagagtatgtagtcattccctttttaaaagcctcaaatcatagcttcaaccaaaaagctccacacactactacactcaaatccctctcacataaatattcatattctataggcaacactcactcactcactcattcattctccactaaagccctgataattgatgatcttgatcatcatcatcattagaatggcctcatctttttggttccatttagtactaatcattctcatgtctatattctcaatctcttattcttctcagctcaatactcaaccctcaacacttgttccttctccttcttcattctcctcaaatcaacctccttcatttcaacaactatccccagatatcaccccacttctgccttcccctggtggagttttgcctactccaacagtctcatctgttccaaccattccctccaatccaagtcctccaaatcctgatgaattagccgccaccgcagccggccctgccttttcgccatttggaccaatgccggtttctaaagcaacagcagctactaccttagcttggcctccaaacttggctgcttttgcaggctttgcagcatatgtgtatggctttatgcaactcctttggatgtgaatttaagaattttttctatttcatcttcaatgtttttcattcttttcattagtctaaataataaataatattatgtatatgtaattaatttagtgcctctcctttgtaatgaaaagagcatatattatgtgatttagtattaactttctttctacttcaaaaacatacatcttttattgggaatagcatttaaagaaatgtctttttagcggtaataggtgttcttcttgtgactatttaatcttctattgtcacatgagttggaacaagggtctttaattaggcatattatatgaaaaactcaaaatatagtaccatgtgacacacaccaaaatgaccattaattaggttaaaatagtccacccacatgaagagcaatcaataatttttcttttcttttctttttttgacattaatcaaatgatcttttaggtgacctgtttttgtcttgttttcactgtcaagcatctttgccaccaaccctaacactttcacaatctttttcccactatactaaacacttattcttattataactattgccttcatcccttggattcttttttgtaattatttgtttattaagaatagtgcaaaaatgggttagtttagttagttcaaatagctctgaaaatttagtcacattttcacatcatattaaaactattcttcttactcaaactgtgtgtgactcattattcattcatgtgtctcaaattatcaattaataatttgaatctaaaacaagggtaactttgataagtggataagaaattatgacattgccccctatcttcctattatttttttcaaaatcttaaaataagtattgttagagagtctcatattgattatgtgtgagaatttaatactatttagaggagtatgaattactctactaattatcaattaatttgtgataaaattatgttaaatcacacttacacattctataatgtttatgattttagttttttttttcttaagaaaattattagacttttaagtgtggtttgttgagtgcagtgtgtagacagtggtaagtactaagcactaaacaaactactactcttgacaaaaccgaatatgtcccttagcagttagcactatagattatggagttctattattattattattattttgaaattatgggttaatggtagtgtgaataatatttttgaattaataaaaaaatttaaatataattaatattatgatttattataaacaaaatatcatgaagtatatttaatttgtaagatcgattttttttaactaagttatttttatgttattgttaatggttgggtgaataatatttttgaattaataaacaaatttaaatataattaatattatgattcattataaacaaaatattatgaaatatatttagtttgtgagatcgatttttttttaactaaggtggcgtttggtaacacttttataactagttttttatttttaaaatta

SEQ ID NO: 45464 - DNA, 6165 bp, Cannabis sativa
gtaaaataatttccaacagtgggggtatgaggtgtggggtgtggggtctgttagaggaggcggtggtggtatagggaagctgttgggagataaatttgttgttgatatgggaggagagacatgtttgggaaaaagtgtatcataagggaaactggtttcatttaatttgactgtgcgagcaatatatattcggccagtagggtgcatacatttgtaacctttgtggctggggctatatccaaggagcaagcagtgagctatttgaaaggccaatttgttggtttggtaagggcaaagtaaaggataacaagagcaaccaaaggttttgaggaatgagtagttgggtttttggtgaaacaatacctcaaatggattttcgtagttgtaacacaggtgtggaagccgatttatagtgtaggcagctgtggtgaaggcatcccaccaatgtgtgagaggcatatttgcctgagccaaaaaggagaggcccatgtcaactacatgacgatgttttcgttcagctcttccctgttgctggtgtgtatggggacacggatgtctgaagttgatgcccaatggctcaaggatggactgcagtggtctatactcaccaccccagtccgattgcacggcttttatcttggtattaaactgtagttcaacataagacttgaattgtcgaaaaatggcagcaacttcagatttgaccttcataggatatatctaagtaaatttagagaagtcatcaatgaaactaacatagtaacggaatccttctattgaattgtaaaaagatggtcctcatacatcggtgtgtactaaatcaaagaccaaagtgaatactgtgaagtttgccatattacaagcttgacaaaaaggaagaaaattacatcttgttttaaaattaatagtacaaaggacattctttaaatccttggggaggcatgaccaagacgatgatgccatatttgagcttcagtgaagggtccagtaggtgtgttcttgacacaattgaatgcagcaaagggaagagagagtcctctagtggactgtgttgagttgaggctggctttggacaaatcaagatgatacaagccgtgcttaagatggccccgaagaagaacttggcccgtaatcttgtccttgacaacacatgtatcagaatcaaacaataagatgatattattatcggtagtgattttagaaaggctcaataaattcttggttatttttggagcatataagacatcatttagtaaaaatttcttgctggaattacttgttgcaaaggtagaatgacctattttagaaattgagatttgagagtcattacctacggtgattttggctttgcctttgtaatcatttattgtggtgagggtttgagcatcattgctcatgtggtgtgtggccccactgtccatataccaaccattgtcctctgcaggtgtgtttgaatcagatagaagagcctgtgagttgtggcctgtgtgctgagagtttgaggatgatggctgattgtctgtatcgtatctgtggtagcatttgtaggcaagatgaccaatcttgccacagatttgacagcctggacgagaaccacgtccacggccactggagggacctcgtcctcctgtttaagacccacgaccttgagtattgccacgaccattagatgaacctctgccagtgttggtgcgattagatccagtgggatttttattgaactgagcgtagttggcttgagcagagtccaagagttggggagtggtttgttcaattcgcatctcttgattttgaagcatatactgcacttcttgaagggttagagcatcagctcgtgcagtgaggagaacaacgactgtctcgtattcatggccgacacctccaaggatgtacatggcgatttcttgatcagataatttgtgacctgcagcggcaagagaatcagcaagattcttcatcttcaagatgtattcatcgatgctcatggaacctttcttggtattttgattgaatggcagcaagacgaagttgaagctggcgagccttggattgagtggcaaagagactagcaaagactgtccaaacttcagcagccgactcacagtgaagaacatgtccaagcatagcctcggaaagagaattcatgagccaactcattaacagggcatcacatcgaatccaatggtcaaaggcagggtttatcgaatttgtacctgtaagaagcggttcaggccgtggagttgtgccaagaaggatgccatcgagtccctgagcacgaacaaaaggaagaattagagatcgccaataggagtaattgtgtcgatcgaggcaaatattcagcggaaggaggttgttgggaatgtgaaattggatggcggctgcctgaggtgcgaccggagcttctggatatggtggtggcgcagggtggcgggggtcatcaagatcggccataggtatgataccatgtaagagcagaactaagaaagaagatagagagaaattgaaaagagaagctctgtcctaaactggagcagagaaggtgtatttatatacattgagaacttaacaatattacagtgccacatgggcaagcattaacagaaagctaaacagaaaattaactaattaactgaagcctaactaactctaacacttatgataccaattataccaaatatatagtgattagttattgttctataattcttttaaatcttagttttcatttattttgaaatttagctaattgaattatattatactatatgataactaattagtttcttaagtagttttgaaatgtcataaagaaaaaataaacatatagctttcaatgtaacaaaaatataacaacataattggtatataaaaataatatcttgttatagtataggcaactcattagtttcgaaaataaattttaagttcactataatgtattttaaataataaactatcataatataacttaaaaataactaattaattactaatatatatacaaataaattttgaatatgatataaaaataaaaatttttatataaaggtaattaattaattttttcatttatcaacattataaataacaaaaaaaattactttcaataatacagaaaaaagaaacagatattcaagatttattgaaatttaaccacttgagctaggtgggtgtgtgttggagttcctggatttgagtcaagtaaaacatgattgtatgcttaaataaaaaaaaaaaaagatttattaaaattgaagcttgagatcatgtgaaataggtcaattttagttgacgtgataggttagtaatattaatagtatcaaattaaatacaaaatatatgtattattaaaaacttcactttatattttatttttttatgacaagtgctattctaaggaggttttggggtggggttaactttttattttctgggatagatgaaacacttgcaaaacacgtgactttataagaatgatgatacttataatcacaatttcttttttcacatttaataacaaattttgttgcgaataaaaataagtttgtagcagtaatcattattatggtcaaagaatatgaagagtataataacttcacaacatgaacataaaccttcattttgaatcttaggatgaattaagaattagaaacttacattgttgacaatagaatttatgtgagcaagaaagaagcctgattgaaagatcatggaatactactttattagtaaattttcaattagcatactacgtatagcacaatcatatgcataaataaatatttatatgtagtgttaaggtctaattttaaaacttactcattcttcaagtaggaactccgatatgtgtttacaaatttaaagctgaaagattttaataagaaaatgtcaagagctatgtgaaaaataaatcacacaaatttattttatatgaaatgtttacatcactttctctatacttaatattatacttctaaatattatatatttgtctaaataaaagaatcataaagggagagacaaaaaaagtagaaacaatataatattataaattactattcacaaaaaattaataataacaacttgaactaattttttgtctaaataatgttagttaagcattctgttacttttctgttagttcgttaatattagttaagttcagctttggttgttattttcctattcagcacgtgtactttgtatcatctttgtatataataaagaggtctcaagctaaccagttggttaagcttttcttggcatttcattctttagctctgcctttatgctctgctttgttttctcttctttgtgtttgttttctgccattaataagcttctacatggtatcaatcgccattgacatctgtcattaatggcttccactgctactgctactgctgacactggaaccaacaacgatcctttaaactccactgctactgctgccactactcacaaaatctcttcgtcttcatggagtccattctccaattctctttctgcctctcttactgtcaaattagatcgtacaaatttccttgcttggaaatctcaggtggttcctacggtcattgggcatgaccttgatgatactctgtttacaggagttcctccttctcagcatcttgttaatggtgttcccaaccctcagtatcaacaatggaaaaagaacgatcagcttcttctctcttggttgcgatcatcgatgtccgaaggagttcttgcatctgttgcgaattataccagttcttattctgtttggaaggctcttgaacaaaaattcaccagtcaatcacgtgcgcgtctcctacaactcaaaggtgaattttctcacatcaagaaagggtctctgtagatatctgattatattgataaagtccaaactctctccgattctatctccatagctggctccactgttgggagacaagatgttattcttcagttactcaacggattaggtcccgaatatgatccagttgttcctggaataacatccagaagtgatgaactcaccttggaagaggttcaggctctcttaatggctcatgaaagttgtctggatcagcacaataatgtcaatgatcttacgctcaagatggaagcaaatcttgcttatggggcatcaagaactggtccctttaaaccatctcagaatcctggacgtggctcaacaaatgatggttatgcaagaactcaaggacgaggattcaatcgtggttcatatgtcaactcgaagctcatttgtcaagtctgcatgaaatctggacacacaactgttgtgtgtcactatagattcgacaaaaattttgtctcccccaaacctggtgtctttacacctcgtgcttacttgactgaatatgaaactactactgattctcataacaccactgtccttcctgactttggtgatgatctatcatggtttgttgatactggggcaacaaatcatatcaccaacaacctagagactcttgaatcgtcaaatgtttatgctggatccgaagctcttgctgttgctgatggtaagaaaattcatatctcacacattggatacacctctttaccttcatctgttaattgtccattaaagttaaattctgtcttgcaaataccttcaattaaaaagaatttaatcagtgtttctaaactaactgaggacaactatgtgtttcttgaattccataaaaactggtgctttgttaaggacaaagacactggacaggtactgctccgagggaagcttaaagatgggttataccagttggcagatgcctcctcttcatcctcttcaactactctccaatacaatcttgtgtctagtcagtttgttgactctgaatgtgtctgtaatcaaacatgttccaagtataataatcctggaacaaattgtactttctcctcaatcaataaaacatctactgtttctgattgttctaccctcaatcctgctctttatcatgtttccacaaacaaagatgttaatacttggcattgcactcttggacaccctgctataaacactttaatcaaactattgccccatctccctcacactggatcgattaaagatttgactttttgtagtgcttgtcaacttggtaaaagtcacaccttgccctttccctcatctgaaactaaaaccagtcaacctcttgc

SEQ ID NO: 45465 - DNA, 3454 bp, Cannabis sativa
caatcgttacaaactacttgtcgcctactaaattagactcactgtcgttggctaaaagcgaggtcaacaaatctatagaaaacttatcatatgatttcaaaactgttctcatctccgtatcttacttgtacgtagtcaatattacattcaagggtcttgttattgacatatctcacctatataatatgatcctaagtttgaccccaatatatttattgtatatataaaacaaattaaataatgagttaactactcatttttataaataaatgaatttgaacaatttttttttataaaagaaatatatcaaataaaatatataaattaataataaaaaaatagatagaattgataaaaaaaaatctataaaacctctactactgctgctactactactactactactactactaataataataataataataactatatagatagtatatttttttaaaaaaaaatattaatttgtagatttaaaattgttattattactgtatcttatttgtgattgtcactatattcaaagtcattattattaccgtaccactcatagtctctaaattcaaagctattatcactcactgttttcactttgattcagaattctaataaggagttagcattatgagagtatttttttctaagccatgagcctaaataaaaaaagtatatattgatcacattccaaaaaaaaaaaaaattaattaccaatattgatttgatcatgttacacatataattctttataaatgatgcacatatatgcacatcgttttcttggccagagaaagagagtttttagtttttttttattgagagttgttatttaaataattaatttacacaatttgttattatttgttttattatattatattaaatgttcctaaaatatttcgataaaaaataataagagaaaattttaagtaaatgtaattgtgagattaataattttattgtatattaatatgtcatattttatgaaaaattaaaaaaataaatcatcataaaaattatgttagtattttagaataaaaattaaaagcctatttattttgtaagataaacaaatatatgatgctattaagtttaggataaataaatgtataatactatttttttaacccaataaaatagttgtagatcggtctaaaaatttagtattttactaaacaaaatatcataaattttgaaagaaaaaaataatataataataatactaaaatttgcatttgaatttaaagtggttgtagatcttttaaaattaagtattttattaaaatggtattatcaaattatagttatcaaaatatctccaaatacctaaactatctactaaaatattttaaatttaaaaatttcaaaatattttaatataatatatgtaaagagcataatttatttatattttaaaatgacaaaataatcacgtgatgttgtaaataatttaccacgtaaatccaatttaggaaatgctttttttcacgatgaaatatttttattataataagaaacacttacacattaatttcagaagtgagttctatagaaacgtatagtattaatgcatttattatatgtcttcttatttggcatccgtatcaattaatattaaattaaaaaaataattataaaccataactaaatattattatataattttggtaaacataatttataattttaccaaatactcatctcaagatgcaattatttatgtaacaaacaattaaattaatttttaacttaaagaaaatattatctcttagttccaactataatcattgtttacactcaaaaaaaataaaaataaaaactataatcattgtttttttaaattaaagatttatataataattaaaaaaaaaataattgttacagataataaagtgtaactcaaccaacgaacactaaaaaatattatgataaattaacactaaatttttctttaaaagctaagaactatttttgtatcattattttcaatcatcataattgaaaagaatttgttttactcttaagaacattacttaatctctatcaaaattttatttccaaataatttaatatactatttcaaaaattcttatgtatctcaaaatctttcgacaaagtaaaaaattttcattcaaaaaattcttaaacataaactataaaacaatttgagaaaatatgttcaaaaaaaaaaattgcattattatttttcaaaaatggaagcgtgcattagttttgatatgatacattttaagtataaaacaatttgagaaaatattaaatggagaaaataatttttatacaacttctcaacaataaaaatcaaatcaattttcaccaatatttttttcttaaatagcttttttttttttgattataagcttctgtaataaacttcttctaccatcatatttattatctctgccttctttatttcaaaaatttcgtctctttctacataaaacatacaataatcaacaataaaaaatagaagagctagaaggcagaaaatgtataaatattttttaaaaaaataaaaagtgtataaacttaattctctatcatatggagatatccaatatatattaatactaaaagcaataactaatattccttaacaaatttttagtatgcaactaaactaataaaataaaataaatgaaatggtaataaataattgcaaaaacaaaattttcttggctgccaatctataaccacatgtcataaccataaacaaaaagttttaattgttaatactcaacatgctgtacttttaaactcaaaattgaataaattttttgtgacgaaaacataaactctaaattagaatcaacatattttattctattttcatggatttaaagaatggagaggaattgacataagatacctgatacgtggttaggccagaggagccaatggaatggcaacagagataaaaaatttcaaacaatagaattaagggattgatgataacttgcaccaataatatattccaataatatatacacggttggtttatgtatgatgttatatatttttctatatacacggtcagtgaattgatattccaataatatatagggttcaatttggaaagattttaaattaaaataaaataattggaaaaataagagaattaagaagagaatttataaaataattaaaaaaataagagaaattaaagtagaataaaaaaaattagaaaaatgagaaaattaaggagaaaaaagaaagatgactttaaagcatttttagatcgccacgtcaccggcttatacttctcctttatatatagatagatagatagatagatacttttcctttatgctaggtgaatgttacgtggcaagccacgtattgttagttttatttaaggttttaatttttctttgttcgcctaaaaccccacttctcaaatcaaaacaataatatccagaataatcaatgttct

SEQ ID NO: 45466 - DNA, 3323 bp, Cannabis sativa
tgtttaggttgttaaataaacataattgtgagtagatctaagttcctggtaaaatataattccaacaagataatcatagattcaccactgctatagcgcttcagaattccacaattggagttgtatcaagacaggaaggatcccatggaccacttgtccaggtataattgcattatccaagttgccaaggccagtgatgatacaaaatgcctttgcttttcactaactttaagcaagtccatgaaagattggtggaagagattagctctgagatcaatccttagctggaaggacctacaagcaatgtttagaaaacagtttgtagcaacaaaggactttgacctggaggccagttctctgaccattttcaaatagtaaccgggggaaattctaaagaaatacattgaatgcatgatggttgttgctactaaaactaaggttactgatgatatgaagatagtggctttcacatcaggattaaccacaaggtccttgttgtggggagatctccaatgtaaaagggcagatattttaataaatttttgacgagagctcacggattcataaacttagaagaagattatgctcaagcttatggggtacttccatcaccttccacagacctagcaacaacccaaacttcacagatgactactccatcaattttcccttcagcaattgcctttacaactcctactatttacaaatcaagtgcttccacacagccagttgcacatgctagtttttcaagattcagaggggtgcaaatcagattcagtgctgctcttggaaaaatgaaccaaaatgcagaagctccagaatgtaagccattcacggagcaagaggagttctaatggtccaaaccagtttgaatttgcgaagaaaggagagactcaagagtcttgatactccgagtatacaagccttgtagatactcaagagaacatttatatggaaacttgtaacatgatccattacaaaaaacctccgccaatgtacaagggtagaaaataaaaagtggcccaaacaagaagtgcgaatacgacaagacataggacaaatcactaatgaatgtcactatctgaaggatgagattgaaggattagtacgaaacagacatctatccaattgggtgagaattccaatgatttatactggacagggggttgcacatggacaactcttcattcctggacaacatggagcaataattcctcctcagggaatacgccatccacaagctcctagaattcaagctccaaatgcacaagccctttaaggggcataaaatggtctagtggtgagaattgagtagctcctagtcttggaagcccatatcctcctggagtagcccagcctatattagatggtcacgtggcaaccatttttggtggaccacacattgctggaagcactcgaaatgcacagaagaggtacttgaatgaattagatcaagacgagacttttaatttggtacaatcatctacacatcatcctcgaatgattaatctaccaattactttcacaaaagatgaggccaagcatgtgcatttttctcacaacgatcattggtgatagaggcccagataaaaaataaaagagtttccaggaggatccttatggataatggaagctctgtatatattattttaaaggaagcattcaaagccataggtcttgtagaagccaatctattaccttatccaattttactccaaggcttcaatggagacacccaggtccccatgggaaaaatacaacttccaatggcaataaatggagaagtttttaaaagcaatgcaatgtcctctttcaagtacaacactcttgtaatagttgattgccccatagcttacaatgttattctgggacgacaatttctggtttattttagagcagtaatatccatctgccacttttgtcaaaagttccctcgtgatactggaagcattggaacaatcaaaggtaatcaaaaaagtgccagaagctgctacaatatttcaaccaagaccgttctcatggtccaagaagggaatgtagcagaagctggaacatcttcccagccagcactgtgggtggtctaagaagaagatgaactagatccacgggtaggcatggaacgaataatagaacctagagatataaaaagtatgcatcaatgatgaagatcccaccaaagttatcagagtgatagaagaatttacctctgatagtgaaagaaaagattgtctttacagttaaggaaaatatgtattggctgggaatcattctgatatgactggaataagtcccagggtgatctatcacgcactgaatatagacctaaaagttgatccaatttgacagaagtggagacctttatatccagtaagtttagaagcagtgaaggcaaaagtagacaagctaaaaaacattgattttctcaaggaagctctatttcccatatagctagccaatttggttttggtcccaaagcctaatgggacattgagaatgtgtatagatctcatggatctaaacaaagcttgtcctaaagacatctttcacttccgtgaattgatcagatggtcaacacaactttgtagtatgaacttttaaccttcatggatgcatactcttgctacaaccaaatcaaaatgcacatggatgaccaagagcatacaagctttcaaactgacaaaggtatatattgctacaagatcataccttttggattgaagaatgctggagctacttaccagtgaatggtaaataaaatgttcaagaatgtacttgggataatatgtttatgtcgatgacatgctgctgaaatcaaagacttccatgagccatcatgaggatttaaaaagaggctttttccatcatccatgagtatggaatgaagccaaacccaaagaaatgcacttttggagtttctttagggaaattcttaggtttaatacttagttctcacggtattgaggcaaactcgaagaagatcaaagcccttcgacatgccttcacttagaaaacacaaggacgtttagaagttaactggaagaattgcaacacttagcatatttgtctccaaatctacagataagtgcatacctttgttcaatgtactttgaggaaatggtaagttggaatggacaactgagtgtgaagaagcctttcaacaacttaaagaacatgtaacacaagattcaatattgtgaaaacaaggtgagggaaagtcgttgttcttgtacctggcagtgtcaggtcatgctataagtgctgccttagtgtgagaaaaaggaaaggtacaatttcttatttattacgtaagcaaaagattgttg

SEQ ID NO: 45467 - DNA, 1330 bp, Cannabis sativa
gccggagtcattccatctggacccggactcttatctggatgcatctgaaatagcgccttcttaacttcctcttcttgaatgggctgacacaattcagagtttacaaaagccgaaacacaaggatgaacacaatctaccacttccatacagtttgtattagccgaagtaaataaattatggaaatagtcttgcataacttctcctagactcgactcccaggttacccagtttccttgagcatcttttaattgctcaatttgattgtttttctttcggctactagcagccttgtggaagtaattactattttggtcgccttcccgtaaccaaaattgtttcgctctctgcttccaataactctccctttgatcaagagctttaaaaagcttttttttcacctccttgtagacttgcaccgaactaacgtcccttttattctgcagctttttcaactcttttttatattctttaattctatgattaagagaccccgtaatctctttgccccaaaccttaagcttctcggcacataagcttaatttgccactcaagctataagtattaccaagttcccagcattcttttataatttcaatacaaagcggctccttcaaccaagtgttttcaaaacgaaatcgatggtgaggagcagaaacagtgggaagaaacggttcaaggaaaatggccgcatgatcagaactagagaagtctaaattagagagaatagcttgtggaaatacctgaagcaaagccgatgttgccaaagctctgtccaggcgaatctcgatccaattattagatcctctccccttttcccaagtgaacgggtggccttgaagatcaatatcaaccaagttgcattgctgtaaagtcgcattgaatcccgaaagtaagctttgaggatatggccgaccccctctcttctcttcttgccgaacaatattgttcatgtcaccaataagacaccaaggaaggtccgaacgtgtagacaaggttcgaatcaaattctaagtatcttggcgccgactccggttgggttctccatagagcccagtaagcctccagttaccaaattgagtagtgtgaacaacaatgtcaatatggttattagaataacccatcaaactcccatcttctttattcttccacaagagagcaagcccaccagctaacccaattgcatcaacaataaaaacaccctcaaaacccaataatcttgcaagcccatcaacttttaatttttgacattttatttcacacagaaaaataaaattgggtctcttatgagatacaatggttacatttttattgtaactatcatggttacatt

SEQ ID NO: 45468 - DNA, 6698 bp, Cannabis sativa
aatcataaaattattggtttgccaaatagaatcataaatttaatctagtggcattcagcccaatttcctgtggttcgacctcactcgtgtgcgtttgttatttgaacaacgatacgtgcacttgcgtattaaattttacaacaaaaacccaaagtttgctagtcatacgcttgtcgcagcgaagaaaatgctcgtcgtggaaacaaccgatcttgccgctgtgaggcttaatgctcgccgcggccacaagcttcttcagcaaaatttctccattgttcgctgctacgaatctctaaccttcactgcagcaccaactcacaggttttgggctccataaatttttaaaactctagaaaaatattattttgacgagtctttcatcctccaaaacatctcctaaacatataaacattgaatccattaatttttcttcataaaactcagtttaattttaaatctctaaaaattcataaatgaaccgagaacactaaagatattaagaaataacaaaataaacacgaggaaattaaaaataatttacagtccaaagtactcttatgagtagttagctcttcacttggctctctttatgtcacaaaggcaatttgaatgtaattcgtttgtggttgtgaggtgggtgtgtcatcccatttcaatatttttctgtctattttttttttttggtgatgtaatttcattgaaagcagatgttaatgatggttcctgtaatgttaatttatattttgtgaatggtattgtttattcactagctacttttgttactagttcggtaggagagtctatttgggtagatgcttgtttataatttttaaactttttttgtaacaactaatttaatttaatttaatagtttagataatctactttgttcttgttagtgtatttagtgcctcatgtgataaaagttgaatttgaattcctttatgcggttaaaattgcaccttatgcaatattgagaatactaaatttatatatataaccaaagttaatgatactattttagaataaattgaaagtgataagttatttaaaattttgaaaaaaaaaacatttactttatactgtacttctcatttgttaaatgacgttggtacttttattatttatgtaatgtaaatggagaagataatttttcttaataagtttcaatatttaaaaaattgagattagagttttgtaatcaatctgctccaagttctgaataatatcattaattaaataagagatgaagttgacaataattaaatgaaccgtacacttaatatattaatatttaatattaaatagtagtagctaggcatgtagaagaaaagtttgtaagaaatatgaaaggaagaaatgaaaaactgtacttactatcacacttcacatgggacattttcatgggtggacaacagaccaatcatataagaatgtgatgtgtggagttatacattttaaagcataattacacacattattgtataaagtaatcttaattatttatagaacaaagctaagcccctaattattaggcatctaagggttatataatattaattctacatgaatggatgtaaataatttatgttttttttcaaaggggaaaataatttatgtttaaaaagtgactttgtgcagtgacacctcttaaggccaatttgttatgatgaatcaatcattaaaataataataaaaagataatgtaaaaagttgaatttaccttatcgcataaacttattctaatttgtagattccatttggattaaagatgaaaagattagatccctaaaactgtcatttttcttttcacatgtataaatcatttgatgaaaaaaattgttacaaaatatgtattttttagctgattatattatttggtttaatttattattttgtgtaaaagaatctagtatcttaacagaatcttctaattgtcccattatttgggcttgataatcaacttaatataaaataaggctatctttttttttccatgtgggtcgtattaaaagttgaaatgagagacagagaaaggccttctttggtgagttaaaatattagttatttattttaacagtgactttgaaagggtaccccatgtggagatcaatttcattttgtgcttataggttactgatgtacagtccataagaattacaattttaaactaaaactgaataaaagtaaggaatttatcttgatttcaatgacagcaaaatgatttatttttattgatcattagcacattataattagagttcttgaaactattacactcaacaatagtggtaagaaatttagttctgatacataagaattaacttctttctatatataattataactttatttaaaatcacacttaaataaataaatgtttaatcaaaacaaacaaattaagaatcaaaatcagcaaatacatagtaaaccaaaaagataaacacagatgaatctagatagcttccagataaacacacgagaactatactggtttcgatcttatgttcaagatgaacttggagatactctagtttgaaagcactgccaccaatctttattgataatgagaattagagatattaatctcaggagctacaataaaataatcacagttaagtcatccatggtgtaatctctcaacactcctcactaacacgagccaacataatcgacaatgttactcaatatataatttcccaatcccagctcactctttctcaaatatctctatcgatttctcactctaatttctctctctactatgttgtgtctctccccctttctctggttgagtcttcttcttatttctcttttaaaatgagaggagtagtcctctttatatataccaaagaacccaaaatacttgctatcatatttaacatttaagttagttaatgaacaactaactaactctaaccgaatcttggttagggtttaaggaataataccacaatgttgtatcacactacaatagcctcacctaggaaacccttgatcatatacacaaggaatctatacaaccctccttcactcacactagttctaagacataaattacaattgggagagaaaagaaaaggagagaaaaatttagagagagagagagactaatatgggtgctaagatgactgtggtgtagagttgttatgtctatttataactttgacagttatgacagagtggaaattggggcccaactaacttgactatcatttaagtataggaatagatagaatgctaaaaaaaggatgttgtagcattttgcccttaactggttttgtgagctaattctcaacatatcaacctgaattagttcaggaaaccagtgaagagtgaaagactaaagactcaacagtcttgaatgctcagtaggttcagacaatgatgaaacttgtctctgaaagtacactttgtgaacatatctacaaggttgtcatgagtgcatatcttcctcacttgaacctgttttgagagcattatatctctgataaagtatagtttgatatcaatgtgctttgacctttcatgaaacataagattttacatgagttgcaaagcactttgattatcacaatgaactgttatgtcttctaaattgaaccctaactcactggtcaaatcctttagtcatagtgctttattgatgattttggttacaaccatatactcaaccttgtagaggaaaggaccatgactttttgtaggttagatttctaactgatacaccttcttaaaactgtaaaaaaataccctatacagctccttcttgtgtcaatgttggctgcaaaatctgagtcaacaaagtcagtaacttcttctctatgttggctttcattgttggatatcataccagtgttaaaagttcatttgatcctcttattctagtttgactcccaaattgtttaactccaatatgatctgattgaagttatcaagatgcttccagaggtctttgttctcatccatccgaagtgtgtaaagctttttcttcaaataaaggcttttagccaaagatttcatcaaatatatatattgatgtcgatttcttccacaaactgaatgtaatctcttcatttgatacttctcttaatatctcatcaccaatcaacaatatggcactatgtgccttcatctcagtttccctttttatcttctcatccttcagttctctcattcgatcatcatcaatggcgcatttgaaatttcttgatgaactaatattgctttcatttttattctccaataactaaagttattttcaccagtaaatttgtcaacctcaaatcttaatgtagccattttcttgtcacggttcttggaactcaatagataaaaaaaaaaaagttcttagtcctttcaattacaaccttactctcatactatttgttatgaaaataacaaacagatttaacaccaagatttttacttggttcggaagactaacaatgagcttagcaacctactccaaggatctgaacaaccataacatttggctagaaactttattgatcaacttgatttgattacaatggtgtatgagtacacaaatagaggagactagctcctttacaacacaatctcatgatagaagtcttctctaaaatgaacaatcaattttacaaccctcaatcctctgacaccttacataatcactctctatgagtttttaatttgagctgataataattaatgaatataaagtttctttttatagccttaaaccaataactaacataacaatcaaattagccacctcaactaccatgtcatcaattggtttgcaatcctaattagttgaataacaatcaaaagacacatctatgaaaaatatttttattcgtatttcccataaaataaaataaaataatattttacggtaaaattaccttgaaaatatatattctcgtcggcaaatagattaagtattttatttctaaatcacataataaaacttaatcaaatctaatctaatagtatcttactttctaaacatgagttagaagttattactaaatatttaaaatatttaagtagcgaatctagtactattcaaataaatagtaaactacaatagtggagtaaaatctttctctcaattattcaagattggctgcggaaacttttgtggttagtgctatactaaggccacaaaggagggttctcctaatctcaatagacaatggtatttttataatgttaaaaaactactgtagtaataaagagaggggctgagtggggattgttggtgcactttgtccgtacaaataatgacttgcttttgacttagttttacactttcttaagccgttgcatccacttcttagccttagaatatataagagccactcgtattagctctttaatgttgtttggtctcttaaatcttccctccaaatttttctccatcttcttcttcaacttttttttctattctttttagcaagagtggcccaattttgatgttccctttacactagtacaaaagataagtgtttttttggacatgcccaatttgcccatagaaaaagggaaggttttttaagttttgagctctttttttaatttatgcagaccaaaatggttacatgtagaaacaaggaagtcaattaagtaatttcatctgttaggcccttggatgatatttattagggaaccaagtttgatacctaacatttctagtttctcacattatcccccaccaaaaaaaagaacaacaaaatgatacctaccatctaacattctagtatacttgacaaaacacaagttatgacttgtttatagctagggattgatcaaattaggtaaagttccccactaggattttcttttaaaaaaaatcacatatgtaaccttctaattgtaattttttagtcttgggaatagaatttggtgtagcaggtaggtgataaaaatagatgggggaccataccatatgtggaccttaaggcccttgccaaaaactatgtggtggggtccaaaggggcaaaagaatcatgagtttttagtaccaatgctatggattggagaaggcttgttggtatgggaacatcgtacacattttaaaatttgcattaacaccaaagcttaatttattaatcacccaaaggccaaagagactatctaaacaaaatttcagtggaaggcagttaggcagtccatcaaaattctatactttttttttagaaaaaaaaaaatgagaattgggattggaagtgcaatggatcaatattattaacataagatatgaagtttcctcatttgttcatcttcttcttcataaaacatcaattagaaatataatcactataaattaatgcttttgataaaaataatcagttcaaccttttcaattggtttgttcttttgcccaatgaaattatggttgatttgcataacaccacatcattccatatgctatataatgggatgtggggtattttgatcttctcagttagtgtttttaagagttttatacatatacatttgtgtaattgattaactcgtttggacctgtttttggatgcattcaaaaagccagtattcatgatgaagtctcccttgaatttaatacataaagttatgtgtgggtgataagcaattagcttaacaagtattgaacattcacagaagggtgtaataggcatgatgctttcgataagggaaaaaggtccatatatttgatgtataatcttaaa

SEQ ID NO: 45469 - DNA, 1372 bp, Cannabis sativa
aataaaactaatttagtcaccacaataataaattgttatttttgtgactaatacttgtagtcacagcaaaagaatgctgatttataattaattataacttttttacttttagtcacaataaaagtaaaaaaattaaattttgtagtgccatatgttccaattcaaatccccaaatgctaagaagaaaaatttaggccaatttttatagtaaatgttaacactaaatatattgaaaggtaagagaaagagacactaaccaagtaataagggattataggtacaactagagaaggagaagaggaattattaggagatggtgaaagggcatgaatagcagcattgatgagttgtgttgagccagttccaaaaatgatgtatttttccttagtgactgcatttccaacaatgtcatgcaaatttcgaattcgattttcgagttgtttagacatgtaacctgtttggttgaagtaataactcattctatgccaaccagataccaatattgcacttctagctgcattttttatccagaatggctccaagaataatggatctccactgcattcatatacataataaatatatacatatatacaccacaaaaaatgactacctttagtgacttagtcacaacaaaaaaaatttgtgattaaatgtaatttttagtcacaacaaaattaaaaagtttcttgtgactaaacatggtatttagatacaagttgtcactaatttagctgtagtcacaacaagtattataactaaaaacacatttagttacaacaaattttgatttttgtgactaatacttttagacacggactaaccataacgtaggaatgataatttataactagtaacaattttttttacttttagtcacaaatttcgttgtgactaaaagtaaaattttttatagtgataatacatatatactataactacagaagtataatatgaagtgtagtgttgtaaatttttttatttttttattttttttgaactataaaaatgaaaatacattttttaaaaagaaaaattcttaattataactatttttcgtttgcttttgtttttatgttaatttttaattaagtgatgagaaagaaagtatattatgaagaaaaaaaatagagtgaattaatattgagaaaagaaagtataaaatagattatatatggtgaaacaaattgtttgaataaaatttgaaagtgtaaattattttatttttaaaattttaaaatctttattcttattttaagaataaaaatagttttaatttattatggaaaaatttcgaaaaaaaaaaatccattaagaaaagagaccaatatatagttatttacaccatatccttagtatatatatatatata

SEQ ID NO: 45470 - DNA, 618 bp, Cannabis sativa
actcacttacagtaagctgtctaagaactcttgtttaacaaatctttaaggctatgtttggaagttggattttgaagagaaaagaaaaaaaagtaaggagaatttaggaaaaagaaaagtgtggaatataaacaagaaatttaatttttgttcgatatgaaaattttgttgaatcaactttatttctatacaattctttccataccaaacatgagaaattatttttattttctttctacacttttttcccctacattttttttctcattcttttcttaccaaaatctaactttcaaacatagcctaatggaatgtaaacaatttggactatgttatgtttcttttgtggaagtgagataccattacagtctgttctctctctaaggtgctagtcctttctgtgcacgaaaggtacatcttattgatatttggaaatttggacttatatgttgatgtttccagattatggggttgacaagtatgatattggatctgggtttggtcattttggtgtagcagttgaggatgtaagttaaagactaatttttttttcttaagcaagttatgttggctttgttttcatttaagcatgcagaccttagactgtacctctggttt

SEQ ID NO: 45471 - DNA, 990 bp, Cannabis sativa
taatatggtgtctgaaaaaaccaggtgaatggagaaatctataaccatgaggaactcaggagccgtctccccaaccacaagttcagaaccggaagtgattgtgatgttattgctcatttggtcagtaggcagtctaaaaattttgttactaaatttcccacacaaattattagattgattttttgaaaaaaattcttttatcttatgtagtatgaggagtttggggaagatttcgttgacatgcttgatgggattttcgctttcgtgttgctggacacccgagacaacagcttcattgctgctcgtgatgctattggagttactcctctctatattggatggggactagatggtattagttttagtatatttactctgttttacatggtgaaacttatgtttctttttctatgtttggtaagtgaggatgaaatgaatgatcgttgtgttttgaattttgtattcaggatccatttggatatcatctgagatgaagggcttaaatgatgactgtgaacattttgaggtctttcctccgggtcatttgtactcaagcaaacaaggtggattcaggcgttggtacaacccaccatggttctctgaggctgttccatcaaccccatatgatccacttgttcttagaaaggcttttgaggatgtaagattctagtcaattctgattttatttagaattaagtcaacttcgtttttgttttgacaaaataacttatgtattgaaacataacacatgcaggctgttatcaaaaggttgatgacagatgtgccttttggtgttctactctctggtggcttggattcatcgttagtcgcctccatcactgctagacacttagcaggcaccaaagctgccaagcaatggggaacacagctccattctttctgcgttggtttagaggtaaattacttattcaaaaggactcaacatcacatgcctactttttctttattttgtacttggtattaagatct

SEQ ID NO: 45472 - DNA, 804 bp, Cannabis sativa
attggaccgtacaccttggccaaagctgagtagtcatggtgtatgtttgaacttaggaaaggaaggtatccgactagtggaaggccgtgaggtcctggtggcagtggtggcttggacgataagtacttctttcttgtccaactaaaccatatcaaggcaaaagctgccaaaccaaaaagaatgagaatgttataaagctcataaccataatatttctggttggtaaacatagttttttactagctagtgtagtattagtatactcgctatatagatggtatctataatacggtttacatatataatatatttgtagtgtatgtatatgtggggttatatgtagaatagttggaacttgaaagcgatatttatagagtgaagtatgtgacttttcttcagttggattacggatcattatatgtggttcatatataccggcaaaattattttcttgaaattttgggtttgagctaaagtgagctgttctttgatttttctttgtttacttttcatttaggtggggtttggttggaaaaaatgaaaatgtaggaatagaaatgggaataaaaatagaaatggagtgatataaaatttaaaatgcattaaaaaaaattgataaaaatatcattaaattttttcttttgttatatttgaatgatttttatttcctttttaatatggaatggtcattccatcaaaatggtaaaaagaatattccattgaaatttcaatattttaaaatgcaagcaaacaaatgaatgaaataaaaattattgtctttccattctattttattacctccaa

SEQ ID NO: 45473 - DNA, 1237 bp, Cannabis sativa
tagaaatctttggcataaacttcaggatagtttgtttgatttatcccactgaaaactgtttaacaaacaacttatttcaccacaaggtcggctcaagtcagttgaaggcctagctatttttttttcttttttagggtaaccaaatcatccattttgtttatattttttttatgtccaacaaaattagtgtaggatataaaaatgttttggcaaatggaagtatgttaagttttatgtcctaaataaaacttaaattcagtctaatattatttttaattaataaagttcataaatcatattttcacgttattaattacaattgattcacatatttatttacgtgattatatgtttaatgtataaatcctatttaaatttacaacatataattattcataagtaatgtcatcacagtagaaaataattatgattatatgcttcgaatattttaagtttcatgatttatcagtgcactgaatttacattaacgtaataatcatcaataaggtttacttacacttttggtaagtggtgtgtctcttcctagggattaagcaaagtaaacttttcattagatgtataaggtttacatcagaatgagatcgatattgacaaatagaatagttatcatatttactgttataactattctaaggtaatatcaactagtttatcattgatcaattaaatttgaatcttgacatgattgaactttaagctaattgtgctatttgaagttctttgattttttcgttgaaagcatacctgtggtctagccaacacttgaactttgggacatcggtagtataaatgagtgggagtgttaatcatagatatgaacatctatagtctctatttattagaagtgaaatgataatttcctttgagcttggtcaaaggtgttgaatgaaaagatctcatttcagtaattatattagtttattaaaatctagttacaagaaactaagtgttgaaggataaaatacattgtgttgcgaaatattcaagctacgcaagtatacgtatcgttttaacaagtagtactcacacagaaaaggtcgaacccaagtgttatcccaatttttatcctcatgacatggcatgcttacgtggacaaaaccaatgcgacgtggcggtacaactcactaaaaagaaggccaagtcaacacatgagcaaacgaagacccggacactcaaaaggggatcaagctacagaccagctccctctcaagagctg

SEQ ID NO: 45474 - DNA, 1013 bp, Cannabis sativa
gtcgggggataagttggtggtgcataaggataacatgggaatgagattttggaatcatcaggattttaatcttgatatgctaggaaaacaagggtggaggcttctaactcaaacaaactcgcttgttagtcgtatttttcaagcccatatttatcctcatggcaagtttctaacaacaaatttgggttcaaatccaagctacgttttggcaaagtattcttgcatcacaaaatttgttgaaagcgagttgcaggtggtgtgttgttaatggttcttccattgaatttttggggcagtcatggctccgtagtgaggagcagtcattggttacttcctctagcaaaggtctaacaaattatgatggacggagccagagtatggtatgataattcttaattatttattcaatatttctgatcgtcatcttattaaaagtattactttgaatgataactctggccaagatcattggtattggtttcaagagaatttgggagtgtatagtgttaaggatgcttacaagtatcttcaatttttacatggaagatggtctgaagataataattttagtttttggagagctttatagaatctcaaaatccctctacaagttaaggatcttctatggagagcttgttcagggtgtctaccaacattgactcagcttaagggtaggcatgtggatgttcccgttgtttgtccagtgtgtcatgacatggtcgaatcaattcttcacatattggtcgatttcccattagcaaaggtatgctggcaccgggttgatgaggctttatggctgctctcagctgtagatttttatggctagtttcatcaagttttattgggttttttcgaagtcaaaagtgtgtcatattaccatgatttgttggtctctttgagattcttgaaatggtatggtgtggcaaagtaaaagttttgttgctaatgatgtggtggctgcagcgttgtcttaattcaatcaatggaaaaatgctcatggaaattcaacaaac

SEQ ID NO: 45475 - DNA, 1879 bp, Cannabis sativa
aacggccaaaaaagttcaggagacatgatttggtacatgtcaaagttcggggggaaaaattaataattagcttaatttttattcattccaactaaacatcacctaacctcttacctacatacctcttctttaatgtaggaggaaatattcaagccatggttttgaagaacatcatcgatcacttcattaccaaaattaagcatgccaagatagcatgttttcaaataaagaggaaattcatcccttattgcccttatgtcccagctgccaaaataaagagagaaaggatcaagagaactgaatgaaggctaagagagaaagagatgaattaatgattataaattaaggaaaatgattgcctatttcagacctttctactgcatttgtgaaaagttcaagctcatctaatgatccatatatgtcataaacatcatctattgctgttaatatgcaaacgaacttggttaagcctatcctgcatttggagaactgtggctcagatacgattcccacggcccacaaatagttctccaccacacgatctcttgcaaaaggtagatttttcttgaatcccaaattttcccaccacctgtattttaattataattcaaacacgcatgtgcttttttattagtttcaacttttattctaattatgctttaattgactaagaaaagaataattagttactgatctgataaagttgtataataatatcattaattacttaccttcccaactccttaagctcattttgatgcacagattggaccagattataatccaacttagccaactcaagcaaagtcacactctttgtctcatccatttggtagagatcaatgaaattcctagcttcagatcttggcatcctccaatacagtggaacttccagtgattgtttcacttgcttaccaaacaaagtattatccattttcccagctgagaaatatcttagccttttggtggtgaaactcttggcttcctccaaaacattttcttcagccattccaaggtgtgaagcttcatacaaactcaaaattccatgcttgttactgcttaagctgtccaagaatttcccatctctgcctctaaatctgtcaaacacatctacattcaaaacaaatatttgttacatatatatattcaattcttctgatatatgttattccataaataatttacgtatacctgagccaacaaataagccatgttgcctaagaatacgaaatctaagtgctgtcatgaagagatcattactggtagtttgatcattatgtgcgtaaatgaaagaaacagcatctttaatctcattttcgaagtgatattcgagtcccaacctttggatagaatcaataagctttaagagaatacaagggtcttttgtggttctaagtgaagtactcgtaacttgcttcaactcttgtagtcgttcagagtgtaactcatactgcaacaaaaacaaaattaattaattaaccttagttttaaattaaataaatatgtataaatatgttatatataaacgtatatgtatatatatttgtagatagtactgacgttgtagggagtaaagaaagagtcgatatgcttattttcccaaactgtaggatggtacttagctgagcgtctttgctggggtcgtagtactactagtattgatgatcggaatcggttttttaatcttgtattaattgttgctgttgatgatgctgatgatattggctttagtggaagtagagaagtaaacggggaataaataatcgatgacattgatggatagagctaacccgaatcactcatccaagttttaattgctgataacatctaattatggcacaaatatatatacaagtcactactagtgctcgtgggggtg

SEQ ID NO: 45476 - DNA, 1226 bp, Cannabis sativa
tatgtatgtcatctcataatagtatatgaatgtcgcatgacttcatttaatctataagctaaatcaatatttacattattgtcaattttcagctatattgagacaagattcaatatctgtaccacatgatctaataataatttaatataattataataaaaaaaaattttgagtgattttcttttaagaaaaataggatgttacaacttattttatagtttatttttgaaaaaaaaaattaaaatgaacaactaattattaatgcttttaaaataaattaaaaatgtttttgattatgaaaatcaagacctaaaataacaattataatactaatatatattcatatactcaatgattcataaattcactagttttttttttctttttttaatgaggtactaaaattcaatataacaatggagtagataaaagtattattaggaaaaaaaaacttgttacaaataaatcctatcacctacttaggtatagaaattagaattagcctaaagttttatgatatcatatcaacaagtctctaccctacccacttttattaattgttatttacaatattgtgctattaaattacaaccgacttagaataaatgatgaaattactcctcaataaataaaacagttaagtgctgaaatctacaatttcaattataaaatgccatctctaaggaatttgaaagctgtgaggtgttgtttcatgtttgagtgtttgatattaaaaattctttcatgatagttaaatattccatgtattttaactgagtgaaccattttttattgatgaacattattaatgatttgtcaaaataaaattccaactataaaaaataagactcatgaatgaaagcatgaaagaacaaaaagttgaaataaaaataaaacactagagaaatgtaggacccagttttaaataattatgcaaagcctccagcacagcatctaatccaccaagcaatgtactctctctctctctctctcttcccacttttttttttttttttgaggcaactttttcaaaatctcacagaattccatttttttctttctttctttctttcacgggcaattcattctctcctccttcacaacagttttggtccttgttattagggtttcttttttcttttcctttcttccaaacaggtccaaaattttctttggtcttcacttcagcaatatccgaatccattaaagctttcgcctttgtcgtc

SEQ ID NO: 45477 - DNA, 1079 bp, Cannabis sativa
gcctacatctgttcctgcatggttgtgtactgtgctatagtaagctggataatgccttcagagactactgctggtgtgatcagcgataagtggcctactgtagttgctggtgtggacgtctccccagcatgtccagcagtttctgagaataggttgagaggagtgatgttggttcgtcccacacctctgattattgtatcagttgggtttgttccatctcatgggataggaacatgcatggttccaacattaaaatcccgtgttgttgtttccattcgtctggttggcagccataatgatttttcctccaaaatcgataagatactttccacagacggtgccaaatattgttggaggaatttggacaacacaaaaaatctaagcaataagtaaatatttaaaataaaaatagtgaatactctgcttagaatactgagtaagagactccccagacaataaacaaatggaaaagtaaaatgaacacaagggaatatagtagttcagttagatcacagtcttcttagtccaccattgcaaggatttccatctcgtttattcatgttggatttcacctttatatacaaagtaagtgtccttttagttgcacataactggccggttatagaactatttcataattaatatcaatgttaaattagaataaatataagagaataaatgaagaacagtttaaatccattttaataaatatagcaacctatgcgacctatagggtgcgagttgcctattcgtattctcgcacaagctcgaaggctttaggtgcgttctatttttctaaaggtggttaatgaacgtcgtactagggtgtctgcgttctatttgagtcgcatatataaacacctcatatgtgttgacaacatgagacacgcgagtccctatcaatttatcaaacacactttgtcgtttggactagtcgttatgtaaagaaacgatctttacttagtcgcaggagaaggctacctagcagtcatcgcatatgtcttggtacatgcgcgacttctatgtgagctatagtatgcgactagactttgtcaaggccacatcatctcgcgagtttt

SEQ ID NO: 45478 - DNA, 2517 bp, Cannabis sativa
ccccccccaaaaaaaaaaaaacccccagccataagaaaggtttagccccctaaccgacacattttgtagtccgtcgtttttaatggtttcccctttcaaactaaaaggtcaccaaagagtccagctttccaaggcggcccaacgaagaagaaatggtgctgatgctactaccaaacaaagctctctcattctcccaaccaattgctactcttacttttatgcctaaacgacgtcgtattcaccgtcgttgtcgttttatctcagagctcgaagaaattcgagtctgtaccaaccgaacttgccgaagacagggttcccttctaaccctagaaatcctcaccggtattgctccgcccaccgtcaccgtcaagtcatgcggatgcttgggccgctgcggcgctggtccaaacctagtctctttgcctagcgccgtcgtggtcagccattgtggtactgccaatcgctcggctgaggtcctggccgctctctgcggatcttcatgggactctgacgccgcgaagaagagcctcgaagcccttgccttgagaaagaaggcggagcttgagtttgataagggcaacttttctcaggcggagttgctactttctcaggtaaattgctttgtctattgtttttgatatctatattttactgtaatgggttaaaattggcataaatttattatattgaatgtgtatgtggcaaatttatttataaccagaaaacttctatatactccaattttaataatttttatattatataaaagtaagtaattcgtgagataaatatttttaaatttaactacagttgaaaataaatatttaattttaatttttagcggtaataatacttaagttatatttttagtattctgtaagtacttgactattaaatgaccaatcagaaattaatcaaagattgccatatggcaatttacttaacatttaacaagtacttatatagttttaaaaatatacttaggtattattaccgacaaaatttaaatttaaatatttatttacaactgcgagttaaacttaagtatttataccacaaattattttataaaatttatctttaattgttttatttttttttaacttttttttattttaatttaatggcatggattcaaactcaaaatttttaaactattaattgattgtaataccattacgctacattaaaaaaattaacaaaaataatatgagaaaaaaattataaaaaaataataacagtaattttaaaaattatttaagtttattatttttttttaaaaaaatttagagtatttattattttataggatataaataaaatttcctgtagattctgaattgttattattttgtaaagttctatggtttagataaatggcatgcacaattgcacatgacaaataaaggtctcatattgtgtgatacgatgacaaacacaatttaggaaagacccaatatcatgattttatgatttgttcatatgttcatataatatgatgacttcttaaccaccaaactacatcggcatatgcgtataacacattcaaggaacagtatgggattgagagtgaaatgtggttctgtcataggtgcaatcaagatgttatgttatgacttatgagtaacacgtttgagctttgtttgactataagcttattggtaatggactaatggtgcgagggatataattttgatgcgtgctatttgtgcaggctatagagctaaaaccagtggggggtatcaatatcacatacaaagaccggtttgtaaattactcttatctgttggcctagaattgtgtctacgttcattcatgtgcatgtgtgtttgtggtttaaattcaagtaaagcctagtaaatgtctatctttaattgatatgaagagccagtaggacatgtatgtaactttccttgcttgtcaaatcttttagggcaaaagaaaattagttcagtcttggaatccttatgaggaccttttgccaccataacattcaggtctcgtacaaggttggcaatggagaaataccacgaagctcttgaagatgctaaagaggctttggtgtttatgcctcagtatgtcgaggtaagccagattctgtatttttcctaacagatatatgtctatataaatgctaaatgaaaatttgtactgatcttggaactcttgaggtggtatgcttctggttatatctggattctggaaacatgctttagaaacctaaattgttgaacttggaaatatgttttagacattctgaattgtcatacttgtcatgtcacttacaaagtttttaatctgttttagttattctgagtatcaaaaaaaaaaaagaaaatctgttttaggcattctgactattatgtttaactagtaagaactttgtacattttcctttctcagcatggttacgagattatacagactatttatggtaagagtcctgcaggctccagtaatgcaatatggtatcctttcaatcaaaacaaacctgtagacaacagttactttgcaaaa

SEQ ID NO: 45479 - DNA, 1578 bp, Cannabis sativa
tagcttaatgttgatactatcttgtatttgatgggaactcttgagataatataactagcacacgtgatgttcataattatcaaaaaaaaccgaagattaatgaaaaaaagatctgtaccacgtaatttttttctagttaaaaaaaaaaaaataacttttttttttcaaacacatataaaggaagtaaattttgtttttcatatttatcttttaatcaatcaataatatttaaaagtaattgagttgatttaaccataattaatcacttaatcaacaaaagcaaagtgcaatacaatagaaaccaagatcaaaaaattaaaatatgaaatatatttagcacaatgacttttttatataataattcagcctaattttgataattctttgtaaaaatatttttggtctaaaatttaagttatcttcaaaatatataaatcaaacaaatgtaaaattacgtatcaaaatattgtacaagtgaatgaagagactaataatctcaaatatatatagtggggtttttatttttcttttatatattatttaattttgtgaaacataatttatttgtataatttggatttgtaggtaggatcttgaacagggtgaccaactttttagggtcctcaacaatgacgtaggttgagaaatgagaaatgagaaatgataggtgaaaatggctaaatcaatggaaaagttaaggcatatcatcaaagtaaagaggaaatttatataagcagcacacatggggttgataaacatttcttgtacataatcattaccttttcaaataatcatcttaccaatgtttttaactctacagtaactaatatatatatatataaaaatgtattaatagtcaaccaaaaacagagaatcaatgacgttcgtttttttctttaatttccccactaaaaataaaatcttcttaatattcttcctatatattttgaggacaaatttttatacatagctataggtactgttagtacacaacctgcttcaattatgaatagtgttaaaggtgggctctatttttaaatttatgtatatattatatatatatatatatcatgcatgcttaattaatatgtactctccaaagctctaaagtttaaggaattatgtagaagtatttattaaattatattaaaatatatatatatgtttatacattgcatatatatagtcacatactcacatatatataatatatagggtcatcaatttattggatgtgatgataagattcttacccccattcacatatgtactaatcgcttaacctttaaattttcattaatattagaataaattagtgcattaataaacttttttttaaagtaccattaataaattaattactacatttttttttttattttgtacgactcagagtaaaataattagttaaactatcacaatgataactgccaaataagtttatcatctttacagatcaagaagttaaatatatgttcaatatacataatttttttcctatataatagctagaaattgatatataatatgggtaataatagtatatactaattgatgtaaatattctaataagcttag

SEQ ID NO: 45480 - DNA, 2003 bp, Cannabis sativa
acaacctctattttgatttattctcaggtgaagtcgccggaattaatggtggttctcatctttctggttgaatttttgtttcagttgcgttgggttgctccgtagttttccgaaggttgcccaggaagcatggtacctgggttgaaggtgtgtacgtaagaggtatttgtgtaatttttttatttgggctgtatatttgtttatttggtcaggtggaagtatttttgtaatattgttatctttttttggtcaaaattgaaaaaaatcctaattttttatcataatatttaaaatataatttatttgtatttaatatgttttaaactgtcgggtatagaggggtatttttatatatttttcttttttaaccaaaactgtcgcctatttttgttgctacggttccaaaccgttgagaatattcattttttctgatgattttaaattgtggcgtaatttttttagcgacagtcctcaaaaaaatgtttttaggaccgtcgcgaattatatcgtttttgtagtagtgtttttaaggatgtgaaaattataaatatatattttatctagataaaattattaaaataaagtgtctttataaatttttaaagtagaaataaaactttcttaaattttattgtaattatttttgttttttatttttacgttcgataatttttactttacttttttcatcaagcatttatcatttttgttttatgtttgttatttaaatagaatgaatttttaagtaggggaattgtccctgctggtttacaggttatttttatttcatttttttttttgagaaaaatggtctcactaaaactttaagaataaattaagtggaaaaaatcttaaaaaaagaaagagcggcaaacaatatcattaatcataagagccggcttgcaaaataacagtgatataatcagggtgaccaaaccaccgaatataatgatcagtcaaagtgagagttaactttgctaaagagtatgcaatactgttagcaatcctaggacaatattaaaaataaatatcatttaaattattacaataagtgaagatatccctaataatataacctaagtaaaattaaccaatctcattattaataagagcattaataacaataagacaatcatattctaactccaccatttgataaccaagccgaatagcaagcaagagacaaaagaagataagtcatcaccaataaccacccaacaccaattttagctaagttattacataaatctgtgacaattaattttaaccacaacattagaccatttaacattggtgttgaatatagttacaaattttaacattcggaagagaagttgtgaatttggagagtaaatatggaaagcttggttagaatttgaaaagtcttgtgcgaatgactttgtaaaaatcggagggtgtttcctaataagcttgtaccgcgtatgtactgtccctctagatagcttgttattagtcctgagatgcacttctgaatagctactgtcagtcttggtttgttcattcgggaaagagcgcttgtatgtattcgaatagtttgtccatattaaatctttcagattgtttatattgaaagcgcgttatcaaagctgacaaggattattattgttagagatgagttagatcatgcaaggctgtgtaaatgagcgacgatattctcagagctaatttagtgaacaatataaatctataaataactatcaatacttgtaatctgtgtgaatcagatcattattgcttgagtaaaaatcgtgatagtgtaaggtggagaaagagagtctaaactagagagaaaaacttcttctcgtaatctctaagaagtttgtaaaaattcttgtaaccttgtaaacagtggcgaacctagaatttgaagtgagcaaagctcgattttttttttttttgtaaaaggaaagagggcataaataaatttaaaaagaaaaatataaagtgtagttagtgaaatttgaacctttaccctctaccat

SEQ ID NO: 45481 - DNA, 3975 bp, Cannabis sativa
aaagcccaaatatcattttgtgctttttcatgatgttcagttgtgttcatggaaatgggccttagaacaaaggcttagtggcttacattatttgcagttgggcagttaagtatatataggtatcacttttaagttctcaattcaacataaatttgtaagcttatttatttccatacaattcctatattgtaaaacaataatcaaaataataaaaaaaaaacatataatataacagaaatgacatgtaaataagcaatattgatgatagatggatttataaaaatgtatatacaaactcttgctttgaatatatttctccttaaaaggacataaattgtacttactcttctaaacatatatatgcacatatataacaatgcatacacggaaagtgagcacaatcaagaaaagttttaaaaaaaaaattacaacataagtcccaaaattttaagtttgatgcaagttcctaattttgaaattagcaataatagtctccaaaatttgtatatgttggtcggtacccaatttaacagattcattaaatgctgtcacgtgttaaaaatttattggtctaaatcataatttcaagtaaaaaaaataatttaattaataaataaatatttaaaaataaataaataaaattttaaatattatttatttacttttattcaggtctccttcttccttttcttctatcctaatatgcccaaccacctttttttcgcaagctttatgttccttctccgtcttcttccaccaccaccaccacccaattttttctgttcttgaattcttttatcacgttgttgaagctttcgatagcattgcttgtcattatattgtacctattgcctaggcaataagaatgagcccacttatctaattctatactctcaacatatgcaacgatgtcaagatctatccatttaagcacctcaaaatttctatcatattctctcttcgaccatgcataagctgccaactatatttgtgtgtgacatacatcagtctttaacttgaccatgacattcatagtcatgcacaatggcatgcttcggggaaaacgacatcaacaacatgttcaatgctttgatgtctattcgatacaaacattaaggtttcaactaacccatcgcttcccttaacttctgtaagatatacttctaagaatcatgattctcactattaacaattgtaaaggcaatcaaaaataattagttgtttgcatcgcacgctacaacaactaacattgtgtcaccatactttgtcttcaagaatctgccatcaatactaatcacaggacgacaaaacttaaatcccctcctacaagcagccagtgaccagaaacagtacttgaacctatcatcctctatcacaatgtcaatcatagtactcggattctttagttccagcatgtacgcataagattgtgtttagtgtacccttaacatatgtaagtgtcttctccccacacctccatgccttctcataactaatcgtgattccatattcatcaaatatatccttctatatgtatttgcattgtacttagttctatttaatgtgtactttccctaaataaggtggccaacaacccacggtgttgcttgacagttatcaatatgttaagaatccaggccacatgtgtatttgttgtggaacacagtgacctcaaatatgtcacaacgtaccttcttcctccccatcaatctctatttgtaatttggatccttgtaagttacgtaaaatacattggtgccagactttcttaccatgaactcaacatttattttcaatgtaaaccttcccactacattttttttaatttagtcttatttgtgtacaacttgccaatgtgtatttctcttgaagttgtaccactgagagaagttgtataaatattattttcctctatgccttcccttatccacatgagaggtttgaattttgtacaaacttcaaaatttgatggtacagtactacgaggaggaccttgccgactgttattagtttggtgattttcactacgaggaagtcttctttctcgctctgcactctggttccttggaggtagttctaacctcaaagcatgtctctctatagcttcatcaacttgtaactcggtatcaccatcctcattcaaatctactataacagctatgtgctcatctatattagtagggacttgcttattcaaaccaaccgcatgatctgtttctgagataaaactcccaacaacacttcgtgaggggacagttggcggagtggatcccaaatttgcatgcctcttaaccttagtcataatcagtggcaacaagttctccacactcatttttaccttcacgcttaagaacaatcttacttgaccatctttcactaaaaccttcggcggtatcatattacctttcatgtacatgtaacatacctctaatttcaattcatacataaaagggtcgacttctaactcttcatacaaaattttcatgtatcttctgtaaaattgtgtcaatctcaaacatcaacattttactttttaggttattagatatctagttaaaacttttaactgcccaaatcccattatacaacataatcataaacataattgaatctgataacaaaaatggacaaacaatgaattcaaatgtcaaaaatgtcgagaaatgcattattatcataagttattgcaaataatcgcaaacatcaaaagttatcgcaaaaaatcaaaaaatatgcgacatgtttgatattcaaaacaaaaaatcacaaactatgtcgcaacatatcacgagacattgttagtgtcgatggctccactatatgtcagcaacaacatcttaagacatcacgacatatcgtaagacgatacccctaacctctaacccacatacatatcgccaaccatcgtaaaatatcgttaaaacacacaaaaaaaaaccaaaaaacgtagatttactcaagtttgtttcagacacaaaaaagacaaacaaaaagaagaatatgtgtagatctactcttatcaaacaaaatacaactaaacacaataacaattagcaaacaaattgcatacccattattttttttaagaaatatgttggtatagtggaattttgggttggccctatgcacttgatgtggaattaggtggtccacctaaattgagaactttggcaaggggtgcttcagcaaatggtgttccggttgagtgtttgtgtgtgttactttctatagttagagagagagagagagagagagagagaaggggaagatagttaggtttagttttattatttgaaggcataatcggaactaaaaaactttagtagcaaattttgtttaaatattttgtatggtgtttatattatgagaccatgcacaatatttaagcacgatatattaaattttcttataaaaatccataagaagtttggtagcaactaaaataactagcctagtcaccaatcactatggcttaggattgttcacaaagtatctaatccgatctaatctaattcaatctataaagtgtggatattcacacttatgcggattggattggattgaaaaaactaaaattcacacttatgagaattggatattatttgagctaaaaaattaatcgatcaaagtttgaaagatgacttaatagagcattaaaatagcttcgaaatgcaagttgagtcgcgtcaatcaaatcaatattgagtgagttataactattttactgaaggttaatctggactcagtgctcaagttgacatccgaacacccaggttgacatccagcgcccaagttgacatgtgacgtcaacttggacattgggtgagttggaaaacgtaccaagaatgtactttttgatgcctaagtgatatttagacctcacttagcctgtttttgtgttttggcaaagttggccaccagttctctgagatattattattctatgaaaataagagactcgaaactacccaattt

SEQ ID NO: 45482 - DNA, 1244 bp, Cannabis sativa
ctaattcaatataatacaatatacaatacgacctaatacgacgtaattccaaacgagccctcagataataagggaacttttattatgagttttataaatttatcacttattatatatgtacatatatttgtaattataatttaatttattcacataatttttttttctgaaaacatttattcacataattttaaaaaccaactatttaataatatcagtgagtggtggatccagcagaatcatgacatatctttaataaataattagttaaaattatttattaaattcaaaataattaaaaaaaatgaagatttaacatatgtgatttgacattaaataaaatataaccgcactacattgttactatatatgtgttttatatttacagatttatataaatagaaaaatgaattatcgattatagtttctcctgaagacatacctgtgcggttccccacaagttttttctttttaagggaactttcattagagttcccatgtgtcatatacatgtgtatattgaaagtagggacaatatgaatatataataagacattaaaatatttatatgtaggcaacattttgctgcagctagctaaatacttaaattgtagttactaaaatatatattaatatttattaataattaacacgattgtacaatactcatttgtttctcttaggttatgatcagatatattgaccacttgaattaattataaacatcttgtccccgaaaaaaatgaaaatgaaaactgtactggatgtcagcttcctaaactacaaattttccatgccaatatatatatttatgtataaacatatatagtgcaagtactgttgatgatttaaaaacaaaaattaaatgaaggaaagagggaaaacaacggtagttaggccagaatcttagggccgctgtttttgcttgggttttgcatattgaattgaaatatgaaaattaataatataattatcccatttgcatttataatgaactaacaattattttttttttaaaaaaaaaaaaagaaattactcttagataattaacccttggttttgctaattataaacctagctacgtatacaatttatagatgccatcttgaactactacaatcgtgtacaacgatcgatatatatacgtatatatattgtgatcgattatttggaataagatgtaattataacttatgcctgcataaagattcctcgtaatatttcttttttaattttattttcaa

SEQ ID NO: 45483 - DNA, 2272 bp, Cannabis sativa
  modified_base (86)..(90): a, c, t, g, unknown or other
  modified_base (1351)..(1351): a, c, t, g, unknown or other
  modified_base (1425)..(1432): a, c, t, g, unknown or other
taacgattgctaactaataaagttactaaatttattcgaaaaaaaaaatagaagactatgccccatataataataataataataannnnnataataataataataaatcaattagaaaacaaccaattacaataccattacaaaaaaactaattaaaacttaattcgatatcaacgtacgcaatgataaaataccatgacacgatttcttatattcgtataacacatataaatattttaacactcaaatcatattaatttttttatacagtattattgtgtatataatattgtaatattaaatgtataaatatattatataaataaaaatgggaataaaatgtgtatagtacgttttttaacaatgctaagtacatagtaggcacaatgcatagtacgtttcttttgtttaatctatacatatatacaaattattaattttttatacaataatatcatattatatattaaaagaaaatgctcacagtcacaatatgtcttcatatgtacacatataaataaggggaataaaacgtacacagtacgttttttaatctatacatgtacatacatttttcttttcttaggagtcaatcatttttaatattattattaattagtgacataatgcttgaataatttaaaaattaaaaattgggatatattttagagaaagatggctaataatattgatttattttttaataaatcatacaataactttactaatactaataagttaaacactgcaattcaatccggacatctcaattaacttgaagaaacatctatattcaatttcctccatcattcacactataaaaaatagctcttttaatgataacattttatttttttgatgaatcaagtatgtatattgctcaaaaactttttatacaacctagtaagattctccaagtaaagagaatctaaatatctataaactttgcaagacatcaaatcattctttctcacttgtagttgtttttttgtattcttcttttcactatgtttttcactttagcaattacaatctctacacttgtattagaatttgccaaaaaatattgtttcttgtgcgccatacttcgtatacgagggctgctatgacagcaactaaaattgacttctttaccttgcttaattttgccttccctaaccaccttacaattctttctaaggtagtagttgccattactcaattcttaacataaattttgactaaatgtgttttagtcacagcaaaaaattattacttgcgactaaaacatagtatttagttacaaattttcactaatttacttttagtcacaacaagtatggtgactaaaagcacatttagtcacaataanttgtgatttttgtgactaatacatatagtcacggatcttttagtcacaacataaaaataatgatttataattannnnnnnnttttttacttttagttacaagttttgttgtaactaaaaataagatttttcgtagtgtcagaagacacagtataaactgttacagcaggttcattcatcccaactcgagcgctcaactattgtatgcaaagaacgtaactgtactattaaaaccttcttcagtcgcaaagaacgcgttatttccaactactaacagtaatttgatggcgaatcatcgaagaaccaaaaagataaaccaacaaaacaaaataaaattatgtcacagacaagactagtcgtagtaacctaaataaaagacacttaaaactatatcataaagaaaaaactaatcacagtaataaaaacctaatggcactaacaaaacaataaatcctgacctacgcctatgtctaggaaggacaggctggtctgatcagaaaaaaaatacaacctctgataactaaaaatataagaatgagaaaacttaaaaataaaggaataaaaatagaatgagaatgccaatataagtactccacctaataaaaaatggtatatcatatcattttaactactatatcattccagttaaaaaaaactatattataaaatgtacaatattaataatataggataatgtgtcgacatatatccaaacataagtccacttacattcgttttgtgaacaacaacatgttgttatggagaatatgttacatcatcaatttgtcaaacacaacttatgattattaatatatatatttgtcaaaatttgtgaattataatcacaccttttaattttatcgattatatttaaataattattaaaaaaatatatgtttaaataagaacgtattgtagtata

SEQ ID NO: 45484 - DNA, 2607 bp, Cannabis sativa
ctaacatgtccaaatactggattgaataatagtgtctaataatccaatcatgcgtaccaaacggtccctaaatatctatgttttttatttgttaaatattataataaatataaattaaaaatatctaaatatattttctcattaattttattctactatttatgattattataataatttaaatgtaattagatttttatttatgctaactaattatttctttaaattataaaagaaaaataaagagggagctttaaaccataattaaccataaatctaattatttttccatatgtgtaattaatattatatttttattgtattttctgttgattgttctatcataaagtatatataatttgccacttttgcaagaatctatacatgatgtttgtaccacaataatacaataaaaagttaaataattatctttattattatatgaagtagaatgtggtgattatgatgtgtaaattttgtatgattatgatgttatacacacttattttatatgtatatagtttatgatttttaatatcatgtgtggcatatgttattatatgttatttattttattttttttagattttcttatatataaaattatttcatatttttttaggtaatttatttttagtgaagagttttaatatttttcaatgataatgtgttattattttactttttagctaattaaaaaagagttagaagtaaaaatataatataataactttttatattactaaagttaaaatttaatataatattattatttagttattattaaataaataaaaagacataatttattttatacatataatttttttaaaaataataaatgtcggccgcgaagcgtgaattattaagtaataataataataataataataataataattgaggcaaactttaatgagtactataatttaggaggcaaaaattttatttattctataaaaataataatataataattaactttttaaaaatgataatattttgcaattattcagtgtaattaaattcaatttttactattaataataataaaaaaaaaatccaatttttataagagtcataagagtttgagattaaaattaaaatgataaatatatatatagatatataatctttattaagcaagataaagaagaaaaaaaaaatacgttattatttgtaatgtaaaatatagagttgtagtagagagctatcttagtctcaaatctcaattggcagaatctatagcagtattaatatatgattttgatatatacacagtacaagttaaaagataacagaaatagataatagtatattaaacattgagaaaaatcattgaaatatcccattcccaattatataagattgatacaatgtgttgcttttcattttgtcaagtagcaaacaaaataaatgaatagtgttagtgatcaataataataatgaataaatatgtctgtgtaacctgtatatgcatgcaaaatggaccaaaagagatgcatcactttatcctaggaggaattgaacccacaaagtgaaacgaattgggtcaccctctaatgtgaaaaaccaaataatattatgatgtgagtcttatttttctgactcaacttcaattatgaatacacacatatgtgtgtgtgtttacatatatagttggaattaatgtcatgatagaaaactattttcatttgtaactgccaacagatcctctagaaaaacaaataaaaattgaagtactagaaagaagaagaaaaaacatttcgtttttattttttattttttattttttttttctgaaaaaaatctttttatggacccacttttatgtatagatatgttcacatctatgtatatgtctcaccatgcatgatacacttagtataaaatcgtatcttcattgggcccttttgtaatcatatagtgttttaatgattagtgaggaaatatgtttatgttatcatatagatgtataactcctatcccatgttaaaataatggagctagctagcaagctattcatgactcatgactcatcatcttcttagtcatttcattcaattttggacaactcgagatattattagtagtgttgttgtttggatgtataaatatatataatatatattatatatcttatttaattaaggttaaaatacaatggaatatttttttatggctattacttattaatggatattaaataaatttaactataaatattaaactattaaattttggtcgataaaaaataataaattagaaatttgaattgttaaaaaaaattaaaaactaactctctttatttaccaaagaatgttaggaaaccaaatttattaattttaagagagagatgggccctatgaatttattgggggtgaactcaatccaattgacacttttagtgagtatatacaataaaattctatactcgcattgatcagccaaaatttaaatataaagccgctataaaaagagatttttataatgatgtcgtttggtaacacttttgttttctaatttttcaatcacaaaataaaagtaaaatttttatttttaaaaattttgtttttgaaaaacaaaaatacgttctataaccacttt

SEQ ID NO: 45485 - DNA, 3708 bp, Cannabis sativa
  modified_base (3656)..(3659): a, c, t, g, unknown or other
atgaggtagattattcggacaatattgaatggggcatgattagaagtgttgggacattggcttagtgctgacatcttgccacagatgctactttggtcacgagtgattaggcgagcgacagtgttagaatttgccttatcatattaagaacttacggacagtgtgagtatcttggctagagagcctcaatacatgaatgaacttatacatgcttgcgaacatgacttggtggtgtctgaaaagatagcccgtgacacatggcaatccattaaaatgcaaacatatagtcttaataatcaaaagaaaaattcaaatggggttaagaaaatcaactaccactggacattagacatatttttgcagtgcgacagactttttcaatatagtccattaaaataatgttgtttctttttcttttaaagagacgtgtcgcggacggatcatatctctatatatgcggatatagagtataaaggagtcatacgaatgatttttaattttattatttacaagagttgagtttgagaaattatttttgacaattgttctcaagtttgttggtatatgtggttttgtcatcagtgaacacaatgctaaacttgttttgttgtagtgtgagaataaatgactagattccaccaccaagctacgtgagggataagaacaccaacgttcacgagaggacaatagtaccatggaccctcctacctataattaccaagtctaattaggttagccttagccaccacttgtgctatcaagtgggtacaaatatgcaagtggtcttcttatccatgcataattaatattcatcattgctataataacacacacgtggtacttagcttgcactatttaaaggtttcaaattctaaatagaattctattcttaattacattaaaaaaaaaacgataaaatcaattttaagtattgatagactaagttcgtgttagagtttgcacttacaaaggacaaacaaaataaaatgtctcattaaatttttatttaagtaaaattaattgtattataaacaataaatattcatcacttacttagttagaatatataacacgttacacaagttacacaagtctaagtttgagtctcctcacattattttttaatatttatatatttgtgaataaaagtaaaggtccaaaatttaaatagccttacctctagtactagccttttaacatttctctttcttaatatatatctccctctcgttttctctattattccaaaatttatggtcacataatattgttcccttcccaataaaaaaaatgatgtcaatcaaagcattagctgaatcacctagcctaacttcagttccccccacctatacaatattccccaatactattcccaatgatcaacctcaaccacaactccaaatccccatcattgatctctccctcctaacctctagtgatcaagatcaacggtccaaaaccatcactgaattaggcaaagcatgtcaagactggggcttctttatggtaattattaattaagcttaattattattaatacctctaaaacaatattgatgtcatatttgaaatattgctattcttttatgattaatatataggtgatcaatcatggtgtggcagagagattaatgagtgaagttttagaagggtgtagaggtttttttgatctgagtgaagaagagaagcttgtgtttaagggtacacatgttatggacacaattaggtatggtacaagcttcaatgcatcggtagagaaagctttgtattggagagattatcttaaggttcttgttcctcatcatcatcctcatcattttcatttccctaataacccatctggcttcaggtaatattattcactcataaaatttctacattattctctatcaatcatcacacttttcaaagaaaagtaataatagagtgggcccattactatacatctattattgttattattttgtcatattgagaagtatttatcaatttttgatagtaaataataatgcactacaaagatctgttttgatatttaagattatattttcatcttattattttttatagacgttataattatttaatttttataaaattttaagaaattttaaataatttaaaatataaaaaaaataatgttaaaacagtttattttatatatatataaaacaaaaaaaattcactcatgcaataaataatttgaaccgtattttaattgacatgttaaattttattaaattttttaaaattttacagaatatcttaaataactaaaatgtacacgagcatgctaaaataaattggactaaaaaattatctcaaatgttgaaacagaaaaggatgcactagtgcattcctgagttgtagaatttttcagtaatattaataacatgatatagagtgcttctacaacacacctcgaaaaagagtacacaaatgcattccttacttattttgtctaatttttttaatgaataatgtatattatagttatttaagattttatgtaattttttttttagaaattcagaataatttaccatataaatgcaacacgctgtttgaatcattttttctgcgtgttaaatttttcataatttatcaaaattttgtaagatttttttaaataattacaatgtacacgattataaaaaaaattatagaataaaaaatattcttataattaaataacgaaacagataagagtacatcgatagggttgcagcatcaaattttcttaagatatatattgattcatatgatatttaactttttaaaatatatatgtatatgaattttaggtttagatatatatataaataagaattctaatacagcaacaaacaagtttaaagattttagataccatttttgtaacaaaatattgaatggaaaactgaaaaagtaataaccatgcaatcgctggaatacatattatttgggaggttttaagaacacgtttgatagttgtactttatgttaaatgcaagatatgcatgtgttgatttttctattgaaatcccaaatttcaattgttgatttttttttttttaattgtttgtgtgaagtgagattgcattagagtacttgaagaaaaccagggaagtagtgaagataatacttgaaggcatatcaaagagtttagaattggaaggcaattacatatacaaaacacttgaagtgaattcaggcttacaaatatttatagcaaatctgtatcctccatgtcctcagccagagcttgcaatggggttgccacctcattcagaccatggccttttaacccttctcactcaaaatggaattggtggacttcaaattcaacacaagggaaattgggtcaatgtcaatcccattcccaattccttcttggtcaacacaggagaccaccttgaggtatttgataaaaaaaatatgaaattaaatctcatttcaacaggttgagattactgatggctacaccattcttattctatgtttatatatctattacagataattgcttgtataattataggaatcactcctttaaaggggatgtattaatacatcatctacttgtttcggtattcagaataattttttagtttatttttatcataattatgtacgttataagtatttaagatatcttacaaaattttgagaaattnnnnataatttacaatatagaaaacaatcttaaaacagtctattttacacgcg

SEQ ID NO: 45486 - DNA, 1234 bp, Cannabis sativa
ttacattgaaacagagttttatttagggcataaaacccaacacgtctgaccctacaaaccaacacgagtgtttctagcatgttttgtcctcactctcacacttcttaggaaaaattccctagaggtcacccatcttgaaattaccctaggtcaagcacgcttaaccgtggagttctttcgtgatgggctatcggaaaacaagatgcaccttgttgatataggtagtacgaatcaatctatttaagccatcttcaactatgtagtcttatacttgcacaatctcaaaatcattacacttgaccatcctcaggcaatgtgggattgcacaactctcgatctttcccctttggatcacgcgactttgattgccacatattcggaccctagacccagaatcagattcgagcctggactcaaacccaaacctagacccaaaccccacacccgaaccctggaccctggacctagatcccggaccaggacctcgaccaaaaccccaacctaggaccccaaccccgaccccatcctggaccagaccccaacctcgacccatacccaaacccagacttcgacccggacctcgacctcggacgttgaatcccaaacccaaacccagaccaaaacccaaacttggatgtcagacctcaacctagactcgaacctcgatcctggactcagacccagaaccagacccgaacccggaacccgaccctagaccccaaaccccagactcgtacctgaacctgaaccctgactcgaacatagacccagacccgagacctcgaacctcaaaccccgacccaacccggacccaaatcctaacctagacctggacccaaattttggacccgaacccggacctcgactagacccagacatcagacctagatctgaaccccagacctgaatctagaccccaaactcgaaccagaattcagacctgaagccggacctcgaccccgaccctaacctagaccttgacccggatccaagacctggatcccaaatatggacctggatcccaaacctagatccaaaacccagacccagatctggagcccggactcagacccagatccctaaccccgacctagaccccagacctagacccgaccaaggacctcagacatatccccgggttttggattcgggtttgagtttgggtttgggtttggggttagggtctagggtctgggttcgggtcgaggttcggggtcagggtctggggtccggg

SEQ ID NO: 45487 - DNA, 4222 bp, Cannabis sativa
  modified_base (969)..(972): a, c, t, g, unknown or other
  modified_base (1220)..(1223): a, c, t, g, unknown or other
aaaaaaaagatgaaaaaactcaaattttcttactctctctctctctctctctcttcccttcgaatgatctagaggccagctaaaatcagagaagttcctcaccaatttcttcaaatcctagtaggtttcactgtttaactcaccctagaagctttgaagtatgttcttttctatgttgtttaaggatttctcaagttttaggttagtttcggactaaggttctaagatgtcagagatgtgatgttaaacgggaattagaacaagttcttagatgtgatttaaagattgtttaagcttatagaaatatagatattaattttgtattagaggaattagaggtttttgagcttaatttcttctcaatcatggtgatttgcttaaactaatgaattgttgtgaattgaagtctagaatatattgtgtttgtgatattaaactgttctggagcttttggataggtgtggtggagcttggatcagttttgggggaaaagaacccaaaatttcttccctaccagaatcggtcgaccggttggttctggtgttacaaatccaatcgaccgattgccttgtaggggaaatttttgggtttttcctcgaaatcggttttgactcgggggtggtacccagtatataatttaggttatttaggtattgtatggcctattttggagttttcagaagttaggatatgtccggttatcggaactagggttattcttggaatttttgatttaaggaatttattgaattttattgtcgtgacataggacctgggatcgtcaagttttgtttccacttaggtcggcccgcacgcctgatttctggattgaggtaagaaaagtgttacgcaccacttgtgattaaatgattaacgattatgattggtataatctcgattatgattgagatcctatttatgtgtttgttatgcctcggttatgaccaagggttggaaacggtcattacnnnnatgagtaattactcctgaaaccacggttaggttttttatttatcattcgctgtatcgggcaatgatagtgacatacgtagctcgtggataacgaacagtaagggttggaaactgttattaccgttatgagtaattactcttgaaaccgcagttaggtttcttacttatcattcgctgtatcgggcaacaatagtgacatacgtagttcgtggataatgagtggtaagggttggaaacggtcattaccnnnntgagtaattactcgttgaaatcgcggataggtttcttacttatcattcgctttattgggcaatgatagtaacatacatagttcgtggatagcgagtggtaagggtgctttatgaagcaatataattatgtgattatagggatgtgaaattagggtgctttatgaagcattgagaatatgtgattatgtattgaatgaatgtctgtttagtgaaatgatgaagttgttgattatgagttactatgattttcttataatgtgtaatgaatgtgtttgtatagatgttaaattatatatgcatgttgaatatgtaatgaactacgagtatgtatactatgttgtgatgagaatacttgcattttcaatgcttacgatccagtagcttttcttgctgagtcattgtgactcacaggtgcttcatggtgaggatagcagttgtgttcgcccatgagtcagaggtctcccagtgatgtacatatcaacagtggtgtcttgtcttccgagaagcaggatcaatcctttttctatgattggaaatgtagcctacttttgtaataacgattttgtaactagttgtaaaagaattttaaaaacaggggatccccgtattatgacagtatttttatgaaagatttgttttaaatttaatcaaaagtttttaattaaacctcactttttcttaaactaatagattagttagagataagtttgtaaaagcacacttgtggcgtccctgtgggtcagggcgttacacttggtcaccttcaagactcccctttctgccttgtagctataaccttttgaatctagcacaccaagagacaacaatttttttttagttcaggaataaatcccacatcagttaattcctcccaagtgccatctctcatacttatcttggttgaactaatcccttgaataccacaggaactgttgtttcccaccatgacttaccctgacctttcttcttttagattaaagaaccactccctgttagggtttatgccctgaaaagcctgcaaagatattttctaattattaaataaagagttgagcatttgatatatgtatgaatgttaagttattaatatttattattgaataatttatattaaatatcgatgaggttgtggcttgtagctatacaaaaaactaagaccacttagctatgaataagacagaccgcaacatattaaggttatagaatatttaatcaaatgttgctatagtatggttcactgatgcccgttctacgttgcaagtaatcttggttttaattactgatgtagtgagacatctaagtgaaggtgctgtatataatagagattatatatgacaaggaccgatatgaataacattgtccttattaacatgttgtttatcataaagacttaatttatattatattaatgatcaatagtagatcggcctaaatcctgagttatcatgaactcatgttcatgttattagtttctttgatttactcgttaaagtttctcggagaagataattcttacaacttctgttttggaaatctgataatatagatggctgggaacatgatgtacaattatggaattttgattttcctaacagatcgaatgttggttccctttaagagttaattctggaactaaaatattgtgcacaaattcgatgtgatcttttattacacttccactagtgaattaatggtactaaaggataattaagtaattagaaggataaaatagtattttgactaaaactaattacgaataaacacatggagggctaatcactagaattgattatatcaatggatattgcagttaaactcggtaaatataattactaagagtttaattccatatttataggggagtaatcatggaattaataaacaagagattatttggtcaatgaaactcaataaataatctagtttattggagcttagaattataggtccatgataccagaattgccaccttgaaaaattgtcaagattagggataaagaagtttggaaaaatctattttgtattggaaaaataataattaataattttttgtaataaataaataatatttcaaattaaatagaaaaaagaaaaaaattgttaagacaaaaattgttaagacaaaatttgtcaagacaagatttgtcaggacaagagacaccaaccttgtcctaatgacaatggtaggcacctatagcattatgcgagtttgtcttttgggttaattaattatttacttaactaaattaagtaaatatctaatttgaaaagtgattatagatatttcaaagttgttgagttattctctcaagtggttgagtccctcataaatatcagtaacctaattcagttatagatatttatttatttaaacaattaaatatgatttaattaaagtgatttaactactataaataggaacttgatttgagaaatcagaatgacacttctcactccttctaatttttgaaatggggaatatttataaatataggaattgagggtatagtttacttttttatggcataaataaataacaccatttgattatattattttttttttacattaatatgggtttttttatgccatatttatgtaagaaaaaagttgaaattccacatttgtaaaacagcaataagttttgccagaaaagtcaatggcgacggaaaaatcaccgaaaaagttatcagaaaagtcaccgccgttggtagagtcaccgaaaaagtcactgtcgccggaaaagtcaccagaagtaaatgtctcaaatataactaaaaatataaccgattctatgaataaaaactaataattcaaaccggttgtaactgaaatataattggttctgtaacaaaataaataacataaaataactcaaaccagttataagtaaaatgaaaccggttctattacagtgttataatgaataaaaaccaatgacacgaaataactcaaaaccggttataactaaaatagaaccagttatataacataatgaa

SEQ ID NO: 45488 - DNA, 2661 bp, Cannabis sativa
aaaaaaaaaaaaaaagaataatcatataaattactaatttttataaaacttttacatttatacgtttcaagattttttttttatattcttaaaattttctataaaaagaacacgaagataacaaaaaaattatataaaaataacaggaaaataacatcaaaacaataaaaaataatatacatagagccaaaaatcaacaacaaattaacaagagtacagactgtattttttgtaaataaaatcataaaaatcgtaaaatatttaaaatttcgtacaactgtagttttataaatttttttattattttgtgtatttgtgaaataattccccaaaaaaaaaaaaaacctttgtctagttacattttagcgagtacttaccactatttatgaaaaaaaaaaattgagacaatcactagcgaacaatgacaaccaagatcttccctttcttggcgtattgtctcctcctgcttagctacctaataaatattaataatttaatatttaaacatatcttaaaatgttcaactctttattaataatcagaatagatttttaaaggcataaaccttaacaagatatcccttgtctccatacatcttcattctctatttcaaagttctatcatgccttccttatgagcaagaattcgggggtctcattgagggggtgagggtctctcgaaataggaatcaagatcacttgttaaaaattggtgtcccatactgtgttaaacctatcaaagtttgacacatcaactaatttaatttatattaaatatgttaactaattttgttgactttattagaaatttaatttttttataaataaaaaattaattgacgtgtcaaactttaattggtttaacataatataatatgggacactactttttaacagagatcttaattcttcgaaatagtgctgtagtgactcaccttatgtatgctaatcacactcttatatttgttaaagcattcatggaaaatatgagagcaatccaagagtacattgaatgctattgtggttggtcaagtgaaagatcaacattggaaaataaaaagtctacttctctaacaactctgagtacaagactaaagatgatattctagatttttttgagtttggggccatcgaaggagatgagaggcttttggggaacgctttatttgtttgcaattgatgtaagaaagatttcaagtttatggtgggcaaagtgtatagtcagttgcaaggatggagacccaaactttctatctcaagcaagtcacactgtgttcattcaaagtgttgtgcaatctttacccatatacaatatggcagtgtttaatcttcctgtggcgattctgaatgagttagagcgactaacccatcagttttggtggacagggagggtggatggagattgatatttatctttgatatcttgggagggataatatatgtaaccctgaaatgttgtggaggccttggccttcagacttttaaagatgttaacttctgcctcttggcaaaactttattggttactggctaattctcaagactcttaacggagtcgtgtgattaaagggaagtatttctcgaattttagcttttgggaggcgttgctacctggtacgacatccccagtggttaaaggtttttgggtgtgccaaggattttatatgtaactcagcagtagtttcaatcagcggagagtctaagttgaatatttggaagtttaaatgggttctttattatgatgtctcggctcacacgggtgatctcaacccactagtttctcagcctttgactgtgactagtttgttgaatgtagacatgagtgaaaggaaatgtgaggaggttagtagattttttatgcatgaggcttactcgagggttatatctagtactccctaatccttttttgcttatgacagggccatttggaaacctaacagggatggtatttatagcattaagtcgacctttaaaaaccttaaggcggacaagtttgctggtatggatccaacctttgattgtcttgtagaaatctaaactacatcctaggcttaagattttcttgaaaggtctaccaaaatattctccccactggcgctcgacttgttggtatctttgggaataatattggcctatgtgttcttgcaataagatagaggtatttcttttgggccacttgttcggtagtcgtgctatgacgaaactcctttggtttttaagtaactgggacatttgattggaattgtggttgtgccaactgttgccaggtagagatgtggtgaagtggatattgcttcccatgttagagttttggaaatgcctcagcagggaaaagtctcacattttggttgatgtggtggttaaggactctggctctgtggttggagtagtggttaaaaatgctcaacaccaggtggtatctttttttgctaataaagtgcattgcatggacccattggcaggggagcttcaagcccttcaagcgggagttaacaaggtcatcaacttcgtaatacaacaatgtttattgattgtttggtgttatccttggcaatataatagaggtgattatgttttggctgggtgggatttatcttgtccttgtaatggctttgttaatttgtcaagtacattaattttgaaaagaaagaagaaaaaatatt

SEQ ID NO: 45489 - DNA, 1964 bp, Cannabis sativa
gataacatttatttgtacgatatgagaaacttcgcttataaaataaagatatatattaattagtaaagacctattattatatgccatttaataaagaataatatttattataatacttattaattattttaccggttgtgttaattatggtattggatctcttacagtcatgaaactttcaataaattttatggcgtagtatgcacattatttattgtctggctattctagacatataagagttatccactcgataggtctatcaggctgatttgttatgtgattgtaaatgttaaatgatctacatctacaagaaaagtaaagtaactatatgtctagaacaaccaagtgtgccaccgtttgcgtacttagttggatgagtacaagcattcaataaaatatttgtatgcacaaataaatatatgtaaaactgttaatacataataataataatatatgttatgaagagttataaattatgaaattatttattttaaatctacttatcgatggttgtagggggtaataacccatttatccagattggtcatcttggccatatgcgtgactagtgcttgacaacggatctaggcttcagtggcaatggcactaggatttagaaatacatatattctgtttaatccattgatgtctaacaactgctctttcaagtgcctaataaaaagacataattaataatcgtcactctcaatagaaaattatcaagtttattaagagttagaaattatacttgcaccaaactgctataggttgggctcctaagtattgcataatgcacaatttatatatgccattttttggaagccaaatcgagttatcttcaaccccaaatactgcaaccgggaattggattattgttgactacgaccactttttcaccgcgttctgacagttagtgattgaggtagtttgtcgtggttggacataacgaccatgtcctgttggcttacttggcctctcagggtgttttggaggctgtgttcaaggaacgagtaaatcttcagaggcgtgtttgcttctcctcataagttgcttggtgggtggttgtgtttatatgaaataaaaacaataaaattagaaatttcattaatcaataaacacaataagttaagtaaataaattaaaacataccaagtatttttcagtaggtgtaacatagtctttcgaccatgctacataactttttatagcttgacctactattgtgaatgtatcttgggagacgggacatagaagcagtgcattctccatattgacttcgtcgatgaatacttgaagataatctttgtataggtattcaccattgtaaatcgagaactttccatctttcaaacatttctccttcacaatgtgccccaaaagcaaactttagtaccattccactgggctccaatcgacaatgcatcaaacatggagaaaggtctgcatatctaaatcaaaaaaaagcaacaattcagtttgtaaattggctatatttatgactttgcattagatcaatttgtaaaataatattaagattacctcttctgaactaccaccagtaggcggtggtggtgctgttggagccaaaatctttttggaacgcagtggcggtgatgtagtagagacattggtagcactcgatggttgtgctaccggatcggaggtaaggtcagcacagacttgttcatttgatactcctccaacaccgacaccagacacatgggatgtacccataatgctgctatgctgggaatgaactagatgaatgagctcatccatttgctcccgcagctgtctattactctcctctgtctcacgaacgcgtctcttcaaatttgatgataactcgttcgacccatccatgtttttacttttagggcatggactgttgaaatgtttggtttgggtgacaccctaacccatggctcaaacccaaccaccatgcccatatgtccccagcg

SEQ ID NO: 45490 - DNA, 2505 bp, Cannabis sativa
tagttaataattatggagtcattttttctatgcacaggaagtcttcctccatgtactgtggcatccaagcgtcatcacctttatcaggtattgtctttatcgattgagtattgctatcaggcaccaatgatagtgtctaccatcatgaagtgacatcatgcgaattggctagcgaaattctataataactatcacgtgggacataatacttaatttcactaatagcaagataacactttgggtggtgctactaggcaccagtagtgtcttttagcatttctcttatatcttagttttgtctctagtattcaacatcatgccaagtaatttgttttattattttcctagttatgctagagacacttaattttttttgtcgtcttcacaaacaagttcgcaaaatatctggactcgattttatagccatggttaaacatcacgaaatatgtggactcaattttatagccttagtttggttaaacatcacactacaccatttggtggggaaacaaagtctcgtgtcaactagcactatttgtcttcttagtatgtttcactggtccccccactggacaatagtttataattgatgcatatctaatacaatgaaattaaaagtggttgttcaaacattgaaattatttgactttttttcattctattacagatttggaacacctatatcaagaggccaatgatattagttggaccaagtctcggtgcttctgttgcaattgattttgcacttcattatccagaagctgtgagtttattacttttgttgagctccttactatgccttcaataaataaaatcatcatcatgctcatgtctgaaaaatcctaagttagaaggattatgattaaaaagggaaaaaaaaaattgttagataagtgggaatatgaagactgtaattgagttagaagatttgggtagtcttgaaagtttactttcattctatgctaatcatttgttttactttcatggtgtttggttgacaggttaaaaagttggttttaattaatgcaagtgtctatgctgagggcaatgggattttatctaagttacccaatacaatagcctatgctggggtgagtcttcatatagccccatcatttagcttaataaaatgtttaagatctaatttttgtgttcagcttatgagaaaccaatgtctttattaagttttttaatgttaggtacttgagcactcacgacagtttctctaaatgggattgttctttaaaatgaagaagagaattgtgaaaaaaatattaaaatcatgctccatcagatgacgtatgttagagaagcatgtagagttttggtgatgtatttaaaaaataaagaagagaagctgttgagagtgctttatgatggagcttttttatagttgttatattatcactgtagttgttattgtttaatgcaatggagagttcagattatctaacctttttatcatttgtatttaggcatctctcttgaaatgcttacccctacgcttttatgcaaatatgatcgccttcagcaacatttctttatctacaaccttagattggaccaatgtaagttattattttggtcaaataacaagtaagttgaaatttttatgagtaatctttttcattttcgtgtttggtatgggatttttttttttttttatttcgaggataggaatattgttactatggaaataagattaacctcttatggggtaatcttaaatcctttcgaaaagatgggtttcaaacattgctttcaatcttattacttttgatattatatattatttttatataacttttttcaaacaatttatcagatttatgtgtttaactaaacaatgtaatttaattaagaagaatctgattagacattccaatgcataaccaaaaactgttataagtttctagacaattatattctctgtttcattattctaattattcaaattattttgaacacctcataccgactgtccctaaaagagatctcaattcatgaattaggtgggccgattacactgtctcctgccttggtggagagatgcaacagtcggttttatgaatagcgggggttataatgttgcaggccaaataaaaaaggtaaactatgtcttcccaatgaatattgtcaataagtataagtgaatacataatttacaattatctctgtcaaactatggtgttatgacatattagcaatgaattttaggtgaagcagaaaacacttgtcatatgcggcgaacaagatcaaattattagctacaaggaaacattggttagtcttttaagccaaattcttctcatagtagagttagttaatacattgtattcgaattagtcacacattgctaatgtgaaaatgtgaaaataaaatagcatatataagatgaatgagttactttttttatagccaattaattttgagactaaacaacatgcattttaaccttacactcttaaattttaacatagtatcatagcaaaaaaaaaaaaaaaa

SEQ ID NO: 45491 - DNA, 1397 bp, Cannabis sativa
  modified_base (1364)..(1371): a, c, t, g, unknown or other
accaaggcttgcatagatcgtttggtttcaaaaactcttagcgcatttttctggtggtatctctctagagctcagtccaaatcttagcagcattatcaaggtatatcacactatcagctatctcactcgaaataacatgtaaaatccaagagatcaccaggctattgcatcgaaaccacacatcataaacatcatcatcaacctttggctcacgtaatcgaccatcaacgaatttgattttgtttcttgctgcaagagctactatcatggatcttctccatgaactataattctcgcagccagtcaaaatcttgggaacaagattcacaacagattgatctctactcgaaatgaagtagggacttcgaggatcctcacctggtggtcgattgttcggttccagaacagagaacctatttgcagcttgagattcatctccttgattcgttgagcttcgagtgttggttccaccacgagccatagacccagccacgaacaataaagaatcgaaaaaatggagctcacgagagtcgtggctctgataccatattacaaaccagaaagtaaaaacgagagagaaagaaaagaagaagaacagagtaaatcttttttattgaaacatagaaacaatgagtgagtcttatatagctcaagctcaatgaaagtacagtacaaaaaattagttacacaaagaaaacaactaactaacataactaaccaaccgactttacaacagaaaataactactaaaccagtggtagtaacagtagtgtgacaactaacacttgatactccagcaggtttttgttttgtgtttagataattaaattatgtagctcattattatctagccaagtcaagtattactcttgaaaatagaataagtgctaagcaggagcttctccttgttgctagtgctgtgcatttaaatttttttttcaaaaataaataaatatttaagtatggttattaacttgtagtaaattaatataatttttcaaaataatttattacatacaaaaattaacataattagattcctattttgaaatagaataaaaacataaagttgagaaactataatgaaacacgacacctaaacaataatattatataatgaagttaataagattttatttttttttaaaaaaaaagttaatatataagaattaaaatcatttgttaaataaaagatttgttatcgtaactagttacttgtttgttttagaaaaacaaagattgatcaacttctcaaaacaatagtgaactattcaatagtcttaattcactaatatctattatatattaaaaatatacacccataattaaaagggaaattatcttatatattatttttttaactnnnnnnnnttttttttaaatttacgttttgagtt

SEQ ID NO: 45492 - DNA, 1928 bp, Cannabis sativa
aaagaaataaaaatgggcttggacagtaaaaatgtaaaatttaccgtgtcccagtattttttaaaatatttggtaaaaaaacagtatttttgtaacggatgaatatcacttatggcagcacccacgtttgaagtgggctgagttttatcatattatagatccaatcccttcttcactaatataatctggtttgtaaaatgaaacgaatttcaaaaataaaaatcatagaaaatcaacttagctcgcaataaatggtttatttatacacacactaaatataatacaatcctcacatgacaacactaccatgtttcatcagcaatttaacatatcaataagtaaatagtgaatattatacattttaaatagtggaagaaggaaaagagaaaagaaaaaaaaaacagagaaatatgcagaacataaactacacttcagtatattgaagtgtcaccgatattgctagctcattcccatttgcacctaatttggttggtatgcttaaaatcaagagtcaacaatacggtgccatttactctcatcaacacaaacctctctaccaagacataacatccaaatttgctccactcttttccatcaaactcctctgttcttttcacattcacttgcctttcaatctcatccactttaaacccaactctctcttcttcccaccttattctatccattatcaatttgctcaaccccagtaaccttcctgattcttcttctcctttaccacaacttctaaaccagataactccatcatcaacatggccccaatcacatatagcttcctttccatcaacacgagcctcttctcttttaacaaacacatcaacactcaccattttcatgtcgttcccaacgttgtcacattcaaaaaccttgtcccatctctgctcaagtctcatctcataaaacgtggaatatttcacctgctctttgagttttccctctaattccttgacaaacataaaagggcagtaccattttcccacgaccacaattacattgagttccggaagctgtgatcttagcgaggagttgaccccaggtgcttcatctaggtggtaatggcgaggtgtctgcatatgtagctgccaatattttctcctcaaaaacgtaggaggaaagccattttcggccacggatgctgctgtgaagcttccgcgacgctttcggatgatctcaacttgttgaaaggtgtctaaaggatccaacggcctcggcttgacgtctctaatatatgtgcagcaacaacatgttcccatgtcatcttctgttgagcttgcgctagcttcactgcacaaataaacaagaaagagaacaagtgtcatatatgagacaaaccttgtaattaattaatttctatgatatcaagctaagaggagaaattaaaaagtgaattcaaaacataccctttatgttttccttggcggcgaattacatagtaccgattggaagagaggggttgatctagcactggaacgaacactacatcatcgtaataggtcgtagtgttctctccagtgcttactgtataagtaacacttagatccttgttctgaggaaatggcagggctttgattgacctttccttacacaatccaaaacaggtcgttgtttcagattcttcgtctaagagaaccaagtaaccagaatttggaccctcttggggtgctgaattcagtagctcaggggaccttctaagcaaagacagaggccttgtcacgtacatgattctctcttgggttaatgctaaagtactcttttttttttcctgctatttctgcttttggcttactttttttaatttctctctgtatcatgttatgatacgtttttcatatatgtaggataaaaaaaatatcctgtagacttgtggaatgtgaatgttttgaaaaccagtaggaaggttcataagtcag

SEQ ID NO: 45493 - DNA, 1019 bp, Cannabis sativa
  modified_base (950)..(956): a, c, t, g, unknown or other
aagccgataataacacatcctatctgggtctgcctagtattatgggacgtaagaaagctaccattttgggtttcctcaaggataaattgcaaaagtgtattcaatggtgggaaggtcgttttctctttcgagcagggaaggaagtcttactaaaacctgttgcacaaactattcccaattatgcaatgagtgtctttctgcttcccgtggaaacttgcaaggaattggaggggctcatggctaaattttggtggaaaacatgctcttcggctacaggaaatattagctagatgagttggggtcgaatgtacaaacataaacatgctggaggattataatttaggagttttttttttaacttttatttagctttattgtggaagcaaaggtggcgaattcttacaaatgaattgtcattgattggaaaggtgtttaaggctcgttattacccaaatgggtcgtttctggatgccaatttgggtaataacccgagctttgtatggcgtagtgtgtatgaggctcaggctattattcgggttggtgctcgaaagactgtgggtgatggctccacagtgtcgattctacatgatccctggttaccttgccctatagacccgtatgtccattcgaaccaccctggtttgaaagacaaaaatgttcacagtctctttcgtttggacgtttaggattgggacttggaaatcatcaatgattttttcttagcccgtggttgtgagcttataatgtctattcagctgagttcaaacaatcatatggattgctggtcctggaaacttgaaagaaacgacttatttactgtgaaaagtgcataccgatttttgaaaaatctcaaaggagattggtttgaagatgatacttcaagtttttgggttagcaactttatttggagagcagtttcaggtgttcttcctgttggaattattttaccnnnnnnnagatttactaacaagtatgttggattaacaacttaatatgaattctaaaacaataaaaataaa

SEQ ID NO: 45494 - DNA, 1677 bp, Cannabis sativa
tggaggcttgaagcggggacgttacatagggtttgttgaccttgcttctagccaacgacagtgagttaagataaagcaattagataaaataaatattagaaagaaaaaacaataaggtaaaatagtgagattatgccactactaatatgagcttattacatgaataatggtttctcttaatctataatgagtaaaataggaaactatactaaatctataattacaatgcaaggaatgggaaactaaagcgtatttcctttattctctgaattaatcccatgaatatagggattatcttcgcgccttggaagcgacgagaattatctttgaaattgccaactcacatatcctgctcgttgcatatgagtttgtactttagtcagatgtctcttgattaccctgttcggacatcatgttgtaacaaacatttagatcaatcttttggtggcttctaagaatactccattctgcctaagtaggaaaatgtaggacacgtgtcatccagctcattgccatgtcatggtgcaaaaaataggataacattttccccaaagtctgtgcaggaccttcctagtcgcacgtggacttcacttagtcaagagtcttgtctggatgggtgatgtgtgtcttcgacggttgatgctaatccaacaggactctgactagaggtttcttcgatatctgatcatttaatgccttttaaaagttgtacctcaaataacggttctatgtttgagcatgcttgacggttgtacttcttgcaatgagtacgaacgtttaacttttgggagaaaacccaaatatttgaattttgaaaatgatttttcccttttctgattgcttataaatagagatcgaaactttcggcaatctttttagccagtttcactctcaaagaactagagcaaaattttcatctaagcttttttgaaggacttaatggaaaacccctggcgataccatccaagcagattaagaaagatttgaattaagtaagtcagtctccctttcttttagatgattacaatgtagtgtatgcattatttctgaattctttattatagatttgcctgttcttgaactgtcattggttaattgtagatcaactagttttagggcttggaaatttaaccgatgtttaaccatgacgcctaattatctgactgtgcttcgattttggccataaattgttcattccccttcgctcataaggttctgacaaatatcaggttccaattggagtttagaacttctaggactggaaactccaactctgggtgaaatcttttcttttgaatcttaatcaggcctcgtcggcatatgcaatatgttttcattcgttaccccgaccaactcttattctcttgtctcccaccttttgtagatgaaccttagtgatttctggggaggcaagcatcatattaaccaggacttgcttcaaattctgtacgaagatcatccccgcctccgtggtgacccatcttcatctagtgacgatctttcaaattctagttttgaatatttggaactgagcagcgaacacacaccttccttagaacctggagtgcaacatcactcgtatcctgacccgatgcatggcgaaggtgttggaatttattttaccaggatcttagatatattcacaagtatgtttattaacatcctaaataagaactt

SEQ ID NO: 45495 - DNA, 2835 bp, Cannabis sativa
  modified_base (2758)..(2758): a, c, t, g, unknown or other
tcaaataatactatgaagattcttaactctacaatctttagagttttaactcaacataataatttttcaagctcaatttttttgtgtatgtgtgctcaatcaaattatcatattactaacattcaaatcaattcacgcatgccaacaatcaattaatgtttatctcaaaaaaaatgcgtatttcaataaaaatttacgccgtaagctagcttaattatggaatcatttttcactaatgtaattacacacaatctcaataacaatagactttataagcttataatgtaaaactagggtgaaaggtagagatgagaaggttaatttaggctcaaatcaaaccatagcatacatatacaatattctctcaaataatttttatttgtattccccaatcatttcccacaacaattcaaccttgtatttttcccatttcagaataaagtttactattcttccacacttaaatttttgcaagtattcatatatttctcaacatatttctcattctttttacaaaatacttgcaacttacaaatatttattttgagggaatagtattctttttcgctgcttatacatactcattaatatatttttctcaacaaaactctcacacctttagacaaacataaatatcaatatactattgtgtataaaaggaggaaaaaggatttatttatagctcaaaaggttattttataagatcaaaagaaaaataagatttcaatatttaggcttaaattgggtaaaactagagaattcacaaatagggtaggcttaaaaagctcaatcgatccaaaaaaattgcttacatcatatctcaaaatcatgtgtaatttatcaaattcgccttaaataatttttaaataaattctagagtgattgagatcaaatatcaacagtcaaatacatgcattcatctttcaaatactagaaaatatgatgatttaattaacgtgctaaattttaaaaatcaagcttaagcagtcattaatccaaagttaataagcacacaaatcatatagagttcatgatcaccttcatagcattatctccattacaattagaaatctcatcatctactcattgttgtcaacttattgcacatatctaaaatatatatttttattaattttttaacactgcattttaaatttaaacttattgcacatatctaaaatatatatttttattaatttttttacccgatcaacatatattaaaaaatatatctttattattttatttttaaacaataaaatagaaaaaatgtttatgttttttaaaaaatcactattgtaatgttacattttgcaattactaaaaaaatatctttttattatttaaaaaaagtgatatttctataaaaataaaaagtattataaaattaaaagcattatgattaaactataattataattaataataaattttaaatattattatattctttctcataaatatcacttaaattaaacatttttaataaaaatagtgttataaagatgtttattgatttaacattaaaaaaaaaaaaactaattatacaactaaaaacatacataattgaaataaaaattaagactacaattaacattgctcgtaatattaacttaatatatattagtatataatccttttactgcactatattattgagatgtttttgaaatagataatttgttatccgtgtcgaaaataggatgacatatcaatatttactcatcgtatttttattttctgtgtgttgatgttgtttccccttctagccattaatacagagaagtaaagaaagagaacaaagagaagaaagagatgaagataaaagagagaggaaagataataagagaaagagttgttgtatagattgaatctgttgaaccaagtttatatacacaaggtaagtagtaaatcataacagaatcaataacaaactctaacaaccaagaagcagttacaagtaacggtattaactgccttgacactccccctcaaacttggaattggtagggatgccaataccaagtttgtttcgaaacagagtaaaacgatcagtggagattgcctttgttaagccatctgcaatttgatccactgtagggacatgttgaatacgaaccaagccttgagtaagcttctctcgaacaaaataaagatccaactcaatatgcttggtacgggcatggagtacaggatttgcagtgagcaaaatggtgctcaagttatcacaccagataatgggaggacgagaaagctgcaatttcaattcagtgaacaaagagtgcatccaagttaattcagaaacagtttgtgccaagctcctgtactcagcttcagtgctggatctagaaacaatatgttgtttcttacattgccaagccacaagattcgaacccaagaagatagaaaaacctgaagtagaccttctgtcatctgggtcactagcccaatcagcatcacagaaagctgtaacatcgagttcaatggacttttggagagacaatccatgagacacagtgccactgagatacctgagaattcgtttcactgcattccagtgtgtgtgaagaggattggccatgaattgacacactttattgacactataagaaatctcagggcgagtgatggtgagatactgcaaagcaccaacaatcgatctgtaatggtgtgtatcatcaacaggatctccttgataagctgataacttgagaccacttgtcataggagttggagcaggcttggcatcttgcatctnagctttgcatagaagatcagtaatgtacctcccttgagaaagatgcagaccatattcagtaggagtaacctcaattc

SEQ ID NO: 45496 - DNA, 1010 bp, Cannabis sativa
aaaaattgtttgatcgaataattaaacataatttaaaaactcagaatctgcatattcgtacatatactatttttttctaacttaaaaaaataaacatttttaattatacattatgtaaaataacatataaagtacatgtttattcttgaattagttaatggttgaccacctaaataaaaataattttttcaaaaaaaaaataaaataaagagccccacaaatcaaatatcacaaaaaaattaaaaaagttaatttgcctcgtaatcattaattggtccaccaaatataagaaaaataaaataatagtttaagaagtctagtctcattcaatatgtgtatttaatttacgagtgtttgtagtgcgggtgatatattttttgtttaatttttcgaagagcaccgtacatgtggtttgaacaatttttcaaattgtatttgcactgtataaatcttaaaactgctctataaaatacgagggtgatttgtaataattgctaactaattcataattaaacattaaaataaaaaattttatatagttaataaccaagaaatattcaaacaaaacaataaagataataaaactatgatacgaaaaattaacttaataaataatataatataatataaactataatatattatatacattttttaaatattttttttacacaaaatattcattaatttataaaacatgctcacttttgtcattctattcatacaaatgtgtacacaattgataaatgtaatgcttaaaaattagtattacttctaataagattaaacaaaactaaaagttgactaaaaatataaattatattaaaaattagtattacttttttaagagtgggggtgtggtttaaaccacatttataaaattttgaactacaacttcaaactgcaaatcataccacgcagtttaagaaaaattcaaatcacaactgcattgtaaaaattctaaattacatattttagtgcaatgtggtgtggtacgaatagtttatacg

SEQ ID NO: 45497 - DNA, 1038 bp, Cannabis sativa
acatgtggccctaatcttgggtggaccgtttatcacaaaaagtacaaggaacttgcagatgagatacataagagaagtagaataagcggaagtgtgggcattgtttagtttctagcacaatgcccttggatgatgaatcttcccatcaccttcaccgaggatgacgctagaaatgtgcattccccccacaatgatccattagtatttgacgcgcagattttcagtaaataagtttccagagtcctagtggacaatggaagctcaataaaaggacgattcaaatttgcattctaggatagggcttctagaagttgacttaactccttgtcccattcaactgcaaggtttcaaaggagacaccctaatgcttatgcggaaaatctagttacctatcaccctcaaaggagaaaacaatgttagtgcttttaagcactctacttctgtggtggtggatttctcaacgtacaatgcaatactaggatgaccaagcctagtagactttgaggcagtaacttccatcaaacatttctgcatgaaattcccctacgataatggatgtattggcatgattaaatgtgatctaaaaagtgcaaggaattctgacaatgtcttaacccgagctgtgttcatggtcttggaagaggcatccattgctcctaaaatggaggatcaaaaggaaactcaggccatctgggaggatttcaaagatgagttggatccctgggttgggacggaaagaactttagaaccaatgaaggaggtagaggaagtaagtatcaacgatgagaaccccaaaaaaaccatcaaagtgggaagaaacctacctccatccatataagagaagattgtgaacacattcataaagaactagaatgtgctggcatggagccattctgacatgactagattcaccgtaatactatttgccatgccttgaacattcgagaagatgcaacacgagtccgaaagaaaaaaagacccttggattcggtaagggcagaagcagtgaaagtggaagttgataagttgaccaccaat

SEQ ID NO: 45498 - DNA, 2334 bp, Cannabis sativa
tagtttggtcattatacctaaatatagtgcctcattttaaaagaactaaaattgactagacacaacatttgttattgtcaatcaatgtggttaatggaattactagttaatttcttcctataattaaaatatttatatttatttataaaaaataagtaaaaaattgtttatatttatttttacaataaattttttacatgtattcttttttcaaaaaagaaaaacctattatatctaaaaattagtaccgaataaaaatataatcttattaactcaaatcatttaaaagaacattatgtaaactgctcgaagtcttagaatccaaataagtacaattagcatttaactacccaaatagtaagcaacacaaatagagcctcattttaaaagaactaagaaataaaaaaccaagctaggtcattttacccaaaagtagtgcctcattttaaaagaaataaataaaaaactaattaggatttttgtcccctaaactttgacatgtactaaatcatgttccttgaatttttttggtcgttaaaatttttatttgactattaagattgctggatttaagtacttttatccaatttcattaaatcttactaatttagtgattgtttatgtactaaattatactccctagacattgatatctactaaatcatgtatctcaaattttgacatgtaccaaatcatgcttctaaactttcatccatgttaaatttccttactaaaattggacaaaagttattaaatccaacaatctcaatagttcaggagagagttttaatgaccttaaaagttcaagagacaaaaatttctaattggctagagaaaacatttgttactgtcaatcttatcatggttaataggatttaaaagaagaaaaaaatctaatcatggttaattagaatatatatatatttaaagaaaatatttgcatggctaaccaaaatatttgttattttcaatcttatcatggttaaccaaaatatttgcatgaatttgctaaattaatcattttaaacattaaaatttataagataatctcacttaatttattctatgcgaccgtgatagttgtacagtgtaaatctataatcgttttgtgaccataatagtcgtttatagtcgtacagtataatttatggtcattttcataaccataaaagattattttacataaaaaattttgtaagattattttgataacaaaaattttaatgttatttctacaaaaacacccctcaaaagttcgaactttcataaaaagcaaacaaaaatttgccttcactatacgcaatatttaatgggccgcaagcccgtacaatagtggcccaagtaatgaaaacagagaagcccaactaactcaattcgcaaattaagggagaaatacaaaaccctagccgtgcccttagaaacctcaatcacagccgtcgatctgagagggttagggtttatatatataaaggcctcactcctcattcttgagccgctctctctcctcctctttctttctctgtctctcttcctctactcaagcttcaacaatggtaagtagacctcaacccaaacttcaattgcattttactctattactccatttttaactgtaaactatcaaatggtaattgggaatcttcgtgttgcttctgctctttgttttgcgatttcaatgtttacttaagactgagttactcagtaattatctgaagtttcctttaccctttttccgttcatgttgctatctgcttagtttctgatctagagatttctttgtttccgataaaatatctcatttttactttattctctcttatcatttgacctacaaacaagttttgtttttttattaattcatttggggcctttgctatctgcttatattgtgatctgggttatatacttttgttgaaatgaaacctacaaataagttttgtttttttattaattcatttggggcctttgctatctgcttatattgtgatctgggttatatacttttgttgaaatgaataaaatcagttgattttgaggttgtacctagataaaggctgaaaatttatacacgtttttctttacgttaaattgtttagttatatattggtatgtatacatatgtttgctgagatcttacgtttttcttagctatgttggttgctccgattaggttttctagttctttgttagtttttgcagctacgttatatgctttgtgagctccttaagagtatccactgacatttatttggctctcatttcaggtttttgtgaaagcacaaaaatcgaaggcctacttcaagaggtttcaggttaagttcaagagaaggagag

SEQ ID NO: 45499 - DNA, 1331 bp, Cannabis sativa
aaattgtaaaaggtgtgaaggcctttagatatttaattgtagaactattgtgatatatggaatgagaataaaattttggttcaattggagtttggcactaacttgaagaatacattttaggagagttagcctatcttggttattatctatcattggcgcttttcattgagagaattttagcaagagatttcattaagaactctaaaaaataactgatgaagaacttcatgaattcgtgatatccacattgaaatccatagaattgtgtatggatcaattcttcgatgctcagaagaagaaaatttatgccatttttgagccttgctgctcatcggtggaggcactattggattcctcttctcaacctaattttccagaggtcaataaccacactgatgcccctgttgaatcagtgagaagctagatggatttggatgatcatggggaagctttagacatcgttgttgatatggatctaatttgagatggcaagaaagcactcgcgaagttgaattcaactttgctgaagttggaggagaaactttctacttcatcaaagattttgtatcggacggtctcgccacctctcgatcgagcaattcgatcatcttccatgtacataggtgttgctagtggaatgattttagatgatgcaggggtccttcgcttgagctcaaagtatacaacgttggagaaaatatgacttgttcgacttgctctattagtcgtcaataacatctgcattaccttcttcgttcgtgattcaaaccagacctagcacggatctggtcgagttatttgtctagaattttttaacaaaaatggcaactacagcgagggactatccaaatagaaaaagtggagctcgctggacaaacacagagtgttgacgaggaatggaggaggcttgttactggcggatagacagaggcgtggtcctgtcgaatggcaaaagccatcggaggaagcaaagtcgacgacgaagaaaagaatggaggtcctacggaaaaaaaaagttgagcaaatatataaatatatatatatgtataatgttagctctcattttttatgaaaagagtaggaggtttgaccacacatgctatataaaggtcatgaactctccatgggcagctacttcgaattgtagaaaaaaaaaaattggcagcttatattgtggagaagaagaagttttctctaataatattgggtcgtttggcttgagctgaatacttaaaaaaaagagattaacaagaggaaattacactcattatgggattttaaaagttttttttacttaaatatggaagttttaggtttgaccaatttatatg

SEQ ID NO: 45500 - DNA, 1679 bp, Cannabis sativa
ggcataaaacccaacacaaatatctttgggccatttcatccaagagtgacattctttgggtgaaatgggtcaatgatattcatcttaaaaataactccatttggtcctatgatctcaaggctgatacgagttggtattggaagaaaatttgtcatgtaagagacaaattttcaaaagttgatattgttatagcaggtgatatgcgaatacatcagatattgctgggaggttcaagactaatctgctctacaacagcagattaccgcaggtgatatgtgaatacagtaggagcatttggtgttctttcattatgccaaaacataaattcatgctttggcaagctataaatgctcagctgcttacttgagacaaattccaacaatttcacatctcgttggacagtgttgattgtccgttttgtgaagctgcaactgagacaaaccaacacctatttttcgagtgcagtctctcttaaaaaattaatgaacagatcgggttgtggctggaaaaaaaggcttgactgaatgagtttcaaaactggaagtgttggctggagcaagacagaaggaacaaattgcacaagattcatatggtgatcattgctgctgtgatccatagcatatggatcaatagaaacaattgtatctttagtgagtattcttggctagtttctaagattgtgcaagaaattaaaaaaacttctttgataggttgaatatagcaaaaaaaaggaaattagatagacttgagagaatgtatatagatcaattatattgtaaataacgggttcaggtgtgctaagcttgtttttgttgcttagttttagttataattgcttgtgattaacgaagattgttccttcttgataaaaaaaaattagattcttaattaaaaatttaaaaataaaaacaattttataaaatataactctaaaaaataattttacttttctaattttaaaaactaaaaactaattaaaaaaatattaaaaaaaaaaaaaacactctatacttttagattatacttaattaaatccttttgaaaaagaaagggtcaaagtaatttggagggtacgatttgacagtagtgaatgtttctttttgtatttagtgtgaatcaaaggtatttggttggagagagaggaaagggttcgcattcgaactagggtttagggcagattacggtaaccaatgactcgcttgagctccgaccgtgttctcagggataacaacactcgtgacccttcaaccattgaagctctcactctcaaccatagagctctctccgatgtaccacgttttgtgtttatatttcttccccactctctctgcaccctccatgtcgtaaattaatcaactttaatctctctgactctctctcatgtgaaatgttcaggtctcctgcttgaaggacttcaagatcttggagaggcttgacctaaagctcaacaatctcacttctcttgaggtgcgtcatttacttctccatatttgtatgcggtagagtgaaagttatatatgtaagctagtactgaggtgaaaggggtgctttctgtttgatttcaggatttgaagctgtgtacaaatttgagatggttatcggtcacgcagaacaaattggagagcttgaaaggaattgaagcacttactcagctcactgtaagtgtaccttttcacttt

SEQ ID NO: 45501 - DNA, 1898 bp, Cannabis sativa
atataatagaaaattaatcatgtatatttattttatgtatatttttataattacttaaaaataataaaaactttacaaaaatgtgaatttactcagatttttttactttttgttttataaaaatataaaaggttattttcatattgtttttaaaacaacattattttttgttgcctgtggcgcgctgagcataaattggccccataaaattacattttgtataaaataatttaaaataattttagtttttctcccataaaatggatttttagcatttttgttcctataaaatttaaatttttttattttaattctatgtatatttttttatttatatcctcacatattttttatttttatttacataaataacattatttataaatatttcaccagcaaaataaatatttttcattattaaaaaaaaaattgcaacatatgaaaacattattttgtgtaaaagtataaataaaaaatctgtaaaaaaaatccttgaaaatataaaacagaactaaaaaaattagtaaaaataaaagtgtgactgtaagtacttttggtaaaatttctttaatgttatttgtttattatttttgtttttgtgtgaatagtttcaatacgcaaatcattcgagtaaaaattatgtgaagagtggggaagcgaaattgaagttcttgttgattaatatgagatcagatttttcttttgcattattttctggaggcttctcagctgtaagtactctcctctctcatcatcatcttaataattaatttatatattttttattaattaatattaatatattattgtttagatatcatatttatatatcataccaattatttataataaaaataataatttcattaatgcagcccaaattggtgtcgatatctgatgtgttatcagtatttgctaatccaaaagcaccactctatccacgtcttgccataggaaagtcttgggatatagtgagtatatttatatttatatagaatagatatatattaactagctggttctttatatatttgttgtaagatatttgttttatttgtacatgtttttataactaaatattttattgatcaaagatgttagtatattatattttcctttaaaaaaaatatttttacttattatcaaaaatatctaactcaatttcaaaattttttatctcttaatcaatggaacaatataaaaataagatttttttttttaatttgataataaaactaagcgtgtgtagaagtttaaaattttcttaataacactattcatagatagtattcatttagaatttattttcagaataactaaatgaaaaaaaagatatataaaaaaattaataatttataatatttgtaaattatattaatcatatagaagttgaatttttgtgagaaagaaaaaagtaacgaaaatgtgggagaaaaaatgaaaatgaaaaaattatgcttgatacaaaaagaaaaattgtgtagcaaaacacttgattctacaaaaaattcatggcaaacataaaaaaattgatatttattattattattattctccacactatttttcttaatattttttttttcaaatcataatccaacttttaaatgtagcttaattaaaagaatcaatatgataaataatgtaattgagagtgctggtgacttaattatatgtataaatattatcatatttatatatgaagaatgaattaattatgtattgagatgattaaatatatatatgtatgcagatgacagtgacatggacaagtggttataacatagatgaagcagttccatttgttgaatggggtcttaaaggagaaacccaactacgatcacctgctggaactttaacatatgatcgaaacagcatgtgtggtataacatatatat

SEQ ID NO: 45502 - DNA, 1335 bp, Cannabis sativa
aaaaaaaaaaaaatcagtaaaaatgtgatattgagcgtgtcacagtataattgtaagattattggaaaagttagtaaatgatgtaaatttctccttttttaaatgggctaaaatatacacattttatagagaaaattacattgtatactcattttactttacatgatttaatttttacctttatttttatattttttgagatatacccacttttatagatgatattcccatcatacctcttaagttaatggaaattaggtgctagacttaagtgaaggatgaaagtatattaggtaacacactcacaaaagtgggtacattttaatgaaatataatatgagaatattttttattaatggatacaaaaacttatccaaatgatataattgttcctgaatattctataatttagtatgtaactagtctcgtatttttggttattaaacttttcaaaaatgcttcatacaaaaaaacttagaaataccataaaaatttagtatatcgtttgaaatttctcacaattatttatttattttgaaagcaatatatttaaatagaaaaagtatactttagttttattgtttgcgcagtagtatcatcatataatataatataatcaaaacttagaaaaatgccataaaatatgattttttttatcaaaagagttatataatggatttttttttaaaaaaaaaaaatatatgaaacctcagtatttggtgtaagagtttcacttggtattgattctcattaagaaccaaaatcctcgtaccaaacacctcataatgggtaaccaattactcagttatcttatactttttttcctatattttttaatttttttttttaaaaaaaagaattcataaaataatattttttttaaaaaaaaaaaaagtatattttaaaacttgtgtcttaaaagccataaaaataaaaatttccctaactagttacctccttagggtcaccagttacttttatattattttatttttaatttctccataatataacttttttgaaaaaaaaaaaactatggtttttgcacaaaatttataaataaaacccatgagtaattttgaaattagttaacacaaaacttcatcaacactaataatataaatgactattgcatttttttttttaatttcactttacaaaatgactttctttgcatactaatttacaaagtgatacatttaagagggagttttaaattagcatctacaatgaggactttaaaaaaaggagaaatttacatcgtatattaacttttgctttttacaaaaatactgtcaggcggtattttttatttttttactgtgttttttttta

SEQ ID NO: 45503 - DNA, 2603 bp, Cannabis sativa
tacaaaataatgacctaggcctttttacacaattagaaattaatcattatagcagggaatattctaacaagaatttgttacacattgggaccacactattcggttatgacagctcacagcttctaaaaccagtgagatattttcatttcttcacagcccatctcaaacttgagggtgtttgaactttcaacaactccaaatttgtccaccaagaaatgaaatctttgttgtgtcaagctttttgttaagcagtcagctgtttgatcacttgagggaacatatctaacttcaagtgtcttgttaatcactttgtctctaacaaaatggacatctaattcaatgtactttgcgcgagcgtgataaacaagattaatagccaatccactagctcccatattgtcacaccatgtgacaggagtacatggtaaaggaacatcaaactcttttgtaaagcttgtatccatgcaatttcagcagctacttgtgcaagggccctgtactccgattttgtaccggaacgagatacaactgcttgctttttggatgaccaggatacaagtgtatctccaaggtaaacacaatatccagcaatactatttctatcatcaggacaacatgcccaatctgcatccgagtatcttgtgatagcaagtctatccaaaggtttgatgtgaagaccatgataggttgttccctttaagtatccaagcactctttttactgcactccaatgtgttgttgtaggggactgcagaaattgacttaatttgttgacagcaaaggataaatctagtctagtatgtgtcaagacctatgatgcttcaatactttggggggtttgctagaagtttaccatctgattttgatagaggtttacctactgtcataggagaagtgcagggtttgagctgcatcattcctgttttaacaagtagctctttaacatattttccttgattcaaataaagacctatttcatctctgtgcatctcaattaccaggaaacaatggagtgatcctaaatcctttagagcaaacatctcattcaacttatcaatgaattaattgactttggcaacattgttccctattataattatgccatcgacataaattagaaccataataacaatcccaagtactttgtagaagaacaaggaagaatctgcctttgagttagtaaagttccaatttagtaaggttgctcttagcctctcataccaagcccttggagcctgctttaaactgtagagagacttggttagtttgcacactgcttcaggttgattttgattttcaaaaccttgaggttgtagcatgtaaacatcttcttgtaaggtgccattcaagaatgcgttattgatatctaattgtctaatttcccaattctttgaaacaattgagagaatgattctcatagtggaagcttttataactagactataggtctctccaaaatcgattctaggctttctttgcattttcattcataaaactcgattggaagaatgacctaaacgtttatgccacctatcctttagggaaagaaaattggaactagcaacatgcttgtcccttgacaacgaaacaacaccagtaaaatgtttgacagacttagaatttgaaacagaacttgagtggttgagaagaccttcttgcttatttgtaagatggtataggccatctcaaagaaaagagtcccttggaagagcaccttctttgtttccaaatccttcacaaaacaattcgagcaaaaaattcaacaaacacattactatcatgtgtaagtttagagatactgagtaaattcttagttatttttgggacatgcagaacattactcaaaattagagggttgttaaccaaaagtatcagactattaccaacatcagcaatttcaagtttattgccattaccaacagtcaaggtcttctcaccattgtattcagtcttatgagtcagattgtttgtgtcagttgtgatgtggttactagctccaaaatccacataccaggttttgtcttccaccatctcacgagtggctatgacagcagaagcttcattgccattattgttgttctgagttactttgttgccactgttaggtccatttggatctgttcccatgtatgattcatcataccaattataacagtaggctgcactatgaccataactcccacaaacttgacaattgggtttggagttgctttgatttcttcctcctcgacccctgaatttaccaggtcctctaccacctctagattgaccagggctaccacgatttccatgaccataatggcctggatttggagatttgtttcctaaaaaaccaaaagatctagtagcaacaatattagcagatggtgagcttgagagtggtagtttgaaggatccagatagagttgttaacctgtctaacttactgtcaaagcttaggagtatatctagaagctcttgacaagatgtagatggtcttgtttcaacctgaaacacgattggcaagtcttcgatgtcaagactagaaagaaaataagacaccaattgtttttctaggtaagggtcacctgcaaatagtgtcttcagagcttttcataagctgg

SEQ ID NO: 45504 - DNA, 1170 bp, Cannabis sativa
agcacaactacaactgctttttttcaaaacacaactgtgccaaactggccctaaacactttaaaaattataatttaccaaacactcacctcagcttttttccacagttctgctacagctgtttttcctcacagcacaactacaactgcttttttctacaacacaactgtaccaaactggccctaaacacttaagtgagagatttttccattagtaattgtccagctcattcattcattagatttagctaaataagagtggatttctattcactctttaactaagaaaagagaggagggatgtacaaaactggtgtgtgtttaatcatcatgagctagactcaagtgagccacaactcgagctagactcaaatggcaaaaagactccaacttgaaaaaaaaaaaaaaacagttccaacaattataaaactaaatcaaaatagaacaaaaatcttaaagagttacgcatggttgaatctcaagtgaaatacatgcattgaaaaataaaagacaagtgttaaacataccttgactagtgcgaatttctttgcattctctattgaatatattattaaaaaataattttagaaataatttaatacattctaagtattaattatttatatgcaactcatcaatttatgactgtcagattaaatatttatagctctaaatatatacctactattggaacaaaattaaggtacatagacatatcttatatatatatttatatatatatatatatatgacctgaaaataattagatgtagcgtgtaagaattgagaaaggaaaaaatgaaatgagtagtatatataaatcttttctatattaggaggtaccatcaattaatttgttacagaagaaaaaaaaatactcacgacaaagactactattattggatactagtacagtcatatatatctattctatataaaatgtggctatataacaaaattcttgatttatgaaaaattattgggtaactttttttttaaataaaaaaaataacaaattattagatgttaccacgtaaagggtagcatctacgtaattagttaaagggtattttacaattttgtatacattattttaattaattacaaaatatatgtaaaaaaactcattatcattttctcatacatttttatatataactaaaaactttttt

SEQ ID NO: 45505 - DNA, 1731 bp, Cannabis sativa
ttgtagtagtgatcctaacccaaccaacgtgtcattcggttttgacttacttttaaccgtgtctattttttatgactctaattaacccttaataattcatatcgagttcatttggtattatcgtgatcgttacttgaattaccacacttagctgcagccatcaaaatttagttttgtatagttttccaattaataggaatgctgttatgcatgtgtattggcaacaaagaagaacagctaagggatttattacattgtggtcatcatcttaaaaaaatgtggagagagctaaagagatcaaaataaattgtatacaaccatttgaaaatgatatatgtaataaattgaatctttcaactcttgcttttctttcacatacattttgccaccacaacaagtaacttttccgagctctaatatcacttcaaactaacttgtttaatgagcgtacatatataaaatagctttaataaaataacatatttcatgtttttggtatcataaactattaagaactttttgaaaaattgtcggtgattctaaataactacattgtttatcgtaacataaaatttataggattgtaatccatccttgtgccaaaatactcaaatatttgttttgaaacttgttatatatatatatatatatatagatatattttatgtatacctgccaaaaactttgatggtatatgaggtattgttaaaatgtgtgaatggaattcaccacacctgatcacaaccctctttggtgtgctgtcattctagatctttccacaattgtgagctgttagtattatcttgatttccctaaaatcttgggattccattactattggaaccaatcagagcccaagagaatattttatttacaaagatattccctctccgtgtactataaatatgtacattcatttcactgtatattcacagagatttaatacaaaaaaaaaaattcattacactctttcgattgtctctctgcgtctcctctgttttctccttaatattttctgtcgatccttctttttagcttggtatcagagcgggtatggcatccccaggcgactcctcagccaacaacgcaagatctcaagctgttgaagctcctcctccagctccagcccctgcaccagctgctcagcctctacctgcacctctgctgcagcccctcgcgcctatcacaatccgcctggacagagacaactacccatattggcgctcccaggttcttccaccagtacccgctcacgatctggatgggtttctctttggcacaagacccattccaccacagtacattgaggctccacccaatgaggtaaaccaagaaccaccacagcaggtaaaccctcaatttacggaatgggttcgcacagaccaagctattttaagctggcttttaaattccatctctgaggccatgcttggtcatgtccttcgctgtcgtgtttcatatgaactatggtcactattggaaaatttgtttaccactcaatctcgtgccagaatccttcaactcaggtttcaattgcaatccctaaaaaaagggtccatgactatccatgattacatactcataatgaagtctattgcagatggtctcaactctgcaggacaaactttcagcgatgatgatctcatcctttacatactgggatgacttggctccgaatatgactctgtggtcatcaatctcacatctagggctgatcaactcaccttctcc

SEQ ID NO: 45506 - DNA, 2003 bp, Cannabis sativa
gaggtatttcgatccttatattcatatagtgtatatgtttatttattccgcatgttatatacacatacatatattttatattatacatataaatgtctaacattaactactcgaaaaaattgttatatgacaaagttcatggaaaacacctaattagcttttttagaaaattaatttgataacaaaaattttcataatcactatttctacaaaatgctcagaaaaaacaatcaaataaagctaagcttatcgatcagaagtaacgagatattagagagtgatgtagtgaaacctttctcggcgttgttcgggggtcaatccatcgtttttgggattcttgggcttttgacctgccctagcttgagccctttcgcgatcttttgctctttgattaccgcgttcgcttcagttaaagaaaaacacacaaacaaaaatataaactaaaacataattacgaacaatcaactcaaaaaataattcctctgctttctcagcttccaaacaatggaaaaaattaaaaataaaaagtaaccgcagatcgaaggatatgagtcattatagagccgaaattaacagaaatagccaaataatactcacaaaccgaatataaacaaatccctgtaactcaaggcaaaaattaaagaatcatcaatgatccgagacgagaaatcaacaatagaaaatgagaaaaagagtaaatcaacgagaattaccttgaccgaaattctaaatcttctacaaagttctgagattgacgagaggagaaagatgaagaaagagttggtagagttgagaagtgctatataaggaagagttctcaatcagtcgttctgtgtatggaagtctccagaagcccagagattgtttcttattcttttttctttttaagaagaaattaaaaatatatatattttcatctgacggcagccaggttgatatctgccagcctgtttcaaatccaaccgttcattttattcatggctttttaaatcgaagggtgtttgggccgacctgcaaattagattttgattgggcctccaaaagtaaacaagagattacttcataaatattaattacccacaagttaaaaaatatttaaaaaaaataggaatgtacaaaattttaaatatttttacagtttatatttatttacaaaaaatatagacaattcaaattttattattttcacgttgttttcttatttttataggaaaatctaaaattgtaattaaaaataataaaaaaaccgtagaattgaaaagaaaaaaagctgtaaaaatatttttgcaaaaaaaaaaaaaatagtaatctgtctaaattttccaataaataaacccttactaaaaataagtagatttttttttttcttaaaaatgcatgtccaaaatataatcacaaaaatatattttcgctcctccttttagtaaagtctcattaaaaaggagaatttgtcaagtaaacatataaaaggagataaaaagtttgtggaaattattttttcactactctatgctactttttggttgttcatcagatactctattttagaaaatacacttactatagttttttcaaaattttattacaaaagtatagtacttctagatttgaccactttatgtggcatattttaattttaacattgttttatggtattttgtatacatatatgtggaaatttaatttttaaagctcatatttgatgcttaaataaattatttcaaaaaactaaaaaactctcaaagctatttgcctcacccgtcaacaatctacctaccgacctctgttcacaagcgacatatttggcgaccaacgactcaaacggacgcttgatatgagatctccaccaccaaaatcccaaaagatcttacagattccgccacagttggagatctagaaagtagaaactaatttcttaaactaaaatatcaaatttcataatacacaaatcttatatgagttttaatatttgtaattggtttctttattcatcgccttaacaa

SEQ ID NO: 45507 - DNA, 3567 bp, Cannabis sativa
tctaagcactaaagattcccccaaggtaaacaaactttagactccataaaaataacaacatgcaacactgggccaacgataaatactttagaatcaaaagcaaatactgtgaaaaaaattacaagtaaaaaagaaataacatataagtatagtggataagaataatatgtaccaatatacacttcaaattataacaaatctaccattctattccctactgatgaaacttacacgagaaccgcggagaatgtcaacaggcatattcaagccccatctccccttgcacgatcgaatacaggccagtagaaggaatgcttctctggacatgtcacgctcattctttgaactaaggcaattatcacaatttcctgaaaacataataacagtcaataatgagaaacgttttaaacattaatgcagaagatattgtgctagtagtgtggtaattaagctgaaacaacaatgtcaactacatttacatagttattaaatcattggaataaaacaatctcaatgttcagaagtcatattaactcataattgatttttctattataatattactcacccaatattatcaaatattgatggtatatttacagatacattgctacgtaagctaaggttgatactatttctaaatgtttaaaataactcctattaatattgagctatagaccaaataatatcaaaaccttaaccagggcagcacagtattcaagctaagaaatccatatgtttcccgtaaaagcccagtattagcagctgttgatgaaatcaataatgttaaaaagctaaaagccccccaaaaagaactagagatgtagaataacttgcaaaataaaaaattgctaagaagaaattatatttgagttcctgtagaaaatcaagactctagatcagactattaaaaaaaatctagaaaagacaacaattcaatgcaaaaggtgaaaggaagcaaaatccaaccacagttatcggccggataattctccccaaaatgtttaagcaagaacgttcttctgcatgttgtcaacaaacaatagcgttgtgcagccatcaatgactccatgacagcttttcgctgagttgcctggtgaacagcacccataagtactctcatatgacagtgataaacccacaaaagcaattgttaatagaacttgcttacttaaaatgctaagtgaactaacaattcaatttatacaatctgtatataaggcaatcaacttattaagaagctataaagcaaatcaactgagagaaaaggatgtgtactgtgtgcgattcagctgtatagaagtctccttttgcaaaatcacttcttgtgtaataaagccagcagatagatggcacaccatctctcccacaacgaccactttcctggtagtagcattctagacttttgggacaaccataatgaattacttgtctaatgtccggcttatctattcccataccaaaagcaatagtagcaaccatgacatgcaattcgtctcttataaataatctggaaagagttgagaaaatgaaaaaatggtattattatgtctgataaacatcatagcaaccctatggcaatgaaagaaccgaagcatccactccacagcatgtattcatgacataagaatgatgaaatctgctacgcaaatatacataaaatgaaagttggaacctgtgggactcagcacgagctttattattcatttgtccatgataaattccagccttgatacccacatcctgaagtgacttgaatatctaaggaaaaaaaaaggtgaatagagttaacaaaacaaagtaagtgatttgaaaatacaatcgggaacaagataaatcttacaaacagcctacaaaaatctgaagacaagtcatgttaaacctatagtggctgtgcttgtaaaaaaacatatatacttatctctattgcctagtaaaagaaataacataggtgaactacaacatgtaacagatgaaaaatcccatttcacaaaaatgtaggcatgtaaaaaaacgaacctgctcaacatccttaactgtcgtgcaataaataatggttgaaccagcactagctacatattttgcaatttctttaacaagctcatctacagatgattgaccgcgattaaataacttgacaccatagaagagattgtgcctgtcaaatgagcctatagagacaacagggtctttcatctttagagagttaatgatatcatttcgaaccctgaaataatgcattaaaaataatcaaataaatatataaagcctcattctccaatcacaactagaagtaggctactcttaaattaagatttgaccaaacatgatgattaggtgcatgtttaaaagataattttaaaagaaacaaaataggtctaattgagagagagagagagagagagagagagagagatacttttcagtagcagttgcagttagggcaacaaatggaacgttcacaagaataccccgtaacttgtctaactgcttgtattccaccctgtaaatcaaaaaggacaaactcctcaagtaatgatggtgtgaaaaatatggaaaacggtgtattagtccacagtgatgtagacaagaaatggaaaaaccatcatgatcaaaaaccaaagacaataaaataaagtaatagaaaaacttaataacaaatcaaaaaactgaagaaagtactctgaatggtaattgaaatttaaaaattcaaattacataaaacatttaaagatcataagttgataacatatatttccaattgaaaatcggttgaattgatcacaaaaaatagccttttgcaaacagaaatttaatcaaattaatttgaataaccaatatacatgtttaagattgccgaatcttttcaatcatctagggaccataatgacgacagactctctaccaattccaacttatagtcccaatttcgatagtacagattacagaagcaaatttatctaatgcattagtagattccaaaggcagaggccaaatttctgagaagtccaagttggaaagtaataggctaacgtgattacctgaaatcatgcccccactctgatatacaatgagcctcatcaacagcaaacaaacaaattcccacattaagcaaatttgaccagaagctgaaaatgaaaccaaaatcatgacactaattcgtgttaaagaagtcatccaacattatataatgtcacaaaaatgtctactcttgtttataactatccacaatgatttgttactatataaaccacctcaattaccagtgaaaaaatcactatttccttctctcattctaagaattttaaaacataatttccaacaaggctaagataccttttaaaatgtatttgcaacttattttcattaggtagatttgaagggctaaacacacaaaaaagtattacactaccaaacctaaatgcattgcatatgttcattcaagtttagatgtatcctgcaaatgatgtacatataacagttcaaaacactgatctccaagatagtggcacgtcatttaatgcaaaaaccaattatacctgctaggaatcaagcatgccttttcag

SEQ ID NO: 45508 - DNA, 1454 bp, Cannabis sativa
gtattaaataatactaattcaatacaatacaatacaacacaatccaacacaatacaattcaatacattacaatacgacgtaccaaacgagcccttacatgtttataaatttatcaatagcaaaagaattgtgtatttaaggtgaggatgttgttcttcttggtttgtttgtcactttgtatatacatatattacacataatattaagttaatatatagattatttttcaaaagctaatacccattaatgaaaactctttaaaaataattataattaaatattaattttaaaagataaaattttaatctaataaccaataataaaaactaaaatttatgttcttaatttattatttaatttaaaaaattctctctttctaaattatattaaaaatatatttatataggattacttttatgttcttctctcacttatattttttttttcatctctctcttagcccctataaaataaccttaatcatataattcaaaaataaaaaatttgttttaattaaatagcaaaagtaaggatagaaattcaaattttttaaataatactcgttaaaagtatatatcatataacatccatagaaggatgcatcactataaaaagataaaaaaagaacttgtttttgtctttttgtgaattctttttatatttttttacaattttttttacaataacttatgtggatattttattttttactacattttgtggtacttggcaccaataatgatatgtcactatttatggtttttaacacatctcttagcattttcttatgaatgataatttttttaaaattaacttctgtggggttttttttaatgattttaattttttttttcttatgaatgatttttttatgtataatttttgtataatctttttttttcatgtattatttttattattattattaatagaacattattatttgacactttaatatgtcttacactatacagatatgacacttaataattggttaatttttatattattcaatgaatcaaaatttgtgagacccgataatgaaatataccaataacggtatgccacgatttatggtgtttaacacttctcttagtatttttcttatcatctttaataaatggtgtataatttaagcttaaaaaagagtcaatattatatttggcccaaatttataatagtgctataatgtaattagggtaaaattgaccttttttgataaaaatgtgtaaaaaaatcaacaaaaacattaaatttttattgagaatatataaaaattatattaagtatataaataaaatataaaaaataatcaattacattaataagtggcaaaagagtaaataaaaaaagtaatatttattatggtataaaatttgaattgtgctaaatttggcacaactacttttaacatgtgctaattttgaactactttgtacactaccattgagttc

SEQ ID NO: 45509 - DNA, 2193 bp, Cannabis sativa
aaaaaaaaaaaaacaaacaaatctttaaacgtaaaaatgtaatttttttacaaaaaatggtgtcctatgtaattattcctaaattatattactaaaatttaacatcactttcataaaacagtcaacattttttttgttgctaaatacatatgtaatactctcttcaacattcttttcatttcatttcaatttttattattttttaaaataaaataaaaatcatttgatttaatttttattcaagcccttgaaaaataaaatattcaagccctcactcagctgaaattctagcttcgtcactgcacattagtaatgtaaggctctttaacatccccttaagatggtagctattttatttgttcaccatcttggacaactcgatcataagcggctcttttttggctcactatccctgatcacgaggggttcttttgctctactttttgaatcagtatttttggatttttggtggcttttttttttttttttgctcactatcctcaaattacaattatgtttttatttattttgcactagtaccatgttaaaattgataagatgcatgagattccatctcaaaactaattagctatgagaagaatagttcatagatcttatatattctattatctttccacacataaacaacatgagattctctaatatgctccatgataactaaatgattaagagtccacattcaaaataaatttggtatgacaatttgtatactaagtatacacttttgatcactcatacatacatcatgtatatttcatctccttaagatggtagctattctatttgttcactatcttggacaactcgaccataagcgattctttttcgcctcactatccctgatcacgagtggctcttttgctctactttttgaatcaatatttttggattttcggtggctcttttttttttgctcactatcctcgaattacaattggtttttttattttttttttactctgtaaccatgttaaaatagataagatgcatgaggttccatctcaaaaccaattagcaatgagaggaatagctcatggatcttatatattctactatatttccacacattaacaacatgagactctctaacatgctccatgataactaaattattaagagtccatattcaaaataaattttgtacgacaataggtatactaagtatacacttttgatcactcatacatacatcattgtttaccgagatttttgaaaacagattagtaagggcttaaggaaatgcaaagtattaaataatagataaccatatttttacgtggttggcgtgaatgatccttagtctacgagtcaatagtattagccatctttgggaaatgtctaagtattacaagtgtttacaataacaatctctacattctttggttctctctaagaagaaaactctctaggaattttagcagagtttctgtaagtaagaattgttctctcttgtacatgaaatacagtggtatttataggaggcttcttactcaacatgcctttgaggccggcctcactatgagagatccaaccgttgatttgttaggtggttggtccatcatacggtgtacagagatgacgacctgtaccgtcttgacattttatacgttttaatcaaaggcctttccgttttacccgccctcaggaatggctactggataatgagcaggtgcggtggtgcgcatacctcgtactatggcctaacatggggaacaaaactgacgtcgtaccagaaaaagcattgtcatcacttctgtaatctgacagatatggaaggagacctttcgtgacatcatatggggactaaacccatcctaggtcttttcgtaacctgcataagcgcactcaaggaaatccttggcctttgaaggatgcttcccttcccggagaacgcacttgggcttttactcctgggaataagaaatgtcatgcatactgacgctccacctgttgggttttgtgccctaaataaaactcattttaatataatcagattaacttattaataaaagatcataaattattttatgttgcatggttaacatgattttatatttaatgtataaattctatgattatagtgctgtcaatatagtggaatataatcatgattatatgttcaaaagtttaagtctcatgatttgtcaatacactagatttagactgacatga

SEQ ID NO: 45510 - DNA, 3018 bp, Cannabis sativa
  modified_base (449)..(483): a, c, t, g, unknown or other
aataccaaacatgctctaaatttctctctctatatatctatataaacactaaaattttgtactctaaaattacaattatcataactattaataatattttaaaatcttaaatattaattatatcaactaaaatatttttaatattttcaaaaaaaaaataataactaaaatatcttccatacttttatttatgattcttgacatatatattagttgttaatattttttaatatataaaatatttgaaagtcgggatgaaatctaagattaagattgagatttgaaaacaacaatattagtggcgactacaagtaaaatacggtaatgacaatgggtgagatacggtaataacaatagaaactaaaatgatggtaacaactttaaatgatccagaaataaacataatgcattataaaaaagaatgtttacttaaataataataataatannnnnnnnnnnnnnnnnnnnnnnnnnnnnnnnnnnaataataataataataacactaatttttatgtaaactcccctatttgtttactttatttttagaaaaaaaaaggtaatttataactctactatacattaatagtataaattttaaattttttaataataaataataaaacacactaaataaacctttaataaataaaattatcaataattagtatttaatgaataaacttaaattcttttatcttattttatgaaattttatgttctaataaataaaattattaataataatatgtaattatataatataagtttactattattatatattataattatttttaagttactatatattatattgatatattaataaataattattttttacttttttattattttttaatataatactaaaaaaattaaaatagccgcgcgaagagcagctatattacatagttgtatatgtatgtatattgactatgtttgatgtgtatattctattaattttttttaagagaattataataatctatgtattatatgatagtaattttttaaaactgcaaaaaaaaaaaatgtggcatttaaaaataaatataaagttatttataaattagtaaagcgatttaattaatgatataagtttaataaaatgataatattatgacaaatattaagtaaaaatagacattatttaacaatgaacacttctcataaaaatagagagtgcaaaaaagaattttcttagagcaccttcaacagtagcattgtgaagaatgtttgatgaggtggaaagcttaggtagaagataccaatggagataagaaaatgatattcgtgcattgatgccacataatatcattgatgttatattttttttttaaaataaaaattaaaagagcaatatatataataatttaataaagaaaaagatttatttatattattatgtataagatcataattatagcattcttaaaagatattataccattggagtattttttttttgaggaaaaaactgttattataaatcaaatcatagagtcatttacaataacagagtttataggcggaggaatacaatctgaccaaaaacaatcttcatccaccccgagtgcaaattttgccaaaccatgagcggccgtattagccgtacgtttgacatgagaaacatttacatttgggaaaaaggataaaagacttcaaacatccataataatatcattaaaagtagaacaggctgcagttggaatatatagagcatttttgacccgtagagcatctgtctcaatttggagttgagggaattggaaatgtaaagcataatgcacaccatggaaaagagctagtgcttccatctcatgaggttcaaaactgcccagtaatttcttggaaaaagcagcaacaaccatccacatagagtctcgaaaaacagcccctagacctctaacttcagtcgaccgatcgactgctgcatcgatattaagcttaactacaccagatggcgggggcttccagggaacattcagacggcaagaggcagtgtgtggagcagaattagttgccggagatgcaccagaaatttgaggagactgctggtatttcaattgagctgatctgaaatgcagcatgtaatttgtggcaaaaagggacagctcctttgcagactttgccttgtgaccatgtaccactcgatttcgctccgtccataatgaccataagttgcatataatctgttctagttcagcttgagagtgaagatttgataagtgaatcaaataatcccccttatgcattgaggaagctttagaccagtcaaaagtgaaaccagagaatttccacatagccttagcaaacttgcaaccaaaaaaagcatgaccaactgtttcccaagcctgacgacaaatcgaacatgtggaatcggtgataattttccttttcatcagagcagtagctacaggaagggcatcgttgaagacacgccaagcaaagatttttactttctgaggcaactgaagtgcccaaaaaaacttccaccatgaactttgtgacaaagagctcgaacaatcatcaacattcgcaagagaagaagctaaatggtaaccggtctggacagtatatattcctgaggagtggtgatgccaagctaaaatatcagtattcctgaaaaaactcaaaggaattgttagaatgcgatcgacatccgactgtgagaaccattgctgcagaaggcctatatcccattctcgattttcttttatgagattagagaccacaccatttattggtccctcatagtggaaagggaggaaagttgagttccctgggatccaaggatcagtagcacacaaaacacggcacccctcacctattttccaccttaaacccgatgagagaagctgcttgccccaatggataccttgccaagtgagagatggggagtgtccaagattggcttcaaggaaagagttttgagaatagtaacgacttttgagaagctttgcaaggagtgtatcaggataggcatgtagtctccaagcttgttttgcaagaaga

SEQ ID NO: 45511 - DNA, 2426 bp, Cannabis sativa
gacttggccatgcttcatgtgtaatgaatcattcattgaataaagctttacaatttcaatattcttcttgccctaattttcattgctctatttgtcattttgccaaacaaaggaagttaccttttgttagcaatcgcaacatttctcagcattgttttgaattacttcatattgatatttgggggccatataacactcaaactgttgagggttttaggtatttcattactattgttgatgattgctctaggtacacatggattcatcttataaagaataaatttgatgcccaaacagccatcccatctttccttcaacttgttaaaacttaatataatgctcaagtaaagggcattaggtctgacaatgccaaagaacttcaatttcctgccttattttcatcattaggcattatgcattatcactcttgtgtgcaaagaccacaacgaaattcaattgtggaaagaaaacaccaacatttattaaatgttgttagagccttgttgtttcaatcctatattccccttccattactcctatgcctactgatgctattgagccaccatctgcatccttttctccgtcaattgaacctgatattgtccccatacatgaacctatcatcactactcggtccactggacagatccataaaccttcctatcgtcaaggttaccattgttttctttctactaatactgtgcaatctcatgtatccaagtctttcacatctcatcctctttccaatatcattgattacagcaggttgtcaccttggttttgtgctactgtgcttgctatttcaagtcattttgagctagaattttttgatcaagcacgaggcattccggtttgggataatgctatggatactgaaattgctgcccttgaagacaatgcgacttggattgtggttagtttacctgctgctcaacatgctataggttgcaagtgggtatacaagattaagtacaatgctgattgatccattaaaagattgaaggcaagacttgttgccaagggctatagtcaacaagaagggattgactataatgaaacctttgcccctgttactaagcttgtctctgtcaagctaattcttgcccttgctgctatttaagattggtattgacatcaacttaatgtcaacaatgccttcctccatggagatttacatgaagaagtttttatgactatacctccagggtatagtcctaagggggagttgccacctaatgctgtttgcaagttaaagaaatatatctatgggttaaaacaagcttctagacaatggttttagaagttttctacaactttagtggaagaaggctccaaacattcagcattcgatcattccttgttcattcaaaggaaagactccaccatcatcatacttcttgtttatgttgatgatgtcattttggctagcaatgacatttcaacagtaacaagattaaaggaaagcctaaataagagatttgagttgaaggatcttggtgaattgagatatttccttggcattgagattgctagaactaatcaaggaatatttctatctcaaaggcactatgctcttcaacttcttaaagacttagggcaattaggatgcaaagttgctaatactctcatggaagttaacttgaaattaagccaagatggagaggaaaagcttgctgatccaaaactatataggagaattattggaaaactccaatacctcactataactaggcccgatcttgcatacatagtcaacaagttaagtcagtttttggtcagccctagatctaatcatatggatgcagctttaagagctcttcaatacattaaagggacacctggacaagggcttttctatccaaccaactcaaaaattcagcttgtggcatacaccgatgctgattgggcagcatgtgttgacaggaggagatccacagctgggttttgcgtgttccttgagagttctttagtgtcatggaaaagtaaaaagcaacacactatatcaaggtcctcagctgatcaagccgaatatagagcaatgtctaatactacttgtgagcttatatggttaacatctttgctgaaggaattagacattgatcatattggacctgcgttgttacattgtgacaacaaagcagcccaacaaattgctgctaatccggtcttttacgagagacctaaacacattgagatcgattgtcatctcgtgagggaaaaggtccaagaggggtttgtgaaaacttttcaaccagcagtaaagaacaaatagccgacatttgtactaaggctcttcttcctaatcaattcgaaatcctcaaagagaagatgggaatttgcaatatatacactccaccttaagggggagtatcaagattctgttaaggtgtagtgtattgaattagttaggaagttagagtttgtta

SEQ ID NO: 45512 - DNA, 573 bp, Cannabis sativa
ctaataatatgccatatcaaaatatcttcggaatcaaactaattgtatagaaattataactgaataggggaatgataaaaaaagtcattaacaatgaaaactcctttaagtaattcaaaatatatttataaaatgtttgacaggttgatttactttataaaaaatttaaaactaattacaatttagacactattcttatttataacaactcaaatagggacttaaactttctatcattacattagaaattatccctataaagagattttacgttcttgagataaacactttttgaaatatcaataataataataaggagagcataaaaattacgagtaactcacatgaaatataacttggcccgcagctgcaccgttattaactaacaagttgaatgaatctgcatgatttgtttcaaaaggcgaaagcatgatcaaaagagttgaattcaaatatgcaggatatatagcaatctacaaagctgtaaatattaaaggcaaacagagatgctcaagtaaactatgttttaacaagtaaaaaatacccaagaatcctcagaagtcgcttagcaag

SEQ ID NO: 45513 - DNA, 3139 bp, Cannabis sativa
ccgcaatttacccaaaataaaataaagaatattgtaagtgttagattgaaggcttttaattctaaacttaattaaattatatgtaattatttttttccccattaaattttaactactagggtctttttatatgatattaattactttaatatattttaaacatctcaagatatcttgagatttttaaacatctgaaaatgtgagatatcaaacaattttatatgagtgctgagagaacactttctgtcccactctcttttgcactttctcttaaatgtgatgataaatgttatatttccagcaagatttatttttacttaataattagttgtgatattctaatattattacaattgtaccattactacttctaatataatcattccactaattttttatttataaaagaattaaccggaaaaaaaacatatacataattttaagataaaacaaagtgacaattaatatttcttttgtggtatttacatgtactttttttttctttttcatatagaatattgcatatgtatgtatatatattagtagaatagacatatatcatatagtaaaaatattaatgtatagtaaaaataagtatacatgtaagatatataatagtttaagcatttatataaatattttttactaaaaaatataacaaattaaaaaaattgagctattgtaatatttttttttcctttttttttaaaaaaaaaatacatcgttgacttagtatattaattttttttgaacaatattatattgatttattgaagctcattttatgctatattaaataaagaaaataattaaaacaatatttgaaaaatactgtattagaagtggagtgaattttcacttgtataagaagaataaaaaacaacttaaaaatagtatgtagtgatcaatccgaaaaaaaaaaattagtattatataataaaagaactaataaaatataaaatagcacaaaaaaattaataataatacttttaagtcattaaacaaaaataatttgtaaatgtattaacttttgtatacattaaacttattatagtttttactttaaaaaaaataaaaatttacatttaatctatgtataatttaaataaatgtattgtacttttctaattttttaatgtggttatttttttcttccaaatatatatattttttgcttgtaattaagtaaaaataaaaaattaatgaagtcattagattataataaataactaattattataaaatactttagttagaatgacataattgtaataacattagaatattataactaaatatcaagtaaaaacaaaccttactcaaaatttgacattttttatcacatcaaaaaaagagtgcaaaagagagtaggatagagagtctccttagcactttcaaaacttaaaagcaagactaattaagatttttgtctctcaaactaggacatataccaaataatgtctctgaacttttaaggttattgaaaattttccctgaactatatattgagattgttaaatataaaaaattttgtccaatcttagtaaataaagtctaacaacatgatttaatacataaataatcaccgaattagtaaaattgaatgaaattggacaaaatctttaaatcccacaacctcaatagttaaggagaatttttaacaaccaaaaaagttcaaaaaatataatttggtacatattaaagtttaagggtaaaaattctaattagtttaaaatcaaaattctcacaaaaaaaaaattaaattaaaagcaaatttatagatgctcttaacaaaagttaaaatgatgactcatataatataatattgaacatttaaaatttgttttggcaaccattttttttttattattaatcctgtttttgttagaatgaattattagttcaatttcaataatataaagctctatagtgttctaaattaaatgcgacactttattgtataagctagacataattaaagatggtcaagttttagagatgcaggaattaaaattttctttaattaaacgcaatcaaaacatgaaattaactaaaatagataaatcatgttacttgacagctgaacactctatacattcgactaggctttagttgttaaatttgtcaaatactatatatatatatatagggacacgattttgtcccgtgatatactttcacagaatgtatttcgtaatacattagatgggtctcaggatacgttactattttttaaccttaattacccctagattaatctcagccctcagatcaaataactctctcatctaacggctgtcgtacatcacggaatacattccataaaagtacaaccacgagacaaaatcatgtccctatatttatattatgacatgaggcatgagcattacaattttagttgtatatcttgtatggtctcttaattaattagccttgaagggaatacactaactagtagtaacaataatagcacctaactatatactaatcttaattttgggactgttgttggtttttaattaatggtttgctttgaaaggtcattaataggtaaataagaaaagaaaagagagaggtcatcaggtcacagactatatgtcaaattagtgttaataataataataataattataataggtagctaggtacaaccccaaaatgatcaatattgactcaccaccaccatatggacctctctagatctccctctccttaagaactgtttggtgtggagccactaatcacatgggtgtgaagggagagaaagacccttctgtgatgtaaagtgaatgatatacatgttgttttcaaacacccctatgattgattcaccatttatgggaaaacccttatgaaaattaaaataaatactacttaaaaaaaagtaacaaaataccattatataacactattttgagctgtcgactttagcatgttagctgtcatttctctcttagtttaattttaatgtcaaaatttacactaaagtgctacgattttaagtagtttataagaattattattagagtgtgacagttgggtagctagctagaatgtaagaaaaaatatacgtagctcacatgttagagatctgaatagtcaatataaagagtggcaatactattattattattattat

SEQ ID NO: 45514 - DNA, 732 bp, Cannabis sativa
tcttaaatagttccttaacaatatgtgagatttattcctacactatgtggtatcattttatacttattatttttaagacaatttatttttatttcaactatttctctcttcttctttttttatatattaatttttcatttttatttttacaaattacaaacatacgaaaatgcaactgttttccaattttaatcaattatttacttcttttgtcaatttttttattaatataaattaatatttaaaattattcaatctttttcaaacttttatgtttgggtgtctttttcactactaatacactcttatttgttggattatttggcattggttggtgagaattaagtgtttgttgttcaagtataatacatattattctttataaatttaccattatatatatatatatattgtttgttgtttaggtataaccataaacatatatagtacaaaatgctcaattactataaaatatttctcatcctttctccattctttactataatatatttttcattactctattttatatcatctattacttatattattatttcccacataccttttcacaatcttatatccaagtagagagacatgtattattgtatgttgttgtgatcaatgaagccactaagactagcttagtggtgagggagggatgggaaaaagagagaggtcatgggttcgaatctgggaccttgaagttattaggctattaactgattgtaa

SEQ ID NO: 45515 - DNA, 2021 bp, Cannabis sativa
taactaatgtatctgttgggtttacggggtgtttctaataagactcctcgcaaaggagccacatcagttggcttctaagaatatcacagcggtgtagttagagtgtgggcgtattggggtgtatcgagatatagtgttcgtagaaggaaatgaatatagaggtttagtctattttgaggtgtggagaaattagttggtgtaactcttgaagagaccgagctctcgaactcttgagtatctcagaaatacctataagtgagaccgacgtaatggaaggggcacagtgatcgagtatgtgattggttagtaatacataactacttgaacaccctcctctcttagactagcttttgggagttagttctacccaagcggttgtatcagattcattgttataaaatggaatacacatgcatcttcagtcaatcaattaaaatatgagctttatgagattttttaataaagttcttgcctccatgaattgtactataaaatcaatgagcttgttcttctgcatatcctcacagtggtaatttgttataaggaagctaatatcataaccctgcagcaaaaagagcaaatgaatagactgataatactaagtaagaccgagacgcctacggtctactacatacctgtactggttttcttctaagcacctgaaatgcttctgctctcattgacaaaaatctaagaaattttttagttagtatgttttcgagttcatccgcctgctttacctggcaagaagaaaattacaaacacattaggcagagcctatattatcaattgtatttgagtatgaatcgaactcgaaatagatttggcacatgaaaaactcttaaaggttttctcttataagaaaaactttagattatatcatacacaatatgataaaattaccaaatattgagcggaatgccttctttattagtggttcacaataatcacaaatttcgggctataattatgcaagaagtttctataatatcctcattatattctttcacttctacaacacattctattatacatttgaatcttacttattaagcctgattagattgatctttcatgttgttgaaataaaaaattggtgaaatcccaagtgaaaaatgaacatatataatataatcataacttagacgacaaagaccgctgattcgggtttctcaccaaaagttgctacatagactcacttatctcaaactgtttcgatttgctgatccaacttagctcaatcaatacaaggaagcattgaagtaaacaagaatcgctcataattaccttgaggcttatacgcaatgaattaatagatgtttcgattaagcatttctcagcctcatttctacaaatcaaaacctgaaaaagtacttctaattaaaaatgttatctataaaaaaatatacaagtaagaacttctgtcactaaagtgatacttactggattcagtagaagttctgagctagtcctgaaagttatgaattacatatcaataaacacaccaacccaacattcagaaaattattacaaaactacttcatatgaaagtactgatagttcttaagaaaaaacagtggcacatgttatcagccaaaaatccttaacatacttaagctcaacctcaggcttgttatgtctttcaacttcttgacaaggaaagttctgcaaaaaaaataaagaataaacaagtgagaccccgaaaaagtttgtcttgaacttgaacatgagtttcatatgggcaattaagtataagggcctatagatttttggtactaaaaatggtaaaaggcatagtgaggcttagcataactatgaatttcacataaaagttttctctttgaacatgaatttcatatgggcaattaagtaaaaggacctgtaggcttttggtactaacaatggtgaaaatgcatagcaaggcttagcataactatgaatttcaaagaaaaagttttcctcttgaacatgagtttcatgtggtataactatgaattgtgaaaatgcatagtgaggcttag

SEQ ID NO: 45516 - DNA, 1263 bp, Cannabis sativa
tgtagatgttggccagcctttgtattgcttttccttgcagaggtcaggttttcttggtcgaatgggcccctccttggttggaaagtcacttttttctagccaacttgtgcttaaaccttaatcgcccatacaagctcatcatggctggcctatgtactccccttagttggctagacatggtggtgcagctccttaatggctcgcgtaaatcctctcacttgttgcttgacagtttttccatgccttataaggagacttttcttgttattaacaagactgtattccacgtgtcttcagtcttggcttatgtggacataccacgttaggtggacaaaatttcagataaaatttgccccccaagtccttatttgaacatctggtcggatagggacttcttcattctcatcttgcttatagtagcctttgtcgagtagccttgtttagccaagtattggattttgcatggcatggttttagatcttctgtctccatctatgcctcatcttctcttctttgacatctcttctttgaacctaccattgataagtttcaagctttttaagctttcaaaaactatttgattcttccattagtttgtaatctttttggtattttgatctacatgacagttttagaatgcataatgtatgattttatgatggaaaaaattctattttagcgttcattgtgattcttggctctttgattcaagaagaacacgagcaacacatttgagttttgaaaaaaaaaaaaaacacatttcaattcaaaactaaccttggctagccctaggggtcttgtttaagacctggctggccctgggattcaatcatgggagttggccaacctaccctaggaagctagccggttcattcctgcgtttggtgactctggctagttctttgctgagtcatgggaccttagctgaccctctcaaggcttgggaaccctagccagcctagcccttggttcaaagaaggtggccaattttctatccttttttgacctcggcaagaatcttgtcatggccctgtaggcatatacaaccttggtctcatacatggtttccttagaaactctgtatgaaacttaatggtgagtctattatagtcaaatgctcaacttaagacttaacatttgtccaagttgttacacttgagactttactttactaatacccaaccttgtacaatgataatatctggcaagcaccgttggggacagttgcctagatttttatctatggcttggaacctacaagga

SEQ ID NO: 45517 - DNA, 1010 bp, Cannabis sativa
taagttatgtttggcgaagtgtgtgtgggaagtgcaaatcgtggttaaattggggggctcagccatggttgccttcagatgatgatcatgttcagtattctcgtttggtgttgcagaatgcttggctaaaaatttgttcaaagtgggattaaaagaatgggatgaggagattttggagggtttatttgatcagcatgaaggagagcttattcgtagtattcttttaggcactcaaactaataatgattcttggtactggtctaaggaatcctttcaagtctaatgtttaaagtgcttataagctcttacaagctgtcacaggtaggtggagtttggatgataatgcagggttttggaggagtttgtggaatttcaaattacctccaaaagtgaagaattttttgtggggggctcttaccaactacttacctactctcactttatttagataaaaaatggttaatgtggatgaggtgtgtcctgactgagcataaaatttagaaaactgaaaaatcctttcaagtatatctacattgttggacttgaaaccgtttcaactgaatactgaaaaaatcaacagttaaaattaacattgaatgtagggttttaatattggtagcgaatccaccaaaaaaaccaaaacatgtattataatcataaataagtttaaaatttaagatatatataatatttatttacttatatgtacattctgcttaatattattaaataaaaaaaaaattacttcacctttcccatatatacaatatccatatatatatacaatatatataatatatatataaacctcactcaacaaatttccaaatctcttatcatacatatacattcagttcaaactaaaaaaattatatacttacatattcatctcactttcacacattctttctatattttgcagaacttgaactaataaagtagagcctagaggtacgcacaaaagatagtttttctatttttttttctactttgattctttacatgtgtgt

SEQ ID NO: 45518 - DNA, 1605 bp, Cannabis sativa
tcataattaacggcgggctttgcccaccaagagtgtccccaataacgaagggtcgagaccaccgaaatagattccccaccaatcttggcattgaaatttatagcgggccagacccaccgagatagattaataacgggagaccagacccaccgacatagacctattttttttgtaaggtacaagtaattatcgatcagtgacaaaaaaatactgacaaatagtttcttacatatacacattcacatttaacatttttagttgcaattaagttgcacgttagttgaataatggttttgctactacaatatcatagtattataaaaatagggctcagaattgtcaaatacgcaacttgcacagataaaacacgattgttgtaatttttctttgtattaaatatgtggaattataagttgtcttgttgttttatgttagttgggttggctcgcaacagatataactgttgcattacagtttcatcacagttgccttgaaagttgacttattctttcccttttggtcgtcgaagttgaaatttttttcaaacgaagacaccttcgactttttcttcactggacgaggaccacctttggccatgggggagaaaaatcgaagtcaatattacaaaaaaacttccagccggccaaataaaaaaaatttaaacaaatacatcttacacacacctttaaacccgcaatccatgcttcttggaatcgaaactttcgtctgatgcaaccttaggtcaaccacccagtaactttggtctgattatgtgtgtaagtgatagtataagaggtatgttggtaattaaaagtacataaaatgtataaatattattcatactttatggagatatttttgtaaataaagtatcaatttgtatttttcatgtaataactcttatttttcttttattaattataatttatatataaataaaactaataaatatatcaaatctcaactacacttctgtcaaaaaaaaaaaaaaaaaatctcaactagcccttttaataaaataaaataaaattacaccccttcaaatttatttaccactcctaatatttcctcgccaatgttagttaaattgtttaaatctgaagatagaagaccaagtaaatgatacatgtattaattaatttttatagtattgtaagtaaattgtaaaaatcgagtaaagtccaaacttttaattgagattagggaacataatctaaacattttttttttttgatgtgataatcaaaatatttttatatgaagaagtacattataaacttgaaaaattgagagaacaggggcatgcttggcatgcatactaagaaacagttttttgtgttttaaagcaaaaaaaaaaaatatttttaaaaacaaggtacatgtgttggccaagtgttttaaatttaattttttaaaaatagttaaaaaaaaacaaaaaattataaaaacactcctaacttatttttagaaaataatattttattttttatttttctctttcaaaggacaatgcaccatccaactctccatttggcattcgataacctgttgggcggctagactttcggtttctacagagaagattgggggctaggttgtaacacc

SEQ ID NO: 45519 - DNA, 1059 bp, Cannabis sativa
tttttttttttttttttaatacatttgcttgaacccataaaccccacccacctaattaaactccattcatttgatgactttttttaaaagaaagatttttgatttattatatctaaacactttgggggaaaaaattaaatctttatgcatggttatccatataagtcattatcgcttagcctttaaagtctttagcatcctctacaatattcttccaaaatataaatattaaaaaggttttttttacccatcattaaaaaaaaagatatttacatttaaatcttttcaacatttataattattaaatatatagttgtaattaaaaaagtaacaacaaaagtacattattttacaattttattgcaatcgtattcttattaaaaaatatcccttttaaaaatatttttcaatttattttaaaagttaaaagaaaaactaagaaagttaataattatataccttccaacatataacttctcatgtagaaacaaagaagctataatagctgtaatgacagtgcatagagggctgaacattgcaacaaagaccggaccccttagttgtatgcaccatgcttgaacaaaaaatgatattgcagtaccaattccctgttgatcaaatccatatttaattaattaattagattagaataacaaattttaacatttttcttttacctagtaagaaagctctttcatattcagctttcaaattatcctatgcaataatttttactactcatattatggcaactccttctagaagataatggattacgcgtgctagagcaatttttaatttattatgaacccaaacgataaatttgataaatttttgccaataatctcgcccgccaaagtgaaattatattatattaattaaagcccgcacaaaatgagctatttaaaaaaccaaagaactttataagactaaatttggttagacttttagttgtttttagcttcttaagaaactctttcttaaaaaattgttagttccttgaagaaaatattttagaaatgaaagctgaaagtagaaaatttaaaagagaacaaataa

SEQ ID NO: 45520 - DNA, 1247 bp, Cannabis sativa
taagccatgtctatcatattaaatgacttgaatgatatcaataacatggaaataacatatacatttagacacggaataaagaagggcaacaaacaagaagacaaacagcttacctaagcaaagagatgataaagaaaacaaaatacaaattgaaaaggaaaatcagagataagaaaaattatatttaaaattagaaagtaaaataaaattgttattcaaccatgaagctatcagagctttactgaatcccaaatcacaacaatcatcatgatgagtcgtcttttaaaatatttaccagtacctataatacctataagtttcttacctatgataccagaacctataatacctataagtttcttaactggatggaccttcacataaaaaaaaaacaactattctttttaagggaatcataagcagtaagcacagaatgctaaacttgtttagagtttcccatgtgttccgatccacaaatgcacacaatcatatagaaattcaccccacaaaaatggaaagagtaaacagttgaataaagaaactaaatagaaaaatacatattactattaatcattaacacataagcatcacagcaaaacaaaaatatatatagaacaatgaaaataatataaaatggacctccatcttttggagcatgtccttaatcttttcacgccttcgcctccttgcgttgtcatctccatctcctccttcttgagcaacaaacttatcactatcagccacaagttccgtattacacatttcgcagtgaaaatattcatctaccatagaatacaaccgcaaggcatccaacgcagtgtacctacatagttatcaccaaaacattactggattaatttttaaatcatatcagacagttgatctgactactttaaaaaaaaaaaaaaacacaaagttcaaaaccttctattgcaagtggggctggggcatatatattcctgaactgtgttcttgtcctccaattcatctttcaattttttcttcatacgatgcagtctgtacctaaccacatcatatatctgaaacaattgttgctttaggccttttccgaaatatgaaggacaatatttgaacactattggtaaactggaaaatcaagttagcaagcaaatatgtgttaaataaaaatggtaactattcccaggcaaatcataacaaaacactaatatcaaaatttaatgatgctaccgtatcttcaaaactattgatgtttattaagacatgaa

SEQ ID NO: 45521 - DNA, 1674 bp, Cannabis sativa
taatgtgaccaccacaaattatgcgaaagtgtgaagcagaagctcttttgcaacaaaatagttaaacaacaatggagcatatcctaatggccagacaatccatggaagaaaagatcacatacgacaagaactgttagattattagaagagccacaaaatgttgaaattgcctccatttactttctcttgaacaattaaattagtgctataaatatttaaatataaaataatttaattagcaccatcaccatgttcaatttcagaaagattcctatgttacaacacacaaatcacatagtgaggatttctttgaccataggaagacaatgaacatacaaatatgaacatcactggaaatgaaaaggatggaccccttagatattaacagcaagaagaaccacctaagaaataatcatgcaaaaacacgacataatcctgcaaaaacacaaccatcatactaatcatattaaaacagatcaccttgctgttgaaccttcctcgctggatcacaccaaaacgatgttgctcatctaccacagcaatccggagtgcagagaactccacgctttcagaaattaaactgtgggttccaatgaccattgatatgtctccagtttggagatcctgaattcatgatttcagttgtaagacactcaaaatttgaaataaaaaagaaaaatcaagataataatacatgccttacgaatcattcgtgattgttttaatggtgttgaccctgttagtaaagctacagaaggtttgcactcaacttcctctaagctttcaagcaaattattaaagtgctcgtaatgttggattgcaagcaattcagtcggaaccatgaaagctgcctgcaaattagcaagaaaaaacagaccacaattagagaacacagaaacgtaacggtaaaaaggaaaatgtatctgataaataaatggcaagccatatactttacaagcacttaaagagatcagattcatagagccaacctgatatccggagccaataacttccatgcaagccaaaaaggctactatagtcttcccacaaccaacatcgccctaaaaaaacacattgtagcgtattgtcaacaaataactttctcccatatcatccattctaatactatgaagaaaacaatgttaatttattaccaacttctattaatgatacacggcatagtaaatctacaaagaagggagaagggagcactgcaaaggtcctgtcccaagggactatcgacaacatctttgcaaataatttaagggattattcatgaatgaaggtcaagccacagagccaaaaaaaaaaaatagtccaccaatgatcttatccctcatctgagaaagcatagtggaaccgagtggaaatttcatttatctattttaggaaataacatcccaccccaatcattaaatctgaacaatcccaaacctatgaattgcaaatgactagaaaattcaagaccaatccatccttacccatgttgagcaacaacttgacctagaccaacagaaataaaggtaaaatagaagcagaagcacaagactcttgaaaatcaactgaactgaaaatagagacatgaaataaagggcagtgtgaacctctctttaaaaaattggtcaaataaacttctgtgggaagttatttatctttttctttttttcttttttt

SEQ ID NO: 45522 - DNA, 1224 bp, Cannabis sativa
ataatatggaattttaaataaataatattatatttatgatttatttattgttataatattaaaaatttacatcaaattttcatgtaaatacggtttgaaagagcaagtgaaaaatattaagatgaatcatgatgaaaatttatatgacgtgcatattaataattataaatctttaatatttatagtatcatcaatccttaacaattaaatgagcatgattttagtaattttttaaagatcataatataatgtcaaaatatcatttatatatattattatttatatgtcaaaatattataaagatttttatatattatataaaacaaatttagttaaaaacttaatgacatcccattcttctttttccagttaatgcatatacatgtaatttaataggttttaaagaaaaggtaaaaaaaaaattgtattttagttaataaaatataaaaaaaaaaaaaaataagagaaccaagaagagaatcaataatattatttttagttaataaaaaattaaacaaatgagagaattaagaagagaaccaatagaattatttttagttaataaaaatttaaaaaaaaaggagagaattaaggagagaacaaataatattatttagagagattttataacgagagaattaaagagagaattatttagaaaaattttaaaatgtcatatcaccgtttcatatctctctattaatcactactaaatcaatactctatgctaattgataacatcatatatatatatatatataaaataaattaatcattttatacactaagtggatgatatgcaacatattattcacaaaataatcgagagaactacacataaacaaaaaagaaatctacaaaattatggactctgtactaaaattaataatcaatggcacttctatattgaagttatgtgtatcatatttgaaaatttcatcttattgtcaagagagtagatgttttttttgaagcaataggcaataaataataaaataatataaacacaaatcaatacatatataaaaatttaattgttggtactaaaaaaaatatgtgtaatcaaaatattgaattattatatactaatcaaaatgagttgagtaaatatgaatagcaagaaacttacagaacaattaggaattatatatacattttaggtataatcaagtataaatatatgtagattttgttataaaaagaaaaaagctacgtttttttttt

SEQ ID NO: 45523 - DNA, 1185 bp, Cannabis sativa
atttgagtgttggtcatccccccttaggcttaggggatatatggtcgtgtctagatttgcgtcacgtacaaactgaagaagtcaataagcaggtagagagatatgcttattagtcattggatggttaatccaatggctaatgagccccgtaggaggatatcaagtataatgatattcttctatggacctttttcttttttcctctttctaagttcattttcttatcctacaaaatagcaggaagattttagtctttacaaactctaaagttgaaacctagtcaaccaagttctacaaagccacacttcttacagtcccatttcttcaatctcttactcttattacacctcgtgtagccagcactatcaaaaccaacttatcacccaaaatatcttttaagatttatctatagtatgcctacttatcagccactacattatcttctctagttacaatccttggaaacaaaattggaatgcttgcccttaacgtaccaaggcgcggcttccaaccaaatatgttgcctatcctttgctttagcattgtgatctggccatacgaccccatagagcttagcataataagattgcgtggttaagtcagccagtagaggcatcatccatatctatgtaaaccttagatggataagaaaatgcctcaaggcggatttgttaatccatgtttagcagcgtttgcttatagctctccaacccttttgtaatcattagttaatcctatttactaagcatctagtcaacttcttctttactatcctccgaagtaaattcctttcagtaaagcaaaatattttgtgtagtacatcctaagacaattactataaagtagtagcagtttttccgaagacttgccctctgagtaaaattgctgtcaagactggcctgaagaaggctctgaatttcaatgccctgttagagtaagaatattctctgaataaaggagaggttgattttctaagtacagcctacttgagaagccaaatgagtgtccccttgccttgttaaactcttcaacagtcagactactcgcgaagtgttcttcaaggaattggagacttctcaggaggcgcgtgggactgtcaggctcttttcctcttaaaggtcaaagatctagccgcagattgtctgcggtaatgtctggaaagtggaaataaggtaagaaactcac

SEQ ID NO: 45524 - DNA, 1279 bp, Cannabis sativa
tgagtgaggggtaacaagttatacttgtgaagaaaagactgaaaactagttatggcatggttagggggactgttattagcatttttatcgttaactggaagatagtcattaaaatcaccacaaataagccatggtaaattaggagcagaatcaaaaagtctattcaaaagagtccaagtgaaaggcttgttactgggataaggggaaccatataaactagaaaagtgccaattcatttaatcattactattaacaataaaatctatattactaagggagtaagttaaaatattaacattaatgttattgttccacaaaagtaagagtcctctccctaaaccgctcctaggaacttcaaaagtattatcaaaacctactctattcttgatgcgagttctagaactagaggtgagcttggtttccatgacaaaaaacaaaatgggttggtgttgcttccccaacagggagagatttcagaatgcccaaggactccatagattttgagcattccaacttagtagactcattttcctcagcgggattgcgaagcaacactcgccgtttcttcaggggtacagatagaggggacaacaacatcatcattttgagcatcttgggcacatttgagcatgttcctaaatagattttcaacttgagcgttttgcctggtaaacgacctcttagttccagtagtggtggtggcggcagttggtttttggatagtaatgctcttattttgagggtcgggagcaatggaggttggtggtttaggggcatcaagaggggctatcccttttcttttgttagtgtgagtgatcacagaagtgaccataataggggagggtgaaagggtggtaaaagccatattcaatccagttgggggtatgcacttcagtaggagaatcggttatgtcctgattgaggcttagagcagtgaagtcaaaagcaaggttcaaaaattgatccattacttgttaaaggcctttgtcagagtcattaccatgggatagatattcatcaattggggcggatcaattggagagatcaaaggggttcttttaaaacttggatttggtagggacacggagggtttccttataaccaagtttaggggggggactacaaagttatcacatctcatgaggtatcttccacatttgttataagtgtggtcgagcatgctgccaaaataacagaagttttacagtccctcatatctaaaacttagccatttagtcttggcgatcatacaaaagcgaatgttcataccacgcctgaa

SEQ ID NO: 45525 - DNA, 1881 bp, Cannabis sativa
ccattttaagagctatctccttaagtcgtttagaggttttgggttccaatggttaaaacctcaaaccttaggattttcttaactgttagtccctttgctgatttaagaagcgcttgggggccaaacacttgtttcctattttcaggtaggattactgctattaagacccttttggaagttgcaaatttaagttagctaaataccttggcaacgtaaaagggttgttaactcgctcccagaccgtcgagtggtcacagagcttagtgccttctaagtgccttgagtacttaactaattaaatagaacgctacatgaaggatgctttgatagggatggttttcttcgtggaaggttgggctttcgcgttccaagtgttccctgatcattactctttctagggttgagctttggaaaaggtgactgggggtgttacagatttcagacgttgtcccttgttcaaggactaggctaaaactgtgataacacttaggtgaatttccttggcgtagactttattgaatagactcttttgccactagggccacacaagctgcacatgctatggattttaggtaggaccctttgctcagggtgggctaaaaacatatacgagttcaggcgaggcttccccattcatccattgcaaaacatccaacagattaaactttaaaaaacacactaaaatttttgagaaggaatgcaagcgggtttttcatcatgggaaattttgctaaaaatgcatctcatttcagggcttacactaatttttaattttgagaaggaattcgaatgagtcttttccttgggaaatttggctgaaaatacatctctctttttggttaaacgcaagttaaactaaaaaattgacatggacaaataaagtaagtaatcatagcacactatacgtttaaaacatagcttgtgacttaagaacgaaaagcataatttttaagtgtaaacttcttctattttcattttattgtacccgtaggtttacataaagaagagaattgttcaaaaatttacacagaattcaagagatacattagagcttggtcacctcagcctattggtagtaccaacgcaagtggtctacattccaggcatgaggggcccttgatccatccatcctcttaagttgaaaagttacttgacccactttttgaagtatctcatatgggccttcccagtttggcccgagtacttccactcccagtttttgcacagttgggaatactcttctcaagaagaggtctccaacatcaaatgtacgattcttgactttggagttaaagtgccaggagatcttggctttgtacattttgagttgaacctgtcattattctcgaagttcctcgattaggcccaacaattcttggaacaggaatggttctagaaagtgttgtaggtatctcatcgatgaaaggggaatgttgcctctattgggattactacttcacacctgtaagccatcacatatggtgtgtgtcccgttagagttctctccgtggtcctatagacccaaagaactcgcggaagctcttcttgatagtgagctttgcatgcctgaagtttattcttcaacgttgtttttagatttatagcttctacctgtccattggcctatggctgggctacagtcgagaaactttttacgattccatacttggcatagaagtcagtgtagtgttcactgttaaactatttcctattatcggagataatcttgtatgtaagcccaaaacgatacacgatgttcttgataacaaagtctagaggattttttgaggtgacagtgttcatcgactctaacttaacccacttagtaaagtaatcaatcgttactatcacgtatttgattcctcttcctgtggggaggga

SEQ ID NO: 45526 - DNA, 1090 bp, Cannabis sativa
tttttttttttcttttcaatttgtctgatattgtatatattcttttgaaaatttttattttgctgaatttttttttgaagatttatttaaaatttcatctggtaaatattatttattcaatcaaatattaattataataattgctagtataattataattaaaatgtgaattaatttactatatattgtataactattaatggtattgacacttttttttatatatatatcattatattattatgtgacaatatttttgtgcatatatctttcttactattctaaaagtgttataataatttgatattttatgactattttactctctattaaaaagaaagtttccaaatgtatccttttgttgtttttttgactatttattttaaattaattatttattttttgtttcactctcattggtgaagaaaaattataatttaccctaacatctattatttttttattttattttttgtatttcatgtatataaaatagtataatataatttttatctaactattttaccctctgttaaaaagaaagtttccaactgtatcattttgttatttttttgactatttattttaaaataattatttattttttgtttcacttttattggtgaagaaaaattataatttaccctagcatctattattattattattatttttttttttttttgtatttcatgtatataaaatagtataatataattttttgtcttttatgatttatctatgttgattaagttttatatttttttttctcattttctctttctcatatatataatttaacatggatatattatttttaattttattatttactagacattttttagaagactattaccaataaatacgtagaaatttattaattaattcataatttaaatttaataatattttatatatatatgcattatcaattttcttgaagaataactaagcaggcctatccatttttggggtcaatattatatataattaatagggtatctagtatgtatattcgagaccatgtgcttcgtacaccaaataaaaaatcaactttatatatatagtattaatatttatatatata

SEQ ID NO: 45527 - DNA, 4073 bp, Cannabis sativa
tccacagaaacaatgacctcagaatttggatgatcagcgtcatatgcaaccggtaagggactgcagcaagagacaatatacatacattaaaatgaatgttcctcgtttcataagaggaagaccaataaaaaacttcataccaagacctgggatggtaaaaaagtttagaacagcaataaaaagcatcactgtgcttccctttcaaaaaaaaataataccataaggtgcatttgcatagggtacaaaatcacaactctttggccaggggaatggagttacatatcccttaggagctggaatcaagcaatgtaacttttcttcctcaggaggacagtgtctctctctgtaaatcatatcatttctcgggaaggtcatggcacgcttctgatcttggcaaggtgtgtagtctgtgtaacgaggattacatggtttgaaaaccatagtttgcgattcggactcagcaatacttccagcatcaccgccatgatgagtatcaaaacttaaattttgaatcacaccgcattctgcaccactttttgtaatttcaagagcaatactatcacccttaccaaaaccactcctctgccatgcacccaatatgtaaaagaaacaacacaaaccagctacgataaaaatttgtacggagctcctagtccgaccatcagacgtatttcctttcgccatctagctcctgaaatgtacagtaactcagatatgaaaaacgcaaatcaagtttaacataagcacacaaacaacaatcccatcacagatcctcgttttgctagcacccattatgtcatattttttaagcatcacaattaattgggtattgatcaaaacaaaagctacataatccagtaatatttgtttatctttctcctcatttaacaccacttacacaaaaatgaaccactgaaaaaacgagctagggatccaaaaactgatctttaaacaaagatatcaatgatcaaccaaaagttatccaaaagtatcaccaagttgtgggaattaaatcacatagaaacccatctcaaatgacatgttcgttgttatacatgtatgtatatatacaattcaatatacatactatacaatgtactatacttaccacaaatatacgttattcgtcacagaaaaaagtatgataggagaaaagaaaaagcatgaaaatgaccgacataaatcaaaattcagctacacttagtaaaatgcactattaatccaattctttcctcgatctttgtgattcgttacagaagagtatgatagaagaaaagaatgtatgaaaaccaccgacttaaaatatagtaaacacactcttcatccatttcttttctcagtctcagaaattactggatccaatacaacaactattcaaactaaagaatcattagagtcaaattttcagatcacataccaataggagaggagaaaagccaaaaaaaaaaaaagcgacgactactcgaagatctcgcaaccgatggaatcaatcagataaaaaagaaaagaagaaaaagcaagccaaaccttcccacacactgaaattatcgctttcactttttagaaataataaaagcaataacgatggatccaaagcacacggtaatacaaatacgagtggagaagaagactggagaaaccctagctagctgttacgctccgatctcgaataccattactacaacttttacatgtaccgattcccaatttcccccgtttgtctgacctccacaatgatggcgtctatattttatatatatgttattacctcagtctctctgtacataaatatcgtattatcatataaatataaaatataattaaagagagagagaggggggagggagatttggtcccttaccttagcaatggattgttgttattagtgtcaatatttaatgagaaaatataagtcgtttgcccaccgaataaatgagcataaaacacggtacagcttcaagatcttggtctttcgtcctctttacttaactaataaataaataataactaaagttatccctatgtttttctgttagatccctcataatatatttatttaatataaaccgccacataagaataaccggagtccggagttgagttgggttgggttgagttgagttgagttgagttgagtgagcgttgtattgagtgtgaggaccccacgcgccaattaaggtatgacttcgtttctgaaatgaaagcattgtggtggtgatacaacaagttgatagaaaggaagggagacaagccaaaaattaaaaggaaaaaaatagttgttacataattggaaactctcggtcccacgccatgcgcctatgtgatccgaatacggatggcccaagataaatggatgctgcagagaatttatcaagttgcatcttttattgccacattttcataaatacacaaaaatgacttaataattataaataagaaaatatatttttttcaatattttttagagaaattatttcatatattattttttaattttgatttttaaatttacggtttaagttgctttgatagtttctatgtcggttgctatatgaattttgattacgatttatgttgttctattaggtgctatgagtaaaaatgtaaaaataaaaaattcatatttttttttatctttttttttaaaaaaatacaaaatattatttttatgttatttttatttttattatgttgtttggaggttgctttcctgttgctttgatgagctttcgtaaaaatgtaattcaaaaaattcataagtaaaacataatcggtaaaaatgtaaaaaaaaaaaaaattcatttaagttattttgtgcaaaagaaaattttatattgttgaatacttcttaaaaaataaaaagtaaacaataaataaatttcattatttatttgtaaacacatttttattattattattatttgttattcgtattttcatcagcatgacacgtggatcttaattaggaaaggtcagagtcattagctacccaacttccccaattgatgctctaagaagacaaagacaccaacttcgcaagaagagtctccatgaaggggagttccccgactgctagccacacgaaaggtgtcaatgagccaaggtctctccccgttccaagaactaaagccatcaatgtccgagaagaatatggactttctagaagggccaaggcatttcgagacacgctaaatcaggctacacatttagcccgcagaagcctcacctatgcatgtcaaaccatggacctagtgactaggctttttcaggtacgacgtcagaggttatcttccacgacgcgttatcgtacagagcatgtgtgtccttgtgtacctaaccaaatgatcaacgactatggataagggaattcaaaaaggaggagccctgaggcgacatgcatccgtggcctagctcgtacgatctgacgcccttaaataccatatgagaaatatgccacctactgatccaacggtcagatttcaccccaacgctaatccatccaaggcagcataagaaaagaagttagcctataaataccctaaaaaagcagaagacggggggacctggggtttttggagaaaagacttattcttcctcatcctaagaaaacatattttttgtaaccctactatcaattcaagaatattcctactaagcttcctcttcttcaagaacaacacggtggaagggagttttagtctattatatctctacttgtataaacagttaccgactgatgagcctaataaaatagactcgtggactaaggatagttaacgcttgaaccacgtaaaaatctcttatttgttatcttgctatttatttaatctttactttccaaagctctaaagaaatatgtaattgccaaaaaaaactcggtaaatattttggtactttcattgagagctaaagaaagagatatgcacgggggttaccaacccaagtccgtcagaaagagaacccgtgcgtgagaagaaggaagatgtaataccctaagattaagaaaaatagattagcaacccctaactagttaattgtgtattattattgaattatattatgatataatttat

SEQ ID NO: 45528 - DNA, 1566 bp, Cannabis sativa
tcacttttccacagtggtcgcgactagactatctgtggtcgcgaccacagctccgtacgggaccgcaactttatcttttctcaattttgggatgaaaaactctattttaatgaagggggtcacgaattttagtggagatagacaaaatagaatccttaaaacacaaaaagaaggctcttggagcgagcgtgggtgatccgtgaaaattttccatatagttctttctcttctcttgatttcttatatttttatttgtgttttgtttaattatagatttgattatgagctaaactctctatttagagatgtgatgaatattgattgagattattctatggattaatgctatttgattgttctttcttttctattattgtgatttattcatatttatacttattacatgtgtttgattgaccaccttatgcatgatttatgatctcaatacaacatttataaaaaattagtattgagaatgctctaaattaataaacatagatataatattaaagcatatataatttttcaagaagtcgtatcctctgatacgttttctgtctctctgttttgagagtttgttttgagtgctttgttgtttgtttgttttgatttcgactgtgtgttggtatccgatggcatcaagtagtggtaaggggagaatcctggaggttaggaaagaacctatatcctagaggaggaagagacagaagtcttaagaatcccagggagtaatatagaagaagtggcgatagacaccaaatggtgtttgatgggcaagctattaacgggtcgagtttcagattttaacgtctttcaaaacatgatggcgtttctttggcagtcggggatgggaatgtacgtcaaggaactcaacccaaatttgtttcttgtccaattttaccatgagatcgatatacaaagggtcattgatgggagtccatggtcctatgatcaaaagccattcatctttactaggttgaaggatggtgataatcctaggcttgttgaaatcaaccatcttgatatgagggttcaaatccacaatctacaaacgggtaatatgacccttagtgttgtgatggcgctcgaaaattatatcgatacgttcattgaatcggatcctaacaattttgtgggagtttggagggattaccttcatgttagattttggataaatgttgataaaccaattaaacgaaggatgaagataagtattgataatctctcatggtactaggcaaattttaaatatgaaaaactaccaactttttgtttcatatgtgggattataggacattcggagaagttttgcccaagacttttcttgaagccgctgcatttgcaagagaagccatatagcctggaattaagggcatcggctcagaggaggcaatcgactttcggggcgcagtggctccggtcaggggcggcggtgcgggatacttaggggagcagtgttgcgcagggggtcacattaattcctagaaatctagagataacagggggagtgattggaaaaaatcatggacatgatactaaccgtgattctttgctgaatgaggggcg

SEQ ID NO: 45529 - DNA, 3559 bp, Cannabis sativa
  modified_base (3504)..(3507): a, c, t, g, unknown or other
gccccctgggataggtgggccctaggcacaggccttgcccgcctatgcccagggccgggcctgggtgtaccataagataagtaaaaaatatttttctttgttgaaaaaataactatattttgttattaaaaagtaaaaaactgttttttgaacacaagtagaagtgtttaatattgtttttagaatttttattgggccctaaaattaaagttacaaaagatgaaaaaatttgagaacaacaaaacaaaaagttattttatgaaatttttattagtgttacttgaacaaattattttttaaaaaaaaaataaataaataacatatttttaatagtttttatagcttagtaaagattaaacaaattttagtcaaaaataaaaatcacatggaaaaactttacaaattcattaattagatggctataatcaatatatctctagtgtttttatgggcctcatataaatggtcttttatttgaaaaataaaataaaatttaaataaatttttaaatagtttttcaaagaacaaaagttaagagggattaaatgaaggatggattaaagtgtatagattcagttgatgaattcttagtttttatgtgtttgtgttagaattgtaagatgtatgaggttttattttaaaatttattggtgatgagaggagtagtatatggatcttatgtattctattatattttcatacattagtattgtgagacattctaacattttccttaagattgtgactattttttgttcaccaatcttggataattcgattataagcggttttttttagctcactatctccaaatcacaagtgattcttttggttctactctttttgatcagtttttggatttttggtggcttttttttgctcactatccgcgaatcataaatggcactttttgaatcggtttttggatttttggtggcctttttttttctttttttttttctatcagtcttttgtttttggatcggatactcattagattgtttttgctctcatataggggtggcaaaatgtatcatcgtgtcgttttcgtgtcatattatatatgacatgcttctatatttcgtgtcaggcgtgtcgacccgttttttgactcgtgtctaattttcttaaccctaacccgacccgtaaaaatcgtgtcatgttcatatcgactcactgtagcctgttttgctattattgaagctggagttgtagagaaaaataataaatttagattccattaaaaaatttatatacatttatatatatataatttgttaatatataataaaaattttaaaatatttttaatttcatgttaaagaaaattaaatttaaatttttttaacttaatattaaatcactaaatatatatttttatataattatattaatattaataaaattttattttattatattaaaaaaaacgtgtcaaacatgtcaaattcatgttaaatgtgtcgtgtcgtgtttgacctgttttattttgtgtcgacccattttcaacccacgtctaattttcctgaccctaaaccataaaatttgtgtcgtgttcgtattcatgtaccttgtcgaaatctgttttgccacccctactctgatactatgttaggatttggtaaagtgcatttaaattaattaactttgagaggagcagcttataaattttatatattatattatctttttacacattaataaagtgagactcttaatagtttagtagggaggaaagggttaaggaagggaagatggtgtgaattgcaaatccacttgagcccacaaaaaactatccttactttaaaggattgagtagtgttgtaaatatcggtcgacagagtttttgacacgatacgaaactgacacgaactcagaaggcacgaaaaaatacgggcttgggcatggcatgatgctacaaattggcacgacacgacacgaaaaaagcatgaatagactagtccgaaagtctcgacacgatattttaaaaaaccttataatttattaataataataataaaatatgaatttatcaattataaataagttaaaatagtaataaaacttcaatataatattgaacattattattttataattaaactattaaaacatgaaaaactaattttatatattaatttattttatagggtatgatattaaaatttgagtatttattagaagatatttaaattctaatgatgttaatatttttttatatgattatctttaaaatattatttaaaagatataaatataactaagctataaaatatatgtaattgtataaaaaatatatgaaaaagtaaatcatgaatttaagcctggatataaaatcagagtggcctgtttaagaaatacggaccgacatgagcaaagtacaacacaaatccgaacacaatacgaaaatattaagcctacgggccgtgctgggtctaccctttaaaaatgttggcacgacacgacacgattcatacttttctgtggaacgacacggcatgacccatttttggaaaaatacagataaatatagatcgagcttgtacaacacgcaagaacttacaacactaggattgagtaatgaagaagttattttttctatgattctctttttaaattgaaagtaaactataaaagtaatagtattatggacaatatggtaaatgtgctaataaatatttattttttattttttttccttccaacttacgagataattttgagtccaattttctttattattatttgagtaaatagcagcgaaattctcaaaagctttgccctagttgtaactaactcccaaaacttattttttgacagtaaaatccacaaattcgtattcagttagcatttagttattttcatctcatgtttactgttaagttccatgtggacatgtccatgtggacacagtatatatgtgccacaatttcataggtccacgtaatttaattatttaagaaaataaaaaatagttaaaaatcattttaaaaaaaaattaattaagaaaagttggcttggtagaggtttcgcacctaggtcgctacttgatggatgaaatgttgacggcttcaacggggatggcgacctgggctcgcgactgggatggatcattctgggctcatgacgacttgggttgaacttcatgacgaagggtctagatggaagggaatagtgctcaagtggtaaggtctatgccgtaagatggtggtgatgtctaggacggaagagaatggtggtggataacgaataggtttatggcaatgcgagagagcacaagaagaagagaaagaacttatagggaattagcttttttattattatttttattattttttatgatatattttaaattaatttatttttaaatatttatttaagtgtgctaataaaattatgtcatctgcatactatgttcatgtggacaattatatatatacacatgtgcatacatgacacttaattgtaaaaattaaatagaaaactaggtggcgtttggttggnnnnaatgaaatggaatggaatggaaatgaaataatttttattccattcctttgtt

SEQ ID NO: 45530 - DNA, 2247 bp, Cannabis sativa
  modified_base (86)..(88): a, c, t, g, unknown or other
  modified_base (1670)..(1679): a, c, t, g, unknown or other
cccggacctggccccgaacttggaccagcccccggtcccgacctcagacccgaccccaaacctcaacttaaataaaatcaacaaannnaaataaaaataaaatttacagattacatttttattttttgtttttaaaattaaaaaataaaagtagttataaaatacatttttattttttaaaaacaaaattttaaaaaaattacttttatttttgtgattaaaaaatttaaatggccaaaaataataaattaactaataaaattataaaaatacaaaatgatactattttttaagaatgaatgataaagaataataatattatctattttttcaaaggttgactgtcccttgttccttgagttctgttcatatttataaaagtctagggtgaaagttattcccttgggatatgatcattcgtaactgctcataaaacgtggacattccccatgttttatttttgtgcacatgagataattataaataaccgcctaattgctctttgtctttatctatagacagttatgctgactgcgctcaattgttatcgtcatttgagtgatatctttctcaaacatctttgtagaaaaatgtttaagtgttgtgttatggttcatctcgcagccttcctcaactattgagtgaggcataagcgagatggttacttcaacgcgttaagagcgaggtgagtgaatgttgaagttgttgtctttattttctgaatatactcacgagtatgtgggtcaatgagctacaaactcataatctactcgttccaaatagttctattatgtattttgtttatcccaagatggacatgtttacctcgtcggtctcattagttaatagttattactcacatctcgctattgtctatatagcagcaagttcgagtatttttattaactatatttcccgaggtgagccatttaagtgcatttaataatgcataacttgagctggttcatattcttgatttgatacacatgtcagctttttattgctactcgaactataggtataacaattgctcattcaaaagtactttttaaagtaaaaagaaatttttaaatgcctcaagggtatgattatatttttcccatttaaaatttgcatgcttttattttagcggttcaagactttaagccaaatcatttcaccatttaatgctctgacttttcctttctcatttagttcccatccattcgatatactctttttgtgatcaaagggttatcgtcttttgggtataaatttcaagtttcctttctctgtcgccattactgcccacgaaacctttggattcgaaaattcttaaccgccttcttcaatgaaattaattgcatgccctcactgtctctcaccttctttcttcaaatgtcatcagactgcacccctcgagttcagaatcttcaagacccaatctctctacactcggagtttccatcccgaagttcttcaaaatccagaataagtcatgttatccagaataattcaaaatccaaaaggagagctgcgagatgggttcgttgatgactaacagaaaaggagagggaaagctgtgagatagagagaaagagagagattaggattcgaagaagaataagaaagaagaagaaaaagaaaaagaaaaaaaaataaggaaaagaaaaaaaatattttttaatttnnnnnnnnnntttcgagaagaaatagaaagaaaaaaaaatattattttttaaattttataaattgtttttcataatttttatttaaattatatatatatttttttatcaatattacgtgaaccagtaaaaacgtattacgtgtacataagtgtacttgtaggtagtccatcgtggccgttaactaagatttttagatgaaaaggataaatagctaacgaaaaaaggatttgggtagttttgccaagaaaattagacattataccctttgtatcttgtcttcttttatttttactttttttttttttttaaatactttactaattttatccctgtcacttcaatatactttatgtgacctctcttatacgaaggtattttttggtacagtacatataaaagagatagaggtatgtttcgattaaacataaatgagaagtagatttggttaatagataaataaaagaagtatttttcaatttagcttaattttaccattaaaaaatcaatttatgtggttaattgttataaaatataaaggaagttttgcctccatatctcttattattattattattat

SEQ ID NO: 45531 - DNA, 2579 bp, Cannabis sativa
cctttttttggcattctttgatgtccttcttcattctcccatactttctttcatgcaaactttgtaaattttcagcataggatttcagattgttggaaacaactgtaatcaggtctgaagtggttgagttcaaccaatgatcagcaataatatctatgcatttatggtctgacagccacattttttcaaatcgaaaatgacttctgcgtttagctttgttggtttgggcagagagaagattgaaggcagtgataatagctcgatggtctgattgatagtaatcaagatgatggacttgcggtgtattgaaataattctccaaatgattgttaacaaaacaccaatcaagacgttcttttattgtgtgcaaggcgtttcggcatttagaccaagtgaatagatcaccctcaaatggtgtttcatggagatgacacctattaagacatcttctaaaagcttccatttatgattcatttcggagagctccactagatttctgtaaattggatagtatttcgttaaaatcgccaataatcaaccatgggaggagaggggcaacatccgcaaactgctgtaaaagtgtccatgaggctggacggttgcaggcttcaggagcaccataaaaacaagtgaaatgaaaagaaggactgtcttcaatcttcatataacaatcgaaatagtgagatccaaaattcaatagagatatgtcaacatcgtccttccaaaggagcaaaagtccaccactaaggcctatccgaggcgattctaaaccattagtaaagcataaagattgacgtacacgtgtaactgagttggctggtagtttggtttctataagaaacaaaacttggggcgattgttgctgaacaagcaatcgaacatgtctgaacgcactcgcgttccccaagccctgtgcattccagcttaagattttcatgatgagttgcggggttgcttagaaaccaccgcacttgagtcattggagaagctagaatcatcacagtcagaaactaacgcctcaacatcatcctctcttgacaaagtagaagacgacgatccatgaacattacgacatcttttcaggaatttcctcatagatagggagtcttgatgcctcttgaaagtagcattgggaggctgattttcctttgccatggacactttgggagaagtaaaagttgagattgtagttgcgggttggttgagagagagtgaggaaaggttagtatcaacaggagagggtgttagtataggtggatatgtagcaaaagtgttggctgtggtatcaggtataaaaatgtggaaaatgtcagagatagagttgtcattttgattggatttgtcagaggtgttgtgggaaatttgtggctgctggtttctgatctcgctgatgtgagaaccagatggaggcacgggtagattggggggtgaaatactatgagttggtgtggtagcaggtttggttggagggtgacttagattagtgaaagagggaggagaaatggggttgctgatataagtttgagattgctgatatttaagtttggtggagtgagaaatagatgggggcacgagaagataggttgaagagttactggtgtgagagggtggagagttgttgttgaaatcgttgttgatagtactggattggtggggagtgatgtgtccaatggttagtatagagctgatggtcaaatttggatgtgcataaagatcagtaggaattttctgatgttggtagatattggtatttatttgtgatgaagaagagtttggttgtgaggtagtattgataaaggggctgatagtgtgaccatgggtgttgtgatcaaaagggataatagtggagaaggaagtggttataggagaggaagcagtgaaactatagacattggcagtgggattggcattgttcgaaccaagattgttattgtggtttgggggcttttgccttgaagattcgccagcataaagcactcgtggtgaggctgagttcgattgtttaatgctgggaatgtggtagtaaaatatgagcgagccaatctagtaagtaggggccaagcattaccttttgcaaaatcagtctgatatcggtcatagccattaaatggtagtttggcgcctttcatccatgggccatattggaagtcatcctcattgccactatccatacgctccataaaagccacacagcactcaaaaggatgtcccaaacgaccacattcaaagcaaaaatctggacgtcgttcatagcggaagtccacccaaaattcatcttttatcctaggcaaacagatcatttggcctctcaacaaaggtttgtttgtgcaaagtttgacccgaacccgaagaaaagggccccaaccttcgttagtggagtcatcaaatactttaataaattctccgataatatttccaagcgctttagccagcgcttttgatttgcttaagaaaggaagtcaataaatttgtactttaaacgaagtaaaaatccgatcttcctttgagacattttgcagaacatctggcgccttaaaaacaatgagatgattttgaaagtgccatggttctttgttaag

SEQ ID NO: 45532 - DNA, 1260 bp, Cannabis sativa
agtggcaaaataatggttttggtcaaattgtaacaagcaaatatgaaattacaaaatgtgtatctatgatgctaaataaaaagttgctagtcgtttaaagtaatgaacataaaacttgtaactcttatattttatcacttttaaattagtaaattgagttactaattgtatttttttttttttttgaagagttactaattagatttaaatttaaatgaatgataattattcaaaatataattgttgaggacttaattctatcatttataagggggtaagtaataaaaattaataagaaatgttgcaatgttggaatgtttggagtgaaacacatgaagctgaaaaaatattaataagcactacagcgatatattgcatgatgagaggtgatacctatccaatttttagcatgttctttttgttgggtgtacatttataaagtcccacaatattggctaaaaatgagaaggatcttgagtatatcaggatgaacactatctttattgtaatgaggccttttgggatggtgggttttgattaaataaccatattgttcactgacaagatattaatttaaactatttattatgtaattaaaattttgtaagaatatacttatttattcttagacactagctaaatatatgaaagcttaataaatttttataagcatttttagagttttttcaaggaagaaatgcctttcataacaaatgttttgaaccttgtttaagtcgtaagtgttccacttcttccttttatttctcatttcttatgtaattgagttcgaatcttctatttcttagtttgcatgtaatcttgtaataatacattcatttgtattgtgtatttgattgaaaccttcctattctctcaaatttatgaattatttccaaataacacactttctattgatgtaatatttttgtaattgaattattattatcattatattatttaatttaaaatttaaaactttataatgattttaatatgacattgtaattctcattacattataaaaaaccaataaaaatgattaaatattacaatataactaaaacatctcttttttacacccttttacttttattaatatttatatatataaaaaaaaagcgcatataaattcttgcaagaatctaagggtgcttggtgtcaagatgctaatactgatttttggaagcggctttgatcattaaaaactcctcctaagatcagtaattttttatggcgagctgcttcgggtgtgcttccaac

SEQ ID NO: 45533 - DNA, 1247 bp, Cannabis sativa
tcacttgtgaattggggatagtgagcgaaaaaaaaagagccacaaaaaatccaaaaatactgatccaaaaagtagagcaaaagagtcacttgtgattagggatagtgatcagctaaaaaggagtcgcttatgatcgagttgtctaagataataagcatatgaaatcgccaccatcttgaggggggatgttagagaatctcacattgttaatgtgtggaaataataaaatatataagaggaatgggctactcctctcgtagccaattaattttgagataaaacctcattcaccttatcccaaattctaacactaattaattaataataaaatataacatgaacacacaatatataagtttggttaaggagctatgtaatatataaacccgagacataccaaattctccacaacagcataaattctcatactcaaattttctcataattcataaacaagtaaaagtatatgtataaggaggaaatgacattattgtagcaacacaaaaattgtaccaaacaatgctacaatgacccatcaaaacacctaatctaatgctctcacttctgctctaaaactagtacaataatacaagatgttataataaacaagatttgccaaagtcaatgcagctaatacccaataatacttatccaaacgactttggtttatgtcttcttgaaaccaactagacctggtttccatccacgtcatggaaaggagaagagctttcaatttcaattagaattacattgaattagaacatatatatagtaattgtatggggggattaaatggtcccttaggttttcaatagaccaattgctcaaatattgatcttccgtttgaatttgtctttgctctgtacatttttgtttgaggtcttgaatttattttagtctagagtcaactaccgatgatgtgaatttgattgatgaaaagaccagaaattctgaatctccagataagaaagagtcctctcctccaaatttggattggatcaaattcaagacaacagtccatggcatttgatttgatcttactccataacagaattactatttggattgattcttctttttcaaagaagggtgtgtgtattggtctctcttatttgttgcttctgtgcttattttttcaggctaatctccaagggagaaccaatcaccatgatcgttttaaacgcatttgatggaagcagagaaatctagataatgtgtatatatatagttgagtagagctcatgtct

SEQ ID NO: 45534 - DNA, 1776 bp, Cannabis sativa
aagatcaacatcagggtttgctgtgtttctcggacagaacttaatcacttggaaatctcagaagcaacacacaatctcaaggtccagtactgaagtagagtatcgaagtcttgccaatgttgttgctgaaatcgcatggcttcaatctctgttttcagaacttcacattcatctctctcatccaccaactgtatggtgtgacaatttaagcactgttttgctcactgcaaatccggtgcttcatgctcgcaccaaacatattgagttggacctctactttgtgcgtgaaaaagttcaaagtcaccaaattgttgtccagcatgttcctgctacagaccaattagttgatggactcaccaaagctatctcaaatcaaaactcctgcaagttcagagcccaactcaccattttggatccatccaatgctgagtttgcgggggagtgttaaggggtacagttgtaatttctcatcttgtttgttaactaacaactgtcatacagttgtaggttggttatcattctgttacaagtctgttaaatctattcttggttcttgcatcagtgtaacttgtatatatacctcaactgtatcaataataatctcagaactctttcatcatatctttgcaccattctttctctttcctttctctttccttttctctatcttctctctgtttctggtttgcctctttcttactcatgcttcaatgtcaaggaggttcaatactcctactatggtatcagagtcgtggcctccattggtggcgaatatggcaactacaggtcctggaacagctccaacaagagcttcaacagcagacaacaacaacaatggcgtcagtcagattggcaatcgaaatcgaaccagagatacagatgagaactctccaatgtactttaatcattcaatttccataaaacttaacgatcacaactttcttctttggaaacaacaggttctagctgctatacgtggaaatcgactactaaagttcattcaaaatcctcctcctccacaatatctcactaatgcagatcgtaacaatgacattttcaacccggcattcgtcgaatgggatgtacaagaccaactcctcgtttcatggcttctctcgtccatgacagaaagcttactaacaaggatggtaggatgcaatactgctagacagatctggagctcactggaaaaatatttcacccttcgtgtttcatccaaaatcctggagtttcgtactaagctgcaaaaccttcgaaaaggttccatgtctttgaatgagtatctattgaaggtgaaacaaactgtggatctactggctagtgttggagagaccttgaacgatcgtgatcacatttctgttatcttcaaaggtctccccagcgaatacgatacattcataatctccacaaatacaaggatcgaagggtacacagttgctgagatagaagcattactcctagcctctgaatcaagaatcgagaaaactgatcaagaacatgagatcagtgttaatcttgccaaagtcgacactgactatgctcctgatcaggatcttgaagcaaatctggcacatttcaatcgcaatccgaggtattctatgccaaatcgcagcaatttcaacaatagcaggggaggctatggaaacaccagctctcgagaaagtggatctcagtttcaacaaccaaattccagcaatcgtggaacccagtacagtggaagaggaggcaggttcccagctccaccatctcgagtccaatgccaactctgtcttcgac

SEQ ID NO: 45535 - DNA, 667 bp, Cannabis sativa
tcgctaaactctaggaggttaacactctacaaattgaggcccataagaaggacttggtgatccaagatgtactgggtaatgatgaggatctgaagagggagatcaagcatctaaagaaagtgagggatttactgaaagtaaagtttgaccagaaatgcgtgctttgacaccacaacaaagttgaagaaggaagttcctcataaaccctttaatggtgtaaaagcttttatagcctcaggagctatgtagaggatgaaagaaaccactggacagtctattaggtactgccttcaatcattagaaatgtcttactcaatggttgttcatatttcgtggaagaaagatcccaccatcattaggcaccttagactagatgaggaagaatataaccacaaggtgaatctgacacttttttcaaggaatttgggctccgcaacaaagatgatgaatctgtcgagaagttggctaaggatcttgaaccgaagaacttagtcgaggttgtggcttctttagtgaatgattcttagagtctctaagacattcatcaagatatgcttgaagagcttccgacttctgtccaagacttttcgtaggaccttctagatcatgcccgaagtacgcctctggtagtgcctccagcccaaatggcaaaagcttgataccctca

SEQ ID NO: 45536 - DNA, 2022 bp, Cannabis sativa
ttaggccaagactgagatgatgcaccattgcttgatagagtagtcgtgtgggaattaggagctccagaggagatttgagcatcatcataatcctgaagcatacaagaaacctgaaactctgcagaagaaaaagaaaccttatgcttgttaaataacctgttatttcttcgattccaaatctcccaagaaatgccaagaaggaaacagaggtcatcttttgataaatcctgaaaaccctgtaaaagaaactcctgtatatcagcacatctgttttgcatatgaaaacttttaaaatgagacacttgccactcactaaaagctctgggacactctattagagcatgagacacggtttcaggacacctagagcaagaggaacacaaaggagtgggaacaatttttttatggaaaaggttcaaagcagttggtagagaatgatggaaagctctccaaacaaagtgcttgattttttgaggaagttttaaattccaaagggttttccaccatctaagagtgagaccagaagaagaggaagtaggcaaggacttggaagaattggctaagtgataggctgaactaacagtgagggagcctgaaggatggggctcccaaatgagggtgtcatctagggaaatatcagtaatgggaatagataaaatggcatgaattacttcctcatcaaaaaacgctaacaatttgtccttatcccagcacccatcagaagtgatgaaaaaggaaacagtgggatcagggggagactgattatctttgaaagagatgaacctccaaccagggatccaataggagttaacagtagagatggatcgaccatttccaaccttccacagaagacctcttttgagtaagtccctaccccaaagcaagctacgccaagtgaaggaggaacaatgtcccttagctgcttcaagaaaagagttatgcttaaagtatctggctttcaaaagacgagcaagaagagaatcaggcatagaaaacactcgccaagcctgcttagaaagcaacgcctgattatgattcattaagcaacgaaaacccaaccccccagagaacttagattggcaaagtttttcccaggatttccaatgaactttccccttgttgccacaagaaccccaccaaaattgagccataagactctcaatctttttacaaatagacatagggagacggaagcaggacatagcataggacgggatggcttggacaaccgctttcaggagcacttctttaccagctttagagaaaagacgattggtccaaacattcattttagaactggccttttgaattagaaaattgaagtgctgagatttggatctaccaaaacactgagggatgcccaaatattgactaatgaacggcttgtcttcaaggccaagggtatcacggaaaaagtttgaatctgaggtattggtgttaggggagaacaagacagaggacttagcaaaattgacaagttgacccgtagccctatgataaagatcaagagcatttttaatagcaaagcaagaacgggaagtagcagtggagaaaagaaggctgtcatcagcaaaaagaagatgcgaaatgacaggagcagaacgacaaatggaaatgccctgcaaagaatgatggtattcctgcatcctgatagcagcggataaggcttcagaaacaagcaaaaaaagatagggggacagaggatctccctgccttagacctctcgaagaggaaaaactgtcagaaagggatccattgatgagaagccggaatgaaacagtggagatacacttaagaaccaaattgacaaaagaaggaggaaaatggagatgagtcaagatagcctgtataaaattccattcaacacgatcgaaagccttttccatatccaacttaagggcagcccagccaattttaccagatttcctatgattgatggcatttactatctcattggcaataaaaacattgtcaaatatgactctattcttgatgaaagcactttgattgtgagaaataaga

SEQ ID NO: 45537 - DNA, 1152 bp, Cannabis sativa
gtagaaaaagcttgggagagcggcaccacatgctgaggagcaccagtagtggccatcagtgtctcggccgaagtgcagagagctcgaggtaaaggggcagctagttgttcagcagtggtaattggtggaaatggttgtgaatgaggggaaatgaggttattcgatgagatggctggagaaccaatgtgtgaagcagtggtggtggtagtggtaacaacaggctgtgtgtagggccatatggtggtattagtaggggagtggttaaggttaatatggggtgaggattgagcattgtataagcccatgagagtggtttgcggctggctgaagtgttggacaccataggcggtagtaggatcattgaaagtaccttcagagatgatggaagtttggtgtaaacggtaaggaggaggcggggccaatgaagtcgggttggctatgtgtggtcgcagccgagttcgagagcaggcaatgtaaaaagggttggaggtaatacgtattttggctcctaaagattggtcatagtgaagcaaaggaggagctgaagaagagtcacacttagctaggaattcatggcagtggttcacaatgtggctgagtcttccacagtaatgacagaaatcgggtaaattttcaaagcgaaattcgagccaaaccggggcagccattccttgaaattgaaagcccgtaccacgcgggagtggttgagttacatcaatctcaattcggactcggagataaggaccccaagtctctttgagggaggttgtgtccacttcaataaaacgccccaagacttcaccaagtcgttgagccaaggcacgggaccgctttaagaaaggaattccagatacttgtatccagaaaggagtggttgtgagcgattcagcggtcaccacagaacccgcttccaatggtgtcataacgatgagtttgtaatcaaaatgccaaggttggccaatgagtacacggcgcctgtctccgaagcatccaaactcgacagtaaagaaattgggttctttttcaaggatattgatggaaaaacgttcaggccacatttgcttgagtcggttcttgaaggcctcaggattaaaatggcgattggtcagaagcttgacggctaagaaggcagagggttcttcacggccatca

SEQ ID NO: 45538 - DNA, 1290 bp, Cannabis sativa
ttgactaaaaaattatttcagatgctacaacagataagagtgcatcaatatatttattttaagaatgtacattgtagattaatagaaaagctctggaatgctctattagggttctcccttcttcttctggtttctccagcttgctcttccttgtgatgattaagtgtaaccgtcgattacacttcctctttcttttaattttttgtcttttctggttaataaatcaaagacatttattgcaccccagtaaatctaaccatatctatttgcatttaatacaccatcagtccaaatttgatccttatttgttccttaaccacaagctttcccagtgcgccgtcagtgggggaactgaggggatttgggcgatgattatctctatcatcgagggattttgccaggctccatttaatggagagatggattgggtacttcctatcttctatcaggcgtatctctgttgcaggtatattttttctctatttatatgttatcctcctttaaccatcgctatcagtctttctctgggcattattctctttgtgtatttctttcttccttctcaaaatccttctctgagtgttatggcgagttctagtcgttcttcccctccccatcttgctattaatgatgaggaagccctcattcatgattttgatggagtttccctcggttgcaatccttcatcagagtctttctgcttagttgttaaggttcttactcaaaaaagtatcaaagtggactggctggacaaagctatgaaggaggcttggacattacgttttcctgttagcttttctgaataccactctggacttttcatggctcactttggttgcgagggtgataggcgcagggttgttgaaggccaaccttggcactttgatcattgtcttatggtctttgccaaccctgagggccttgatcttctgcaatcagagcagcttcgttatgttcccttttggatgcaaatccattacatcccttttggatttcgtacccctgctcttgctaaaatggttgctgatgatgttggtgatttgatcgaaatccacaaacaaactctgcttgaaatctcaggtcctttcctccgtattcgtgttcttcttgatgttaccaaacctcttcgaaggggtatgcaggttttctttcgaagcttgggtagaactaaatggcttttgtttaagtttgagggtctccaaaattattgctattactgtggtgcttttgagcatactttttctaagtgtgcttcttttcttaagcgatgtgatgatggtgttgctcctc

SEQ ID NO: 45539 - DNA, 1800 bp, Cannabis sativa
tcaattgaataccccaataatcccagtagagaatcccagcttggtttttccaccacctcctcctgctgtttttctgggctatactcttccaccagggcatccttgtaatagtttcacattgcctcctccaccagctgataagaaaagaactgggccgcggcgtaagtaccgcctttctccattgatacctacagaaattagcttatgttgttaatacattcttcttcattgcttttgtatgctattgaatttgcttgtttgtcttatcagcttgtccagtatgttaccttcctgtggaagaagcagtggctttaatgccaaaggtcccttcaccttctccaattcttaataatttgacttatatttatgaagaaaatttatctaaagaaacagaattcgggggctcggagttcggtggctatcctactttagctcaaagaactgattcttatgatataagagagtcgatgagcatgcattgtgggtatgttttgtttatctgtttttcttttttatgtattttcttaagaatatgttatgttttatgaatttgatttatgtgttgtatatgaatcagattcgttcgaggaattagacctggtcgaaatacgggatttgatatagatgagactgatctccttgctatggagcaatgtcaaggtgttgttgttgcatctgctatatttggtaatcctctgtcttatttgattgattgaacttttcttaactagctaatagtatacaatttctaatcacttatttccttttttctttaggcaattttgatgaaataaaccagccaaagaacattagtgaatattccaaggagactgtttgcttcttcatgttcatagatgaagtgacagaagcttatgtgaagactgctggtacaatggacagcaacaggaaaattggggtttggagaattgtcgttgtacgtaaccttccttattctgatggcaggcgcacgggaaaggttgttttcttgaaatattttgccaagcttgattattttaatgtctcaaaggggataaacaattaggatttacaagcacgttgatatgtatttttttggttacagattcccaagcttttgatgcataggctctttccctatgctcgcttttccttgtgggttgatggaaagcttgagctcgtggtcgatccataccaagttcttgaaaggtaagtctggttttatgctttcatttccttacgaaagacaggaatcagtagatatatatatatatatatatatatttatctccttacaaattcacttagcaagttcaactggttgattcttatattaaaggatcttatctcattacaagaaagcttgagtgaattttttaatggtaaaacttttacgcatcttttcccatatacataatgtgtagtgtatctatggttatcatgtggtcctactaggatttaatttaaattgttgtaatggatgctgtttgatacaaatgaagacaactaactaatcagcattttttgcaatgcttgcaagttttgcttcaaatgattacctctattctgcagaactttgcattgaaggtacgagcgaatcaactaagttcagcagcaataagtattatcctagttatatttaaattttaagcccaaatattattttatattgcatgtggtaaagaccataaaatgatgcatgtgttttgggttttagttagccttctagttggaatggtgtaaaacctgtgaaaatgttgcactgttccaaacatacaaatgcttagtggaaatttacatatgcactcttcaaatggacaaggt

SEQ ID NO: 45540 - DNA, 953 bp, Cannabis sativa
atggattttatcaaaatagtttttaaaaatgcttagtattgaaatattttagacaaaaaaaagtgttaaaaatattgtgaaaataaaataaaataaagcttcaataaaaaataataaataaaagaagagatgaactctatgttagaaaaaagaagagaaattctccaaaaagaagaaaaaaaaaagaatcccttttttacttctctcgttttctcgcacccaccaccctcaacctgacgattgcgaacacccgctctcactctcactctcactctcacgaacacccaacatagcttcctatcgaaaggaaaaggaaaagggaaaggttttctctctttcctttcttttctctatatatccagattctcacatgtctcttcttccccccaacttccgtgccctaatcccctctttcttatcatctacatattttattaaatttccaaaatcaaacccccgctcctaaatttccatacttgtaactctgcactcaatcctggccttttgttgtatacgagtacgtaagtatctgctgcaatggcgattattggggacgcccttcgccaggcgtttatgccgaagccggagtacgaaagcctcaaggaagaagacagagtctggggcaagcttcagagacctttattggtggctttcgtggctcttgtttgtgtcgttgttatggtatgtgtagttattacattgaagatggtttttccgtctgaccccgcgaggagaccattctgcggtgaccgggggatacatccactgccgatcaacgttaaaggaggggattctgatccctatcctcatgctttctatctaacggatcaggaaactgtggactatttctggatggtttgcttcgttcctactatgatcacttttttgctaaccgttgtgtatctgatatcgggtaagaactaagaagtacttttaatctttgttatattatc

SEQ ID NO: 45541 - DNA, 2141 bp, Cannabis sativa
gatcctggtaaaacatattctaacatggtcgtcctccgaccaccaaccaatgccatgaaacggcatgagggcatacctttgattgtcgacatggtcttcaatctcctggacctcgaaaatccctagtaggcaagatgtccttgctctcagagtctggctcggcctgttcgtgatgcataaccattagttgggtgaatctagcattggcggggccaatctagtgaacagtttgcttttacgagccacatttctagagtgaaatgaataactttctaaaggatggtctgcgacggtaaccgcaatttttgccttgaccttagggcgaagagaaggttcagggtctgcttttggcaaagtatttgggatgtttgatcggacaacgtatatcaagctagatggaaagcatttcctccgacaaaaattgattcgtgtaatcaacacccaagactaagagccagccacaaaaatcataaggttggtcgtcctccaaccaccaactagcgccatgaaagggcatgaggggataccttcgattgtcgacatagtcttcaatctcctggacttcaggatccctagttggcaagttatcctcgccctcagagtttggcttggcctgttcgtgacacataaccattagttgggcgaatctagcattggccgggccaatttggaaaatagtttggtttgtacgagccacgtttctagagtgaaatgaataactttctaaaggatggtctgcgacggtaattgtaatttccacctcgaccttaaggcagagagaaggttcagggtatacttctagcaaagtatttgggatttttgatcggacaacgtatatccagctggaccaaaagtatttcctccaaccaaaattttgctccaaaataaacctaccgtacacgtctccaccgatttggtccaaatagatatggtattggacaactgggatagaaggtctaatttcctcgctcgaaacttccaactcctcaaagctagaggaggagttgttggtagagggcgagggtgtgatgcccagagtctcagctggtcttcgaagagtaaccgtaaaaggacattgtcaattcaattattaccttcccaaaagttgtttggattcatctacaaaagaaagaagatgaggtaaatactggacataatagaaagaaggttctttcggaaacaatctatatattccaaccaaatgaacatacaaatcaaaagaaaaggtttcatcagaatgatgaagaacctgattgaaagttgatcaagaacaagatataaaagtaagaaaatgaaaaagagataaaaagaaggaataaatgattgtattttatatttttgaaaaataaataataaataaaatttgtgagagagtgtaaaagtgttaaaaaaaaacaagatataaaaatttacacttattataaatacatttttatatatgtatatatacaaagataaaaattgaagaaaaaattaaaaaaaaaaagaagagagaattagaaaaaaaaaatgaaaaagaaaaatagagcgagagaagagaaaaaaaaggtcacacttaagaaaaaagttaaccaaagctgactagaaaaacgatataaagaaaaaaaggttttttttaaaaaattttaataagtaaaaaacactaaaaaaattaagtagtgaaagtctatatataaaatatcacttgtcaaaatataatataaattttggtgtaaatatctttttttaattataataatatatatacctaaatttcttttaccgttggaagcttattttttttttctataaatactcactaatagttatttatttttcaaactaattattcttctatgtcttgaaatcgaaagagatgctactgtttcttttttcaatctcagcttttgatttttctgagcagctagaagaacacgaagaagaagaggaaaaagaaaagaaaatagtaaaaaaaaaatagattttatattaatttatttagtttttttttttttaattttaaatgttttaaatcaaaattaaaatttggactatattttgtaaatatgtgaccgttttaataagtaaaccactagttagaaaaaaagattaatagacttacagaaaatatcaccttagagaatattacttttttttttttt

SEQ ID NO: 45542 - DNA, 1441 bp, Cannabis sativa
tgatttatcaaaaaaaaaatatattacaaaggcaagaaccaaacactttcgaaaacaatttgtcagcacattgcaaggattttctttttcctgaaaccaagcagatttcaaaggttcatagaccaaaagtctccgccagtcgtcgacagcgcgcagaggagaaaccaacaaccatccgtcgtcaacaacgagcattgcctgcaatcgtcgtgaaccctacagagacagttgagtcataatccctgtaatctaatataatgtttattcacaaaacaacttagctaaaaactaatgtaatgtttagggtgtatttggtaatatttttttaatttttaaattagaaaagtcgaaatattttctaaaaatatgttctataaaaatatttttactttttaattttttaattgcgaatcaaaattttgaggaaaaaaaaaagtcactttcaaaatatttttgaacagttttttttttcttaattaatattttagactccgaccacaacctagaccttgggactcagaccccgacctcaatcctagacctggacctagaccgagacctcggtcttggacccaaaccctatacccacacctcgaacacggacccaaaccctagacattgacccaaaccccagatgtgaaccccaaccccgaacctcgaacttggaaccagacctggatccggatctagaacccaggcacggactcagatccagacccaaaccccagaccctaaacccagactcgaaccctggacccaaattcggatcccgaatctagtcccaaacctagatcgggacccccgaacctcgaccccgaactcatccccagacttggacctagactagggcctgatttaaataaaataaaaaaaataaaaatttaactaacaaactggctcagatgggcaacaggcagaggataggactgaatgggcggtaaaggaacgaactcagacggctaggatgggtccttcgcgcggttgggacgcgattggcttcgcatagttaaaaagataaaatggatgctcctttaatgactatttattaatactctcaacaattacaaaggaggaaatgaatgttgctatttattcacagattaaagtagggatgtaaaaggaataaatgggattctataatggaatatacaatcatacaaaaaggggaaaatatcccacaaaattgggaaaagttgtaacccgcactactacaaagttgacttttcccaacggttaaataagggggtcaattatgaaaatcgttggaaaaagtaagaggagatttttcccaacgatttagaaccgaaacaaaaaaaccgttgggaaaaataaatgccaacggtggagaaccgtaggcaaaactaaatggatttttaaaaaatgaacaataaatgccaacaatttataactgttgggaatactaagcattcccaacatttta

SEQ ID NO: 45543 - DNA, 2926 bp, Cannabis sativa
tgtttaaaatgctaggggttagagttgacttcaatcgccgacgtagtatgtcgcatgtcttgacacttagtaaatattttcattgtttttttatagatgctaaagtttgttttcatcgaccgcagatagatcggcttgatatgtattggaccccactcgtctagaaatctctaaagttttaagtggccttctagttcaagatcgcgactggcgattactgtgtgttactataaaattgcgagagcataagctcatcccaaagaacgccaaacttcagtgagaaccagtatataaggatccttttgagaagcaaaaggaaagaatagacaagcgcctatccaaacagaccttgagacaaaccttaggtaacacacttggcatatacaacacttttttattttgacaagaagttcttacataaagcaagctccaacttttaaccgaaagcccaaagtcggtgctgcgacgacgtctccagtagtcttgtagaaaaggaaaagtgatgctattcctacaaaggcggctgactcgtcgaagaagcagcacaaagatgtccaagacaaggggaagaaggttatgatcgatcctactgttagggccaccgacattgtggctctctaggagaagtttgtaagcgacgaatttttttccaagattgatgggattcctcctgaggacttgatgcctcgctcagctgaactagcattgcaatttatggaggtattttctcgggcctttattgcatgctcaaaagatctcgatctccagaagaagtagaatacaattattcaagaaagtttgaagaaaatgaaggtagaagcgactacgaaggataaagaaatcgaggatctttgaaaagctaaagagcaggtggaggaaaaagtcaaggttttggaatcacgagtcattgaactcggttgcgaccttgataatgaaaaatagatcgggaagaagcaatatgaccaggctatctctgattacatctatactaccctgaccaagctacctgactttgacttcccagtttttggagtggaggcggttgaaatggccaatgcattctgcgccatgtcgcctattgagatccaaggacttgaaggaaatttttttcccgaggatgccaaaaatgcgaatgcagatgaagccgcagatggtgctagcaaggtcacagatgatcccaacagtccaccctcttaatttttttaatttcttttgtataatcaaacttcattttctagcggtacatgggtacttgcatcttgtagtttgaataacttatttagctatgttatccgaacaacgtatccttttgaggatactccttttgccaagtttttttttctttatcggtttattaacttgcgtttttaattaaaattgattttatcttcgcaaaagttctcattgatttactcacatcttggtgtgatgattttccctaaatataaacttgcaaataatgcagataaaaaattctgaaaatttgaaaatttcattaattagtcaatggtacagtactgatggttgcatccgctatacttaatacgttttatgaaataaattaactaagtataaatacatgcaagtactattaatagtaatattttaagctttctccattccaagctcgcttaaggactgtgccgtcgagattggacaatcggtaattcgcgttgccaattttttcagatattagatatggcccttcccaattatcgctgaatacgccatgtgctgaattacgcgtattacgcataactttgcgcaacaccaaatctcccacttgcaggttcctttctttaacctttgagttgaaatagcgagctattctatgttgataggttgcatttttcaaatgagcctgatctcgcttttcttccaagaaatcgagttgaatcaactgattttctgtattgttgtcgatattaaagatgtctcttctcaaagatccagctccaactttgactggtaccatggcttcacatccatatgaaagtgagaagggggtttcactagttgttgagcgaggagttgtattttatgaccacaaacttgtggaaattcttctggccatacacctttcttttcttcaagcttaccttttatagtatgcttgatgattttgttggctgctttagttttcccattactttgaggatatgcatctgctgaaaaagcttttcgaatctctaggtcgtcacattgttggtgcatttccttacaatcaaattgcttaccattgtcagaaattaatttgtaaggaataccaaacatgcagatgatagcattgtagaaaaacttgcataattttgaagccattatagttgcgagagccttagcctcggcccactttgtgaagtagttcacaactactacgacatactttgctcttccttttccttttggtaattcaccgattaaatttatgccccagaccgcaaatggccaagggctagtgatagagtttaattggcttggtggcctgtttacatatgtcgttattcgttggcatttgtcacatttcctagcaaagctagttgcatctgtttgcaaggttggccagtaatacccttgccgcataattttcaaagcaaggaaattgcctccggtgtggttgccacatattctgccatgtactttgcagagtatgtagtcacattcatttccatcgatacatttaagcaatggttggctaaaacttgtgcaatacagcttgttgtcataaatgacgtattgggtagctcgatattgtagttttcttaggttcgatcttatctttagggagcttacccattgttaaataggtaacgattggggtcatccaagtgaccctcttagttgtattgacctccatcatctcatctcgatgaatagtcggatgggttaagacatcaacaggaattacatcgagtaattctgcttctct

SEQ ID NO: 45544 - DNA, 1461 bp, Cannabis sativa
acctaccaactctgttcgtaattttttccacattttcatcaaaaagtaacgataaaggacacccaaagctctagtcctgatgttgacatgattaagatctgccgacttccattttccatcgtcaggcatcagagtaagcagcatgaaacctccacagggagcccagggaacattctcaatcaccttcaaggcatctgattctctggggaatctaaaaatgaaaatcttgggactgatctcttggaggcgccacccgggactcacgttccacatctcggaaagaatggatctaagtcgcccgtttccaatctttctctttctgaagaactttcccactactgttttcttgatagtatccaaagccacaacatcatctagagtcaaatctaaggagaaatcgtccatagacacattctcgaccaagctcacaacttccttaactgtatccatattaaactcctccgtagtcatcttgaacaatcccaagttactgtggcactttacagaacttcaaaaaagaaagaagagaggtgaaaagggactctgtatatgaggggaagaaatccaaaggctgataatattcagaaaaaatgcaggatgtatgaagaactcttaatagactagtatcttctattacaggataggaataggcaggtttcaaaaccctaaaaaaattaaaaaggttgcacatttccgaactaggaacgtcgcgttcccaccatacaaaggacaatcgctgctccttcgtacccataccaaggacgtgcaagaccacaacccgcgtcagaattccaacattccactaactgtacagagaaaaatcttttatttatagttgtattatatttattttgagattgttttttctggttttttttattattttataatttatttatagttattgtgatattggtttctcaaagtgttttagtattttttttacttttgcttttgttgagcgaactgtatttttgtaattttaaaattgtacaagtatatttttgtaattaaaaattttaaatcgtaaaattgtaaataaaatatatatatataaaagaaagatatttaaaaaaaatcctctttttgtaattatttttaaatttatggttattatataaatttttcttcaatgtatgtgattaattgttaataattttaagtgaaattaattatgtatgttacatcatttttaattatatatgttgaaattagtacatatactaatagtattactcaataatatttaattacattgttacatcaagaagattctctatctaaaatatatataatagaaccaaagaagtgataagtaggccaatctcaattctccaaatgtgaactcattaattacaccacaaccacctttatgtgatctctctcttacacctcacactatacaatccaaattacctcaaaacacaaacacattggcttgttcttcaattgcaatgatat

SEQ ID NO: 45545 - DNA, 1756 bp, Cannabis sativa
ttccacacattattatttgataaataatatgagaaaccactaactaaatatatggtgtcacgtagatatggtgttgggcaccttaaggtgccaaataacaatactcactaattaattatagaaatttattagcaacaaaagaaaagagaaaaaaaaattctttaactagcacattcatacaagtgttcacattagtagttatgcaaacataatagtttaagtacgtttaaatctgtatcaagatcaagaatacaaacatcattcatgacaaaattttagttaaggatcaaaagataccaagaaagccactaaaatttggcaaaactaaaaatcaaccaattaactcagcaatagtaatgttgtgtgccttctttttaactaaatttacctatttccatcttcttgatcactttatgtccatggtatataaaagaatctagaatacccgaaacagtgaaaacacctccaactatagcacaaacattagtgaggaagtgtaagaatgatatatactcctcagcaaaagttaccttaattggagaaagatcataaaagaaaaatacaccaggaagaaactgaatgttgccatattctgaagtcctaatatgctcagttactgaaaactgattagattgaataacttgtccagacacatgtgtataaacagtaggtaccaccttgataaaatactgatacatcccattaggactaggtgttataaattcatgtgtccattccacaccatcaagaggattcaccacaccaggaaaatattccccaaaactcaatctattgattttgtgacttatattaaaactatctttctgaaatgagagaagatcatgcacatgaatgtttgattgttgaaaacttttcccaggtgcaaaatgaaaatttccagcaaccttattaacttctaagaatccatatacattacaaccctcaccttcttcatctttgattttttgtaagaaaccttctcttttgcactgatcaatcatatcaggatttgacaatgcccaacctttcttcctatacgcttcccggacttgttcacaagtattacaacaattttcatcattaacattatttgatgttgcttttgcaccataacaagatccacaatatgtctcattactattattatgactgccaccatgtttctgcaatggcttgtcaatctttgatgcaccaattccatcttgttttgttatttctattacattaccacgggaatctagcctctttttgattacatcatgttttatatccaaatgttgctctccacttatgtccatggcatcaagactaagtatgaaacaaggaaaggcagggaaggtcacatcaaactgcagtttcaaacattaaaaaaaaagagtaaagatccattagttttagtttcggtggataattgaagttatcataatacaaaatatataaaattcctaaacttagagggtgggcgatttttgtaagaggattgctaattataacctcctattataacctttaagtcaacctccacgttcgaaatcatatgtcagaatattttttttcaaattttttcatagtgatatttgttataattacagtatcattcccgtaaatttaaattaatatgcatacatttggtgtatattaaatttttgaacataagctagatggtcaagattgtcgatggtgaagccgtggttgatagagaagtcgttgggtccgcgatggtcattgggtccgtgggtccttgggtctgtggtca

SEQ ID NO: 45546 - DNA, 721 bp, Cannabis sativa
ttgaattaaaaagaataccttaataggaactatcttctcgccagcatacatatcttgaccttcaaacgacctaaattcagctaactgggactgataatggaaagtaaacaaggtaaagctgagtagtggcatcatcatcataataaataataatagtttaaaaaaaatcccttaaaagagaaaaaagagaaagcttggttgggtaacctgaatggaggaagcaatatgggtaacaaatgcaggagggagcttcaagtctttgacagtccttttggcaaagacaacaatttcagaatcaggatctagacaaggcagaaagcagaatattgaaattcagattaggtagaagaagaaatgagtgattttgatatgaaaaagatggattataagcaaaaataccagaagggttccaagtgaaagtgtctttgaacttatgaccatcgtcgagttctatgtccaatctgattggtaccaaattctgggcggttgggctgccaacccaatcaatgacaatttcgagttcattcctttagattattattattcgattaaagccaatattaaaagagaaagaagaagaagaaaagttacatcctgaacttgacggctgaagacctccagtagcctgatgcttgacccttcattgtcgtcgtcttcgtcttcttcttattactgtatttcttggttgtggcactgcagctcaaccgtaacacctctattt

SEQ ID NO: 45547 - DNA, 1823 bp, Cannabis sativa
ataaccataacttctgccacttcagggtcaaaacaaccctctgatctccaacacgtcgaagaaagaactacactccattcatctctaatcaccatgcctagaccactacaaccaccaatcaagtcaatgattgcatctgtgttgattttgaggcaacctaacggaggaggattccatctatgcaccatcaggattgagtgaaaactcacctttggtcgagaagaaaaagtgactcctactggccttgtatagattggagtcaacgttgtccatttatggttttgatagttcccaaggaaatcacgagccccattaacaattagaacgagcaacaactcggtattattgtggacttttttatttcgcttataccaaattcgccacataataaccatcacaaactcaatcatctccttcgaaaggggatcaatatatctatgaataaagtttaaaaaatccttacaaggaacaagaggatcccctaaagcaaactcacaaaattttctacaaggtaacaaaaaatacccacaaagggcatgataagtagattcttctctcaattcacatataggacacaaaccatttgataacagtctatggtgagctagattaataatcatggggattcaattattagacacttgccaagaaaaagtctcgcctttagggtagattaggagtcaaaagctttttccaccaactagaaaaattcacaaaaggagaagaatgacccaagtccaagttagcaaccactcttaacaaaataccaacttgatttctcaaagttcgatatcaacttcgtctgatacatctgaagaggaccacagaatagagattatagtcaccacttcattagaacaaaaattggcttggactaaatctctatcccaaccacctgatgcatcccacaacaacgaaacttttcttgaatcatcaagctaatgcggagtggataatagtgttgtcgccactgaaggaatccaataatcagcatagatagcaatgtcattattatttcccactctccaaatagcccctgaatcaaaaagttatttactccacaaatatttttccaaacaaaagaagcctttttcaactttttaatcccagtaaagggtttgtttctgaaatacaaatcctttaaagcatgaccagccaaaaaagtaggtgttgagattttatgccctaaataaaacctaatttcaaagtaatcttatttactattagtaaaaagaaatcatattttgatattgtcatatgcttggtctattgggatttatgccctaaaatcaagtatttgaagataatatatttaaaatatatgaaataaaattataagataaatgaatacattaattatagaagtataattaataaatatctaaaaatttcttattcatgtagagatggtataatattgtaaagtcatacaagagaattaatattatataatatgaataagacaagtcggtagtgtattaaagtaagaaaactttaatatgaaactactaaatgcggtttactgtacattatactatagtgtgtgattttgattcggatcacatgtgtggatactgttatacctgaaatttggctctgtaccagaatttgacacgtgtctttcaagaagaatatgaatcaactttaggaatgtaataatggtgttgcatcattaaatgaaatttaaataactcgttccaattaaatacaagtttgatagaaatattcaaacccgttgactgtttagtctcatgcgagataagaataaaaactattaaacaagaattggcgagacacacgtttgcctcaggatagacaaagat

SEQ ID NO: 45548 - DNA, 2555 bp, Cannabis sativa
  modified_base (159)..(159): a, c, t, g, unknown or other
ccgatttcttggtgattttttcagtgatttttccggcgaaaatgccaattccgacgaattttccggcgccggcaacaactttgacgacttttttggcaccggccgctactccagcgacttttccagcaccggcagcaactccggtgacttttccggcancaatgacaaataaaatttcctaaacaaataaaacattaaatatgggatttgaaaacctaattacatatatatggtatatcaaataccataaaaagacctaaaaataataaaataccatataaattggtcaaacttaaatgtgtcatatttatcataagaacttttaaaatcctatagtaagtgtaatttcctctatttattaaccaattaagccataatttgattttaaaagacttttcacaccaagaaaagaaaagttattatttttcgaaaataataattattatcatataattttaaatataccttacacattatttttatctattttatcaaatatgccaaaaaataattttacaaatgtagattagtggggatcaccataacttgaacaaggtataaacacgtttgtcaaaaaacttatttccctcttcctctagcactaagggaactctcataaaaatagcattagaattatcaagcctttagatttctagcaaagtactttttgatagaaatttcattatctctatatgaacacattagacacatatttataatatttaggatcacacactttaaaattcaacaccctacaccccatgcttgttaccatctcttaattaggtgtaaataagattaaatatgggatttagaggttatgtgagttgttagaaagtaacctcattgtcaaaaaagtgttcaagtaataaaacaaaaaataaatattaactagttactagttactaaaatttttaatttttgtaaataactttctaaagtatttcaaagtattcccatttgatcttacatcacatatacacattataaataataaaaataaatgtccaatagttatagtttcattatgattttgaattttaaatgattaagttgtataatctctctttgcataattaattgatgataatataaaagtgacaaaatgtaagtaatttcaccttttatgttacaaatatttatctttaattactttgttacgttttatatttaatatatatattatattatttaacaaaatattataacaaaaagtacaccaaaataaataataagattcaaatttaacattatctccccactcaaacaatgacataatatttaattgtgacgaaagaccaagctttataacctgacatagataatatactgtgagttgttagcaaaagaaaatattaaagaaaacattactatatatttaagtataaaggtgtggagagactgtgaaaacattaggtccatattattattgttattatggatatataaagtttaaattaagaggcaacgtggagtaccaacattatgcatgaatttggaagtcaatcaatgatggaaaattgttgatgtttctctttaattatgagtacccaagttgaccatccatctttcaaatcaaagaattaatccactcagtttgcattgctaatcatattatttcagtaccaatgaaataatcatcaatgaaccgggaaaaaacagttcaaaggttgattcataatcaaaacccaacaatctcttttagctatctatatataattatgataataaaattgaataatcatttggattgctgttttttctcaattatgacacaaacttttttttaataaataaataaataaataaccaaaagatagcactatcactcacaaagattaagttgtccgatcactttacgactcaaaatgttgttgatagaagtttaataataactaataaaagaaataagctcatcatatctagtttttttttttttttttttaatgaaaggtaattattattagacctatacaaaaattagtaatttaggtcactaaactcttgctttctctaaaaagagaaatcatgagcaataatatttgcagagcgattacaaaataaaaacttaaaacattaagccttttactaagtaataaaatatcactcaagactgaatcataaattgtcaaacaagaatctatattatttaaaagtatcatgacagcttaacaatctgactctaccgcaatgttacaatatcctagccgattacacaattaaagttcaaccaataaagccatcgctttcgccacaagaggagacaacaatgccactgtcgggtacgctgctgaagctacacatctaccatcatgatctctaatgaccactccatatcccatacgaccttcaaatacttcgtagaccagcattcgtattgaatttgaaccatctcactaatggaaaacaccaaggcattgacgtttggccttacataggacaacccagttggactaccctagcaccttttagggttcgtttggaacgccgtattaagtcgtattgtattgtattgtaatatattgaattgagttatatatcatatttttatataa

SEQ ID NO: 45549 - DNA, 1682 bp, Cannabis sativa
atctcaatagttcaaggagaatttttaacggctagaaaaattcagggagcataatttgatacatgttaaagtttagagggtaaaactattaattagcccatatagtaatgtattgttgacatatatattgttgtttgtggaataatgaatttgtatttattctatattctagtgcactttaagttggtttcaatgctatttactggtcttcttactatttgatatgaaaatttaatgctaatgttatatgaaattattcttaattttactatgttatacagtaaagactaaagaggtatgtaactagtgattgaacaatatataaaattaattttactactaaaacaatcgaatttttaaatattaattattctttttctttaaatattaaaaataaattaatttgtagtgtaaaaccatccacattgcagttttgaaatcttaccgcgattgtggttccaaaaattataaaaaccttacgtgtataatttaatttgatcaaaaatatctaaaatattttaccattcgaaataaaactcttcataatagttttaattagatatcttattgttcttattattatatatactgattggtgcctagttcaaattataataactaatagatacaaacgatcaaagacaaccgaacaagtcagtgtctgatgtttgaatttataattgttttcaattttcatgacaaaattaataaaatatcaaataatgacacaaaaagatgcctgttgctgctttgttttctaggttgtgtttaataataattagtgaataatgacattagctaattgcaaaatattatatatgaattggtcatcaattttaaatattttattagtgaaatattattagtatttcttgagattattaatttttaaaatttaaaattattatattttacttttgagtactaagtaatttcttttccacatgcaaagctagctttaggggaaacaacaaagcagccgtgggctataatatgggagaactacgtatacatgttattatatgaatagtatttatatcatgagttactaagttctgaaattccagtcaaacaatttcaacaaaagaaagacataattttaattaatttattaacaaataataataaactaaaacttcttagctagcttgggaattatcgatgaagatcgatgtttttgatgagtttataattatagctaggaataataatatcaacacaacaatgtaaagacaattatatgcatattccaacattctacggcattttattcatatgatcaactctctcaaatattttatgttatatataataattaataataaaaacaattagataattacttattattagcacttgactcggtttgcatttgcctagctatattgacatgatcgacaaagaaataccatagataaattcaaaggaaaagacgtacggctttatatatatataaatatatatttatattatatatatacacatttgtagtcttcctaataaagattattaatttataaacatggtgcatgcaaatagttataaataaaaaccgacaaatcaaagcctattgtttgatgaagacatcaatttttaaattaccaaacgacaaataaacaaatatttaactacttgcatgtatagaagaataactactaagcaatttactagtcaaaggttat

SEQ ID NO: 45550 - DNA, 2402 bp, Cannabis sativa
tcatttggaatgcccaaatcagaattgtgctattagccaagtttagatccttcttgaaaagatattctaaatgcaagttgaaccaagtgttttggataagaattcagtgagttatgcatgttttattgatgggctataagtacatttcaactctaaatctgagatgtgccatgtaattacgaactgcgccacctcattgtgccaaaaggtggcgcaggttagccatgcatatttttggacatcgcaggttgtgttttgactttctttttgatggtgagtcatattttgcaggttctacttgcgccatctttagagccaaaggatggtagaggtaggctaggctattggaaagaatttgatggtgtttcttacttattctagtcatatggatgctagaaaaatactttgatcacattaattctcggccaattggtgggggagagacttgtgccatcttttgggtcacaaagatagcccatgtcagacatagttattctacacctcttggtgacttttgtcacttgattttgatgtcttgatgtagaaaaaatacatttggaaaggaatctccccaccatcccttgtggccgacctgtgtcacttcattgtgcacaaagatggcacaggttggctagggttgatggtgaatggaatagttcctttcaattgtgttatgctccttgctgttggaaaaatacatttagacaagtttcctttcgtagtttgagagtagacatgtgtcatctttttgtgccaaaatatggtacatgtttgacatgccataaggaatgtcttccttgtgcaatcttaactttatgcttaacttttagtttttttatgcctaaatgagtcaagtccttattatagttatcttgtcggattgagatctctaagatgaaaacccttatgtgggcccataaatcctaggttgggcacccttgagtgtggatcctggcaccaaatggttggttagtgttttcatgagtttcctagatgtgccatgtgggccctcaaataggatatcttaaattcatttggcatttgtaagtcttggttaacgtcgcagggttgacttgggtgtcttcaagatactcttgacttgtgggtcctcgcgagttcttgttggtttccttgtcagattgagatctctaggatgaaaacccttatgtgagcctataaaccctaggttgggcacccttgggtggggtcccgacaccaaaatggttggttagtgtttttaagagtttcctaaatgccatgtggggccctcaaataggatatcttaacttcatttggcatttgtaagtctctgtcaaagtcgtaaggttgacttgggtgtcttcaagatactcttggcttgtggactctcacgggagagtagctactttatttttttacgaaaattaggtataacataggggtgaacatttttatcgggtttgacccagacccgttcaacccactcggacctaacttggtcaacccgaacattttaaaaaactcgctcaatgcgggcgagtcaggtttaacctggtgccatgaacgggcaattttagggtttggttttgataactggtcaactcgcaaacccaatcacttttgattttttttttgtttttttaatatattactcaaatttattatgaagtatgtatggactatggactatagagtatagacttttttattcacattttattttgagacactttagtttttattatcatgaacatgaagtttaatatatgacttttgataattttttagttttggattcacttttgtactttggatttggaattaatgcatttaatataaattaaggtgttatgtttaatttcataaattaataaaatagacaaaaataattatatttaatttgggttagaaaaaaatagttgactaggtcaacccgcaacacgtgaacgagcaggtacaaattcacttttttttttttacccaaaactcaagttaacctgtccgatgttcaactcttcagaaaattattattaaaaaatttggccaaacatggctattaattttttaaaatatgttttctaatttaaaaaagtgaaaataatttttaaagtatgaactcaaacacccataatatttcttgaaattacttgttttagaatattttctatattaggtataaaatcaatttaaacgtgtatgagagacaaggaatattaattttatatttattgaatctgcacacaattaattggttgatattttatatattgtcaggtaacaatttatcaaattttatgattttttgatttagttttttaaattaattatcaaaatattatgacgattaattgtgacagagactttgatggaatgtctcacctatataaatataggatctcgatctttgagctcactatttattc

SEQ ID NO: 45551 - DNA, 2148 bp, Cannabis sativa
ctattaaaataatatcagatcatacagacaaaccccacttccattggtccacacccactttttttttttttttctatataattattttctatttaattatataatatcttgaatttttgactgtgacgggtcgttgatttatttcctcattacaaacaaaaagtaagaaaaaagaggttgaagttgaagaaaatgtaactacctttaagcctttagattttctttatttcttaaaagggccattagaattttaataatttttttttaaagctttagaattttaatattgattaattatatatacatatatatatataatttgagtaggttgaaatatttaaatggttgaaatttggcactagaacacaaaagcaaaatgacaattaattattaatgtaagttaatgtgtcaagtttgtattattaatttatttaaatgaaaattaaaatgtgtaaaatatgttgtgtaaaattgtaatagttaaatggtagtgtgtaatatgagtcaatcataatttttttacgtagataaaattaattacatattattattttctatgtaatagtgttaaggagacaattagctagtttgacacaacttttaaaaaagctaaaagtggctttatgagaaatttgttctataaaagatatttggtaaactgtaattaaaaatttaaaaaatttatggaaatattataggtcagaagtcacaacttaacttttagaaaaaaaaaatatattttaataaaaaaagctataataaatttatttgttctatgatcactttccttatttataatatattactaaaattaaaaatatttaatataatttaatattataataaaacaataatattaaaatatttattttttattttgtttaattatttttttttattttcataatttaatattaacaaaccacatcaatctagtctttttcatttatttttttacagcctaaagtttcttatatactcattttttttttttttacattatatcaaatgcatatatataattaaattcatacaaaaaaaaataataataaataaagacagagaaataaaaatttagtacaatataaatttttaaatatttataattataataaactaggttataaaatcattatcattttaattagaatcttaaaaatttataacactttaaataaatatataatttaccaaacacttgacgtagatttttatcacaactcaagctatagttgtttttttcctcacacacaaatatatcaaattggtggctttgttagtctctttacactacggtagattcaaagagttttagcgtttctcgctgcactcactagagagtggtatagaatctttgttcttgttgtcctttttactactcattcttaaaggggctatatcatttgaaatatcaagtggaaattatatattttataagtttgtagtgtaaaaaaatgatttttatatttgtttatataaaaatatcttgtaggaaaaactcaaaaagtattggaaaacatttaaggtaactagttacttatcaatactatttccattttttttttttgtataaaataacttttttgaatgaaaaaaagaaacatattttataaaccttttccataaaaaccataaaaacaaaaattccttgaatatatcaaacacttatattatgaggctcaacacagaatggtgagacaagtgaggcgatggtacaaggcccctcctactgggaaaggtcccaaacatataaatcaaatatgctatatacatactatatgacaggttatttcatatttaaccaaaaagaaaaaagccaaagaaaaaaaaagataaagttgcaaaaatatggctgtaaggatttttttattttacaaaaaattccatgttctcataatgttgcattttttgttgttttaaggttgtttgcatgttttgttattatttatatattattttcttattgtttgcatgttatttttatgaggttttataaaattaatattaaagaaaattttaaaattgaaaaaaaaaatatattttgtatatatatatatatttgactatatcattgttaaaatttggtcaaaaatgatattttgtgtaaaaatcttttcttataggctgatataattagcccactatgtt

SEQ ID NO: 45552 - DNA, 998 bp, Cannabis sativa
ttacacaaaccctagctatagagaaaccaaaaaagtcacacaatatatcaatcatcgaacattcttctccgacgttcctctcttctccattgtaagtgtagttatatgtatataaacatgtttattatttataattcataagattattcattcgatcctcatgagtcacgtatgtatataaataatatttacattatttgtataattttttgtgttgtaaaggccgtggtgtctctgtttgttttttaataagtggaaaaaccatactataatttatttttaatatacgtcaaaaaaccatactttaattttgttatatatttatatatatcatatatgttgtaacaaatatcatttataaatattgaataataataataatgcagatgaagatacctattcatattttgtacaatggatcatgggctgagaatgaaagttatttgcattacaagattaagataatcttgtttgatgaagatgagtacattccatacgattggtttgttaatctaatatgtaatgagcttggattggattcccaaaggaaaagtagaatgcgaatctcgtacgattcaaaaattgattcagactataaacacagatatatcgagattgaaaatgatgacactttagatgcgtttctctatttaatccaaaataactctgattttaaaggaactcctattgtggtacattgaagtgacaccgaattatatattgattttggatcctgagtttggtgggccgggcctggtggtagaatagggtgtgaatttgttgtttttggatcaattaagacaatgatcatttgtcctttcagtttaatttcaagtgtgttttttattagtaagtaagtttgttttattggatatgatcatgtcatcagtctcttgtcagcagtttttaaatgtatgtttcttctttatggagtaagaaattaaattagtcatattataatttttatgttatgtgttgaataatattaccttcacaca

SEQ ID NO: 45553 - DNA, 2934 bp, Cannabis sativa
  modified_base (2890)..(2899): a, c, t, g, unknown or other
agtcctttcagactaaccatcagtctaaggatgaaagaatgtattgagcttttatttggtacccatttctcgttgtagactttctcagattttagatgtaaactttggatctcaatctaagacgatcgactttggagcaccatgaagccgaactatttctttgacatatagatcagcgtactgatccactgtatacatagtctgcactggtaaaaagtgagatgactttgtatatcgatccacaattacccagatagaatcatgaaaccctactgttcttggtaatccatccacgaagtccatggtttccactcaggaatcttttgaggttgaagtaatcctgcttgtctctaatgttctgccttgacttgctgacaagttaggcattttgatacgtattccacagtatcacctttcacacctggctaccagttcagggctttcacagcttgatacatattagttgttcccagatgtaaggaatatgacgtgttatgagattcgtctaaaatctcgtgtctgataccttcatcaactagtacacaaaccctgtctttatatcgtaataacccatatgatgaaactgaaagttctttcctgacccgacttcaagcttttctttgtactcttgtaattttagatcacttggttgggctgtcttgattcttcctaacaaatcagactgtaatgtagtattggctagttttctaactacaaactcaatttttgctctggtcatatcctcaaccaattttggtgagatcttcttcaattcataaactttccctggacccttttgacttagagcatccgctatcacatttgcttttccagagtggtagagaatctcgcagtcatagtccttaaccagttctagccatcgtcgttgcctcatgttcaaatccttctacatgaagaagtatttgaggcttttgagatccatgtagatttcacactttattccatacaggtaatggcgccaaactttcaaagcaaaaactactactgctagttcaaaatcatgggtgggataccgttgttcatactccttcatttgtctagatgcataggcaataactttcccgaactgcatcataatgcaacctaatccttgtttagaagcgtcataataaattacaaatttctcatcactgactggtaagttagcactggtgtagtaattaacatttgctttaattcctagaagctactttcgcacttgccagtccaaacaaacttatagttctttcgagttaattccgttaaggatgtagaaatattagcaaacgcttcatcgaaccttctatagtatcctgcgtatcctaagaaaattctaacctcggttgtagacttgggtcgaggccaatctcgaaccgcttcaatatttacttgatccatcaaaataccatctttgttcaccgcatgccctaagaagcttacttgaggtagctaaaattcacatttcttgaatttagcatacaacttatagagacgctgcagcaccatccaaagatgtttctcacgtgtcttttctgaatcagagaagattagaatgtcattgataaagacaattacaaaatcgtctaaaaagtctttgaatactcggttcatcaagtccataaatgctactggagcattagttaatctgaaggacatcaccaggaattcatagtgtccataccgggtaggaaaagctgtcttgggaatatcctcctcttgaatccttaattggtgataaccagatcaaagatcaatcttagagaagacgatctttccctataattgatcaaacagatcatctatccttggcaaaggatacttgttctttactgccaatttattcaattcctggtagtgaacacattcttaatgttctgtccttcttctttacaaacaaaactggtgcaccccagggtgaggtactcggtccagtaaatttcaaatcggacattccctggagctgaaccttcaactctttcagctctgcaggtgccattcaatacggagctttagatataggctctgcccccagtatcagatcaatttcaaagtcaatctctcgtttcagtggtaaccccagtagttcttttggaagacatccaaaaactctcgaacaaccgaaacgtgtttcgatcccattgatacttccttcttgacatccaccacactggctaagaaaccgatacatccatcccataacatatctcttgcctcaagtgttgagattaatagaatttgagatccttgaaccttgcccacgaacacgaatgagtcctcaccatctggctcaaaaattaccatctttcttttacaatcgatggttgcattatactttgcaagccaatccattcccagtataacatcaaaatcctctaggttcaattcaatcaagtcaaccaacaattcccttccctccacgaacacgggaagggacctaacccatctgctagaaataactagttctccagtaggtagcaaggttccaaaaccactgggtaaaacatcactaggtttacgtaaattttcaatcactttactcgacacataagaatgcgttgcaccggaattaattaaaacagtcaacaaggtaccctcaatagaaagttgatctgccacagtagaaggaccaacatcaacctctacttgggtcaaagcaaacactagagtgtcatctttcttctgttctggtcgttgtatggcctgctactccacactggaagcatgctctagcttggcattcaccctaatggcgtctcttgcacctcgggcactctgagtaggttcaccaatttttgtttccaccacgtcagaaaccttaattaccttggaatctcttgttaggacccgtagctgctggatccttatgttgcgttttgtgccctaaataaannnnnnnnnnatataatcagatttatttattaataaagatcagaa

SEQ ID NO: 45554 - DNA, 1699 bp, Cannabis sativa
atgagttcggttggatctgggtcgagatcgatcagatctgggttgagctccttcgaactcgcttcgtcttagctccaatggtcaatttcctcgtgtaagaaagtagttcttggatctgggttgagatcttcttcccttgtgtaagaaagcagttcttacatccatttagtaaatttctaagtcaaactttgtggccttggccatcatttccattattgaagtttgcttaaccactggtaaatttttttcattgaaatttacaccttctttctgagtgaattccttggtatctagtcttaccttgtacttagcttcctcaattctaggaatgccttccttttgtctgaaaatccacttttaggatattagcttttgtccatcatgtttcttaacactaatccatgtcttgctctttaacaatgacatcttctcttcttcaattgcatgcagccatgctacaacattcttgccacttattgcctcttgatagtaagttggttctgagctatcattgccttcggctgcaaccagtgcataggcaataaaatcagaatagccaaacctagttcaagatttgctctcccttctctctctatctctggctaactgatgtttgttgaggttgtcttttgtctcatcttcctcatttgactcattctcatttaattctatatgaagtgacacatctgcttgatccacctcaaacagaacattgtctctctgatcaatttcattgtcttttgatgtggctttggttttcataggcatatcacctgttgatcatgcattttttgtgtccttctccaaggcactagaccttgtaatccttgacccttttagggtatctaagaaacatgcactcaagtgtcattggttgcaatttatcttgtttgatgtgcacaaaagtaatgcatccaaaaactctcaaatggtcaaactttgggggctttcctgttcaaagttcctgatgtgtcttgaattgattagcaatagatggacatatgttgatcaagtaacatgttgtattgagtgcttctccccatatttttcttgtcaaaccaactaggagcaagcatctcaccctctaaaacagtgttctatttatccttttagtcaaaccattttgttggagagtcaatcattttcttatgtcttagaattccttcattggcacaaaatagtttgaattcatctgaacacaattcaagtccattatttattcttagaactttgatcttattctctgtttaattctccaacagtttttatatacgataataacaaaaaccatttgttttattgttgcaaatttgatctttaatttatttggttatataagacaaattggataaaaataataatttctatacacaaatttaacaatcaaataacaaattattaataataatgaataataacaaaatattattggaacgtatctaatgaattagttaagcctttttcatatcaaattcaacacaaaaatattatataattaacagaatttagataatcagccatttaatttttcatttcaaatggattcaattccacaaattacatttaatttaggaattaactaactaataagaaattataacttcaatttacataaactcaaccagatcagatctaagagctggtgaacttagtaactgccttggttccctcagaaacggcgtgcttagcaagctcaccg

SEQ ID NO: 45555 - DNA, 1334 bp, Cannabis sativa
tcaaataactccctcatctgacggctgtcgtacatcacggattacaatcagtgaaagtacaataacgggacaaaatcatatccctataaaaatatgacatatcatacaaattaatattacactaaacaatacaaattgtattgtaatgcggtgtactaaatgaaccctaaagtaattgttaaagggacattgagatttgttgtcagctcatttcattctcataaaatgagtattcatcaatatcaacattgatgaagtgggtgaaaaatttaatataaacaaatggtgattagaagaattttggttaaaatgttaatgatcaaacaccaaggaatgtagtagagttgaatttcatcatagaacttgaattactcatctagttaattttcataacaaggatgaaagatagatatgaccaaacataacaccaaaaaacatacttggaaatatgaaatacaaaaggtatgaacacatttcaagctgccatacactcacacatcacagctctgacaaaatggtgggaattggtaatgggacaactcggcagttaatgattgaaatccattcacaagctgtgtgtggaattcttggtcctcctctccaatcaatctaaaatgtacaccgatggcacgctcacaaacagtcttgaattcaagaaccgcagcactgagctgctctagttcctcagactgcagcttcgttgtaggctcaccggacaagaatgcagtgcatacacttaataccccactgttaacctgtgcatagacacacacaaacttatcaacaccattgttggctaagaaactagattacatgaattgagcgcaactaacctggacagccatactgccttgaagaattctctgaaggcttcgcagacgtgggagtcggtgctcttcagaaccacgaggcttgtcgagttcattccttaatgcagctgttcgagtttcaatcattccaattgcaatttctactggggagaactcgagcaactctgatttggtcaccaagagcctattaacaagtgcagggaaagagccttctgtctgcagaacagttcgcctcttccactggcctttcaacccaccttgagtctttccatttttggtaaatggtgtgtcaaacaagaaacgatcaaagacaccatctcggacacttgctgtagaaagagagcagattctctcccttctgctagccaaatcttcatcctccgaaactgcatcaacagcatttatttgaagatagcaaactccaggctgcaactcattggccttaacttgcctagaatctgaaattatatgcagggtgtggttcccatccatcctagactcata

SEQ ID NO: 45556 - DNA, 6388 bp, Cannabis sativa
  modified_base (1548)..(1562): a, c, t, g, unknown or other
tatgaaataagatgagtaatcctttttatatagccaagggactcaatatacttgttgttataatttgacagttaaattaatcaaagactaactaactaacttaaggttctttcaaaaaaaagactaactaactaattaaacgaatgattgttagatttaaagaataataccacaataagatatgtattataggtaatacaatatttttgcacaatatatcaatattattgaaatgaatgtaattatattgaattggttgtaatgtaaataaaagcaattaagaaatattaaatatatttttagaaagtaatgaagcacaaattattgcatgatgtgagcgaatgagtgggtacaatacaggtaaactcaaccaaggaaggcacgtgactagtagttagcttattatttacagactaataacaaagataaagtaataaacaaaattaaatgattggcctataattagtagttgtaatccacataatttgccaattccagagtgtactttcaggaaaccataaaatgcattacttgtggtgtaataggctaatagctctaatcttatctaaaaacgtgttcaacaagcatcattatatatcgtaatagatgtaacctaaatatgtgaggcattgtaaattataatcatatattttacttttattaattatatttatacaattattaaaaagaaattatgtttaaacaaggcgatatatgtttgtttatggaactaagatcagtgtcttattctaatgtaagtacacataatttttttctactattatatattagtaagcaaagttgagaagaaaaataaaataataactaacaaaaatttataaaaaaaaaaagaaaataacaactaaaaaaaagattaatatattatatatatttgtatatataattttctacactattatatatttactaaaaaataaataaaaaatataagcaacctggatggttacggcaaaagccagatgtggcggtctttaaaattgaaaaaaagaaaagaaaaaagatagtaaaagatgtagaaaagagtgacaaaagtattataattggtacaaacaaaacaaaacacacaactccaaatatcacaaaacacacacataaattactaacactgtataatcttattcaacttgaaaaaatacaaaaaaaaaaaaaaaaaaataaggactatagaaaatccttacctacgcggtgcgcaacaagtaaaaaaaaaaaactacaaaattatgtataattgaacaaaaagttaaataaatttgtacatatcaataaggaaaatgctaagggggtgctaaacataataaattattggaaaattctacaatgcaccctttaaaatggatacattgatgcacccttatctatttagcacccaaaataattttttagtcaaattttttctcatagtcatgtacgttatagttatttaagacatcttgcaaaattttaagaaatttgaaaaagtttaacacgccaaaaaatacgttcaaacagtgtgtagcacgcgtaactattttattttatacgcgtgtnnnnnnnnnnnnnnnaacattgttttctatattgtaaatcattctgaatttctcaaaatttcgcaggttatcttaaatatctataacgtacatgaatatgaaaaaaatttcgcatgtcatttaaaacatgtttggaattggaagcttttgctagttttgaaacaactctccccttaactcaaactgaaaatatgtctacttttatttatttttataaatttatctgaaaattatacttcaaccattttgaaacaaaattttgatttgtttagagtcattatcattattatgtttgtgctaagaatgtaaagcacaacatgtcaacatctaacctgaacaacataagcctctgatggttctaatctcggccacttcattaccagtacagcagcataagaagcattgtaattaggaaactatgtgaatctaatcagaagaagcagacagacccccttttctactcattattcctacaaatacaatggacattaatttgatttgacaatgaataacataaaattattgcaactgaaactattaatagataaaaagaacttcaaatggctatctcaaacacatgaaaacaatcaagtaaactcttttttagatttacacagactaatcaaggaatacaaaattcatgggagaatgagctacaatagactggagtttattggcaaaggtttgaaccattacagatatcagtacttgaacttcatcaaataatattcaagcccagataaagatgctgtaccttaccaagtattattgttcctctcataagagttatttataaaacacaggtgtacacatctgataatacaaacacacaaagggatagtttagtaacaggaaaaaataatgtattgtaatacatgttttttgtttagacaatgatcttactacaattcgaacatttcatattcatacaagtataataatccacatggacataattaactggaaacgggtataaagtgatgaacagccaaacttgtatgaaagaaagtaaattcaggttttctgaatgttgacagcaagtgttcttatttttcaattttttacttcatcctaaatgtagtacagccatatttagtgacagtaatggccatacaaacaatatttccctcctccatactcctcctcttccccatctctactgtgaatccaccatagaagattagtgagtgagttcccatcatcatgaccattcaaggacctaatcttctgcaaagcactctccttatcataaagcccttccaaggcatacacaaagcctttccatccttctccgacgccttctctttgcagaaccggcaatgtccacgtgacaagctccttggcaaaaccaacatcagggaacaaggcctcagtaataggcaacaagggtagcacttgaattccaagcctacactccctccattcagcgggtgcaaaccaaaggccactgtcccttttgttagaccagagaacacccaccactctattctctcttgtgaaatcttcttcatacagtttatctccctcctttacatgccaccacatttgagctgcccccatctccaatgctgtaagcgttgatccagtggctacaagatgagtgtctccataagccaaccccattaaagctgctgaatagtaagcattcactgcctcaccagtactttcttgattcctcccatcaccaaattcagtgagccctccagcccatgagtgcaatttatacaggtcaaagcatctcaaacgtggataaactgagtttggtcttttgccaagggtcataaaatctgccataatggaataagcttgagccttgtacttcctcccccaagctggatcgagtttcacaagcactgcaatcccatatagaaaatagcctaaatgaaaatgatgatcattatataccccaaaaccaaaatctgcattagcatccacagctccttgtttagtcacaatcccaccccattttccttcaaactgaaatccatttccattgaaagtcccatccaaccatggctcaattgtatcttttaagaacttcttgatcactggaatcacctcaagaaaacacacttcttctgcaatcaatgccaacctggccgctcttgccaccaacttcccatagaaatatgaagaagttatcgtcatggcggccgttgcattgagtgcctccacatcttttcgaagagcagaaacaatttcagcataagattcttctttgacacctctgattgaatgccaagtaactgaaacaggatcaggcttgagcatccatgaatcaccaacaataccaacaaggtcaccatcaatacttctgtacttgaaattctccaaaacagtgacattacaatcctcactagaaagaagcttaagatgaagagggtgagctagcataagcaagtctccccaccctttcttctcccatttgtattccatatggaatggctttgtcaatgcagcctctcctgaaacagggtaacaagaactgaacctgtccaacaccgcctcacattcgggatcagaatccggcaaaagggcaatccttaaaataccagaaaattcaccagaagttatcaaagaaaggctgtgagtcaaactgactgaggatgatgtgtatataagccaagtctggttgttgttaagcttgacagtgtactttgtccccgaattattcgatgaaaacgacagaattgcatggatggtcgagattgaaatcgcagtaccgttaaagacagagcaagtcagaaacgggctaccacggacgagaaaaaaccttagattggaagaaggaatatccaaagtgacactgagatcattgaaagaagaaataacatggcttttctgcgaacctgggttggtgtttgcggcggctgagatggtgagatcagccacgaaaacttggtacaagaaagctgagttggagaagcgagatgggtaagaaagagaaagagaagaagaagaggatttgacaaggtatggatggaagtactcgggctgatcaccatttttgaggacaaagttttgaaaaaaggagttagtgggaagaggggttgagaggagattaggggagaagaagggtgaagggtcagggacaacggtggattgaactttggggaagaggaaaggagtgttctttcctggtctttggagtgacatgtttgaagattcaggatcaggagtagtaggagatggtgatgttgggtattctggttgaggatgatcaaggggtttataaagcttttttcgaggttttttgaaactgttggtaatcagggtcttcactctcctcctcaattttttcaacatttttattataataataataataatagcaaattaaattctgtaagtaaagtaattatgatatttttaaaaataaattaaaataaaaaaaaatggttggagggaaagtaggaggaaatagaggggtatgtagtaaccaaaattgacccaaatgaagagaagagagagaggaggttggatttggatgaagtttgcttagaggtcttattgaagttttgagaagcatattaataaatgaccaaattgggggaaaaatggtgggacgtggaagaagaaggttggatgaatttgaagggaagaagaagatgaggcttttgctttggggtatagtttagtcatcacatcaatgcaagggatcaatttgttctttcaattatatttatttgttgtttcgaaataatgtttgaagaaaagtataaccttaaaatgcttcataggtaaggaattctagtgtagtcctcgttaaggttttagatattgatcccataaatttaacgcggttatactgctttgtacatatatgaagacttattagatttcatttttatgattgaataatagttagttatgtgggatttggtgaatttgcatcgatgcaatattgctataaacaagtattattagtaggaggtgtagtcgtggactcaacattttggattaagtttgggtttggccttaaaaaccggtaagcgtttaccacttcagaaattccaaatcattattaaggaatctaatcacaaatgataatcattattaagagtcaatgcagtgcaactctcagatgatatggccaaatcatacttttcttgtgaaagcaaggaatataatataaatatatatcacttctcttccacagtttgttgcatttctccatctttcaaattggcttattaaacgtttttcttacttgacttttgatgagtcgtccaaattcgaatgaatgcgagcaatttgaatttttttatttatctcagaagtgtatatatctactatattcaatagaagaattgaacttagcaagttacacatagagatatggcactaaataaccttatttctcactctactgaaagttagtatctcttttttaaaataatgtaaatgttattttttttttatttttttctacttaaaatatcattgactacataagggtttttttttttttttgaacgatgaacaaaattttattgaaaaaatcagcattgagtacatcgaaaagaaaagaaaaaaaaatcatccatccaaactagctcaacatctagggctgaatatcgggcaagtttattgggtttcggattcgcgagtttcaagtccacgggtttcgagttcaaaaaaataaaaccgaacccggacccagattggcgggttggtaggttggcgggttggcgggtcaggggttggagggtttcggttggccaggttgaccggattggcaggctgacccggtcaactcggtcaactctttaaaaaaattaattttttattcaaataattatttcttttattttttgtatttattaaattaaacatatata

SEQ ID NO: 45557 - DNA, 2028 bp, Cannabis sativa
agaatattataatggaaagctattataaaacattagaatatattgataaatggaaaataataatttcaagttttttttaatactatataaaccatggaaatgaattaaattatgttgcatattaggtgtatcacaccatcaccgaatcaacacattacattggcaatcacaaccttttcaatcattcaagaatccttaaactcacactactagctctgaataggcagcaattttttaatgtaaaagtacggtgatacttgtaattattacctatcgatgcggtgtataataacaccaattatgcactttttgagatttttgtaaatgaaaacaatggtttaaggagggtattattgtcatttcgtaagttgggtaaagtctacgtggctcacatgcagctatgtctgggccaacgagaattggatgggcggctgtgattgaaacttgaagttacagtttggactgcatagtctgatgtaattgtaattaggactgcatgctactcacgtgtcaattcagcagtctgccttctcaccaaagcctttcgttttttattttatttttttaaaaaaattcaaataataaaatcggaaggagactccgcaaaatcataaccgctcaatgtactttttctatgtttcagtttcttagtccgtgattggtggttataattgttactcttttcttctcttttcttaatttttttttttattttaattcttttttaaactatttaataatacgaaacagccgttaaaaaatatattacggagcatagcataccctattcttcaactatttaatgcaccaattatttattttatctaataaactaacatgtatttaacttctgaatattttcttgtttaaaaaaaatgaaaaatatatttccaagtggaccacaagatttaagaagtgaaagatattggttctttttttcttttcattttaagactttggttcttctattaataaaatttaataaatctttgggaaaatggcaagccaaatgtcacttttcgttttatggaaaaagataaccgtcatattggctaagctaaagtttgataatttattattattaatatgtgatttgtggatatttatatattttattcgtaatttaatttggtgtagaagagtaattacgtattttgttggatattaattagagtaacaaataaataaataaataaaaaaggttaaataaaaagatattttctgttcttttagaacaaaaaaggtggaagtcaccgtatagtgatatacaagtttgttggagcgttgagatttaatttatttatattttccttttctacgaaaatccttaccgattcaatatgcattaaaataggatataattagataattattttgaatacagtttagtaaatcctatataggatttttcaaaaaaatctatttaagggagagagtttctcagttacttactttgctccatcacaataggatctttctttcattcttttttaaattattaattttgtcaccaaacttcccattttttttttttttttttttttttttgattttatagaagatgtagagcaaactaatgtatagatagaccttgtgttagtgttgatatatatggcaccttatcaagtgttaatatttgcataagaataatgtataatcatatgtttatgtgttttattcatgtatttcatttagaggattttcattcattttaattaggagaaaattagttgtgagaaagtttttttctattttctttattgaaatagcagtgcaatttcaataaacgtatgtttttttgaccatttttaatgggagatgtaaaaattgtgctatatttagcataaaaagtaattttatggtagatttacatcaaattttagcattgtgctccaatacataattacaaaattttaatgtaaaataatatctaataaatgtttttattaaaaataaataaaactaataactttgttattaattttattattattttaatatgtaagacaataaaataataatataaat

SEQ ID NO: 45558 - DNA, 2815 bp, Cannabis sativa
aggccacataatgctcgtaggactagcaccagcaacgagatcccacccgggacgcctcacgtggagattgatgaccctaaggaggtcgatcctcgggttgcctagcttaccataactgtgattgatctccaacaatagctgcaagactctcttgacatccaacacaaacagtttcaacactggttcatggaaaattggaggaatattgaaagcagacaagttaagcaagaacaatggagagataacctatcttagcatatcagagaaacttattgctcttgtcaaggaaatactccccacatgggtctttctaagttggtgaaagagactccccgtcgaccaactagtcatgtgggaactaatgctcaagggggaatccttaactcttggaatacaactaccacacctggtaaccaagtaggcattaagtaagcaccaggcggggaggcctcctagaggggaagcaccttcgaacaagatcccgaaaggacttaagctcgtgggtgccaattgatgggccctccacctgatattgaatgacctcacaacactgatagaaccaacatgactactttgccaagtccttctcaatgctttcatgacactaggccccaagaccccacaaggagaaagagacctactactcaaactgatagaggtagtaggagacactactttaaaaccagaggctatgagataaggcaggtaaggaccagtgaaccacttcacactcaaaaatactttcgagatgaaaagggtgaattgtgtcgttactttgcttgtggcctcgatggctagcagtatgagtacttccctcgagtaagaggagaggagttgaacttgagaaaccagttcaattctcttcacacttgtgatccagatgaagactactttgaaagaagtagccactacaatgctctgaatgaccactctcatagtggatcgtcccgagatgaacctgagttcattccggagacttcaccagtgttactttcatgaccccgtggtcaagagaaaacaaaaagactgaagtacatgatcaacttggaagaccaagaaacctgcgtgacctccaaactaataaaaggtcggtggaagtgggaacttctaaaggagaccctacacgggtaatacaaactccaactgaatgtaaaccaccaccgatggggttaactaggcataattcgacactttagcagccttagtgaaagggatcaaggcccctatattatcagagtttgaacttgatagagagcggtgctcataactctctaaaagtatcaaagttcttcctatccctccaaggtttaagaacccttcttggcattaatacagtgggaaggaagatccactttcttacattcactactttgaagtgcagaccgatctggaaggtgtgagagatgatgttagatgcagaatcttccctaccacactaacagacctagctcagtggtggtaccttaagctctccctagatcgatcgactcatggaaagctctagcaaataatgttggcaaccaattttctccttcccgcaatgccagattgaactcaatgatttagtggatgcgaagcagcaggagatgagtcctctatggtctgacctttgtcttaagatcttttacaccttgaatgacttcctcgatagaataaatggcattatcaaattagaaaaagctatcacctaggccaagggcttaaagggtggcaagaataagccactagactccccattccctaacactgaggtgtagggaaatgggaataaaggaggaaccaaagggggaaagagagctaataatggtggtaagccaggcaactcccccagtggaaagaagcccaaggttgaggataggcccttataggagtatgagcctctctttaccacttaatccatcctcttggcccctataggaaatctatacggccagacaatcaacaatgtcgtacaacaaacctcttcctttcaaagagttagggaagaaggacatgaacaacaacaattacgttcatgacactaatgagtgtaatcagttgcgagataagatagaatttctcattagacaaaaccatgttgctctccaatggtatgtacgacctgaagctccagctgggggcaatgcatctctctagcctaggccagttgcaatcaagctagagattgtgattggaggccctaacctagcttgaaattcaaggccttagaaatgtatgcaagatcgctctgacatgaaccaagggtcaaagtactagaggtcacataatttccttaaaagtctcaatgctacaggtgtcatcccatcacatttggagaattagactcctatcatgtcagctaccctcacagtgatccttaggttgttgaggtgcaaatagtagatatgatggtggaaagggtgatgatcgacgacggagcatcctaaaacatcctgttcaagcgatccctaataagatgggtttgacttagaatacctggaaccatgcaagtagctaatgtatggtttcagcagaaccatcatcgttctatgtggcaagatcaaactatcgctcagtgtcggtactttaccaaggaaaaccacaatcatggccatatttattgtggtggatgtgaagtcttcgtacaacgtgattcttggaaggctagacctatatgaccttcgacccatctctttaatctaccatttgttcatcaagttcctaatggcaactggtattagttgtctccttggcaatcaaggaagtgcacgcgagtgctataacgcttcgttatcacttgccaagaagacatcctctattaatacggcttgagagg

SEQ ID NO: 45559 - DNA, 3099 bp, Cannabis sativa
aagattaatctgaccaaacttgcctatgcaggaagggtggtacgatgataggcctcgttctttcctagtgtatactcctagtaggacagcagtagtttatgctttggttagcgacgaaaacggagcactggtatccgaaacaaaaggcgaaaacatcaaaccagtgctgtctgaaacgataattgaagacaatgaaccacttgtggaatccatttgaggaatgatgtatcattgttcaaatgaagttttggtgagaatatattgccatggtcatcctctcctctggctcatgggaacgacctcatcttgtatatttttttgctaataattctagtggagtgccccttaaaagtttcattgccaagcaatccatagtcagaagaacatgcacactagactttctaatcatgtgcgttatcgagagctaagaggaggacaacaactctctactaggaggtagtgtattgtaaagactctagttttcgtgaactcttattttgtaagtagaagatcttaataaaactcaaatgagttggagaatctggttatagatttcatccgtacagcacgctggattgacctaatttggattttcttttcttttccagttgaaactgagaaattaagatgagaaaattgacgcaactaggattttattttttgaaaataaaatatttcagaatgatatataacggtaggaaggaacagtatattgtagttattaacttattaatgtattccataaatttttaagaatactataaaaataagattcaaatatataatagttaatttttttttttttttttgcaaaaaacagtagacgtgcaacatattgcgataatatatacgagagttttatttaataactacactctattattaaaaaaataatcttaaataattttaaaaaattacttttaatatttttttaacttttttttcatattattttatgttaattttaatatttattttaattttaattatgcatatatttttttttctaaattatgtatatatattttttattttttttacgaaaatttcatataattttttattttaatttttttttataatatttaaaatataatttatttttgtttgataggaaaatttttaggaatataaattggtagaaaaaagttaaaaaaaatttagtacaattaaatatataaatttaatgtaaaataaagtatttttaaaaattttgaagtgtaaataaaatttttcgaatatacaataggaaaatttacatgaaaaatacaaaaattcaaaaatattatccatacatttttacctttgtttttgttctatttacactaatacttcttacacatgcatgatgtcttttttttgctggagatgcatgatgtcattatgctacttttacacactctattttcccttcttttctatcatctttttcctttttttttttctttttttctcatcttcatttcatttttctttgtaattttctctttgaaaacttctaccatgatcaagattcaaaactatttttgataaagaaagaacaaaactgatttcattcatctttctcaagtaccttcctccatcttctgaccacgtttttttctatttcttttttcttttttctattctatgaatggctattacttaattgtcatctttcccatcactattgctgaaaaaatctttaaaaatgagtgttaaatcttttgccaacaaatttaaaagcaaatggcttgttgttgaagataatgatttagactttactctgcctataaaaaaaagtggtcgcccgttaagaagaaattgaaggttaatgttactgaaaatatttctctcgctgaagttaagaaagggaagaaccaagctgatgagagtacgaaggtttctttctagtttctttatagttttgccctaacattgccctaacttttattattacttaccacaatcgagtttttcctgtacgagtcgtgtattacaaattttgaaccctattttttttaaataataataataatattgtagtaacacaactattattcaactaatatacaacttaactggaactagaaatataaaaattgaatgggcatcgttatgaaaatatttgtcagtatttttttttgtcactgatcaacaatcaattataccttaataatattatctggagaaacaactgttagaactctgtaaattaactttataacaactaaatgaatatattaataaaactaaccatgttataatctttttttaaagagctttgtgttagattgtggatatgaaatacctgcaaatatcataaaaaaaatattataccgttgacggtttataatcattgatatgtctagtttcagagtgttagcaaaatgttaatacaactataatacaactatgtagaaattttaaaactagaacaatgtttctatgtacgtggctctagatgatgaattcaaattttattttttgttatttgtgatttgatatgaataaatcaaccattaaaaatctagaaaataatattaatgcaactggagaaatattagctagtgtattaatatatttttcttcagtttatacatgatttagattgattagaactacaaatctattttagacatatctacattttatgaatctaaaaattgatattaggagaattagttttttgcgattttaatcgtaattcaaggttgaattttagttttgtacaagtttttctgtctgattttgcataaattcgaaattgtatatgtttgaatttcttacggtcattttctcaagtgaagttgccaaaatttatggtgattatccgtctgttttggtttcttttcagttggcctgctagtttggttactgaaagttgtcgtagttgtgcctgaagtcaatgctaatgttcgatttatgggccagcaagtaactattttgtgtctaggtcatcattacaattgttttaatgtagcccaataatataaggataaagtgattaatcgaataagggtgagtaatgttcaattatctatagttttagttattttataaggtcattaagaattaatataaacccttattttttttataatgcaattttattttgat

SEQ ID NO: 45560 - DNA, 2732 bp, Cannabis sativa
  modified_base (48)..(54): a, c, t, g, unknown or other
agttcatatttagggtgtttaaacgacatacttgtgagtagatctaannnnnnngtaaaataaatttccaacattttgtacatcacaccatccattattatgtactgtgcaacctttctcatcattttttgagccttgttcctgttgcttggaagttctctagtgttaagataggttgttatgggagtcatccagtttagtgtgttctctaccatctcgatttcctccgtgcatgtgatgctgggatctttcagaagttggattagaatcaagttgtctttgtctgttactgtgttgctcgccaaccgtgctagttcatcagtttttgccttttcttctcttggaatttgtttgagggtgtaccccttaaactatgcgagcaggtcatggatcttactgagatatgccaccactatttctcctcaagctgtgtatttctccaggacatgatttaccaccaactgtgagtcactatagatctctatatattctgcacaaacttcctaagcaaggtttagaccgataataagtgcttcatattctggctatttattaaatgctttgaatcaaaaatttattgctcaatgctagggttgccccttgtgtgatgagagtaattacaaccctggatagctggacagtggctgatccgtccacaagcaactttcagattggcttgtcttcatagtttccttctggtgagggtgctttttcttactcttcttctagctcaggattatcttttgagttgtttgcctcttttctcgtgcattcaaccgcaaaatctaccaaggcttgcccttttactactgtgtggggttggttagttatttcatattatcccaactatattgcccacttgagtagccatctaaatgcatcaggctttaccagaacttggcgtaaaggttggtcgatgtacactcgagctggatgagcttggaagtagggtcttaacttccttatggctaggagcagacaataatttaacttttcaatcagagggtaccagctttcagcctcaattagtcgtttgttgatatattagattggatgttgaacattgttctgttctcttatcagcacgacacttacagcgtaatcggtgatcgcatggtagatccctaattcttctttgtctagaggctttgagtgtatggggggttctacaagttgctgcataattcttaaaaagcattctcatattcctctgtctattcaaatttcttgttatctcgaaaaatattgaagaaagggaaatttgtctcttaattttgaaatgaatatgcttggtgcaacaatcacacaaagtagttcctaaacaatataggactgttcttaaaacatttatcatcaagttttcttcacaaaataaaaaagtcctacaaattaataaaaatagattgaaaatcaaataaatgtcacctaatttattatatatttttcttttatataaatatttattcaaccatcatatatacaaataataatgataattttataacaaataaaagcaaagattaatatttatttatataaaatatcaccaaatttattttgtgctctccattatacaaacttataaatagatttaatcaaccattatacatggaaaaaaaattaatcttgtgataaataaaagtaaaaatttagacttatttatgcatcctaaacaatgtaatgtgagattgtttctaaaatatttattttcaaaataaacctcacagattagtgaaaatagtacgaaaaccatataaataccacctatttttttttttttctttcctttatataaatctatataaacatatagatgtgagtgcactttgaaaaaaaaaaggacaaacaattggaataaaacacatgaattgtgttatctttacttatctaaaatattatatatcatacagttgccagcagaaactgctaaattttatacaagcatgatcttcaatacattttaacggatgacgggaataaatatcaaaaactgactattacaacagaaaaaatgttgtttatttgtatgaagggcctggtatgtttccttttacaacggccaaaacatattaaattaattatttcttttttaggttattctgctttaagctctttccagctgatcttccccaacaatccacctggtcaaccaactaggatctccggcaaaggatcggcgtgataaagggctgatcccaagatcagcaccaatttgatcgtactccttgagagctgcccccatctcttcttctgtagcagcatcctcaacaatgtccattgtttccattcgaagaacatcagcatattgctgctcctgttcagtatcattttggaagggttccacggcaggtccctacatattcaatgtatataggaaactacaatatattaaaaacaaaactcacaacgcacttgcaacttcaaaattagtaggattttagtttaggtaattaaacatcatgcttcctttttaagccaagtttagtctacaagtaaagcctaataacactagcacagtcactaaggttgtggttggcacccctttttcagacgctctttcttcaatatttagtagtaaaaaatatttttatggatgatggggtaaaaatacagtataaaaagctatttctagagaagcaactaatagtagctttttcaaaaaacacttctctataagctaaagctcaaagccgaacaaagctaaattaaacacataactaccctcctaactc

SEQ ID NO: 45561 - DNA, 1105 bp, Cannabis sativa
agcaatgtataccaatcaattgcacagcaaaattgaataaacacttagaaaggtaaaactgaataaaaagtgttaccaaccttgaaaactgcaaagttctcaccacaacgtgaatcaataacagtgacatcttcttctgacactaaactgtgctgagtaaatggccaccagaatacatccatggccttctttggcatctcatgtaatctcttaattcgttctgattgtgcggataccatagttttcacaagtgaatcaaacaccccacgcgcagcatcaaaccattccataagatcatccgataaatcttgtggaatagatggaagcacaagaacaggcacactaaaacaaacaaatgcttatcaaaaacgaaaacatctaatcagaattagttgtattgcagcagagcaaaacaaaggagcccctgtcgaaattacctttgtcgaagatatgatcctaagggcacctcattttcaagaccatgatcttcaataacaacagcaacaacatcataaccacgaagttttaagctctcataagctgaaatagttccagaaataccacccaggcgaccatctccaactagaattgcaggtaaacgaaaaggtctgccagtaaaggaaactaattacgcaaaatgtacgatatttgaatcaaaataaagaacatttcccattaacaaaagtagaattaaaaaaaaaaaggcacctatacaagtcacactgaagagtcccagaaggccctggactggcaatcccaccagcagtctcaacaacacaaaaagcattcatcttttcctccgaaaacccacaattcaaacgcctcctcaaaatcccaaccaaatccgagtcttccaccatcccattctctctcccagcagccaaatgtggcgaaaccgcttctctccacgcaaacatcgtctcacacatcaattccgaatgctcaccgtcttcctccccaggaattctgcattctctgtagctagattccaaatcaagcattccaccaccatccccaacttctccgccaggcaatgcagccacaacggaaggacaggaggccttaagaacacgatcagtagctagaatagagcgggagagggttt

SEQ ID NO: 45562 - DNA, 1848 bp, Cannabis sativa
ccatattaacaagtcttccatatacagtataaagtcttaacctaaaacaatgggtgcgataatgtctttcatatgcaacacgtaaaacatggcaatcaggctgtaaaagataaccaaccccattaatttccttcatatgcacaaaggcaaaagagaactgcctcactagcaatgcaaacgaaatttctatctattttgactatgggcattgcccattggtaaaaatcatactgtaaacatcacaagttacagaaaatccttgcctccatgcattcgccaactttaagaattaaatcttcctcttcaaatttcaggatatcagaatccctggcaattttattctgttgaaaatagaggaatgagtgactgttagaatccattgaacaaacacttagataacacaaattatttcatataagcgtatgcatgtgaaaagcaattggttgggaagaaataatataatcaaaaaaaattagtacagaacttgcaaaagtgtaacacagtggacacatttaggaggcgtttggtacgaggagttcaaaacaatctgattaattggaatattaaatcggagaatataattgtttgtaaacttaaaattatgtttacttatggatgagaatatttagttagattacggttaattgatacatcatttggttgaacataagaatttgataaattgctgtgaaaagttatatgaagtatcaatatattaaattcattgtattaagagtgaaggtaatatttggaacccacctttttgaaaggatttaagattaccctcatatagggtaatcttattaccacagtaataactttcctagaatcaaaaaattaaaaactctataccaaacatgggaatatgaaagattaccgtttccatgaaaatgtcacatcataccaaacaaccccttaacataaagacccaaaaggatacttactcgtgtttcctcaagattgtacagcagacaagagtagaaagccattttgtcatccttattaacaaaattgtgtaatgcaacatccaagtcgttaacaggaagaatctccattttctgcattaatcaaatattgtcatgataagcagagtcttaatgtagtctgttatgctaacaaaagtccctgcaattaacttactaattatacaagttggaattcacctagcgacacccagctcaccagatacagataaagatgcaaatctaaaatatatattactcggatatttcatatgctattttgtttgtattaattatgctttcttttggtttctgacaaaaaccaaataaagcttgaactgaccagccccgagaagaatatttttaccaccttagcttccttgaaacctctatgttcaatactataagaaatacaagtaaaaatgtaaaagaaaaatacaacagaaagtgcagagatggtagttgataccagattattttcagcaactaaagcctctatgttttgttgattaagctcttctgggcgaagtcgttcagaatcaccaattttagctgcaaataaagagtaaaagtgagcgtcattactttataataacaaatcccaagaatttgattgcaaaagtaagaaatcagtcaccaattttagctgcaataagcaaattagaggtaaaagtaaacgagattagcagatcccaagaatctgaattgataatgaagaaataatcatagattacaaagtcggttattttaggagaactgaaatcacaataccacaacaatcctcgtaatgaaaataacaaataaaatagaacaaaatttatcttaaaagataatacaaataaaaaagaattttaaagtgtgagattactggtataaaattatcact

SEQ ID NO: 45563 - DNA, 1447 bp, Cannabis sativa
tgaaactttaaaaagattattgacttattgttgttgtataacttttattagtctcaaatttattgtattttcttaagtgttttggaatcattgtatttatgtattgcacctgtgttgagtgatatgaaaatcttgaaatgatgaaagggaacgtaaacataatgaagaagaataaaggctcaaacaaaattgaaatgggatactgtacagttgaaattaaaagttatatttcacttaaaagttaaaaattcaaaatacaaaagtaataaaaagcaaaaataaatatcgtaaattggaaaaataaatagcaaaagaggctaaaaggggtaatttcccttaaataatttggaaacgtacgataaaaagtagttttttttttcaatgcaatattaggttttagttttaatatattcctacgtaaaaatacataaatcaacaaatatctgttaaaagtttgaatttatttggctatatatgtaaaataactttttataaaacagaaatatacacgtacgaaagatatttttataattaattctactataatactataggaccgaatcctaaattcctaatcctaatagagtgcacataattgaaccaatttaaatttaaattatacaaaattgtaatatctggaatcattaatttcattttaagttttttttatagatatatctatataaatacgttgcgagacatcaaatgcatcactattttgtaagttcataaactagcttgcataccctaatttggaaacttataaagctaaaattgttctttttttactaattcatcacccaaatctcactactttttcttttcaaaattaatcatttttacaagtgtgatccattatgaattctccacaagtaaccggtaatgcctattaccgtataaacccatatcattttgaaccaaatcaaatagaacaagaaccgcaaaatgcttgtttccttaccattaacttaaatatcaagttcattcttgttccaccatttgctatggaagatgaagcatttttattcaatgacaacacagaaaacccaactacttctatagaaaatgttgcgagaattttatacgacacattgatgaagagcaacaacactcaagcccaagttgccattcaagatatgtttgatgcagtctttcttccttctctctcttttcttactgatgaaatcattgattgcggtagaaaggtggtgaacaacaaagagtattataattcaaatgaaaaagtcggtgttgatgtttctattaaagttttagttgatgaactacctcaacttgatttggattacaatgatgatattgatgtcgatgatgactacgatatgaatgatgttcctattcgttttgtggcggcgagtgaagagtcaattgaaaaattagaaaaagtgcaggtaaaagataatcaaattttttgttcaatttgtttgga

SEQ ID NO: 45564 - DNA, 2381 bp, Cannabis sativa
attttctaaaccacttatacaaaaaagccatatttataaaataaaccctttgattaataacatctcttcaaaatgtcaacattgatatgttttattgacatttgacataaaacgtcactagtttatatatatttaatttaatagtatttaaaaaaaaatgtcattaaaatatataaataatcacatttgtaaaagtgtcacaaaatatgaaaatgactaacattttaaaatgtgagtaaaaataccaattttttaacaatataaaataatgccttaaattaatatttctaactgttttaaaaaaataatattactaaaattttcaaataaataaataaatattagtaaaaaattaaaaattttaagatgaaaaaatgccattttacagctacacggtttctcttctcagtcccggtagaaattttttctgtcaccgacggtcaaatccgaccccaccgtgagattcgccggcccctaaaacctaacacccataagctctctccttctccgagcacgacgacgcatctcagacggctattgttcagccattgacggtgcaagcggacacagatcaagcttccttcccctttctcggtcctctcattctctctctcgttctttcgatgggatctttctctgaatgggtaattctctctctgctttctctatttttttctctcttctctgtatatgagttaatattattattttggtggcttggctatgaccccttaaccaatgattttaatgtggtggtgttcacacctcgacattcttttaaagagggtcaccaaattgggagtttgagaaacaattcatggaaaggaatttcaatgtctaacctatttccagaatttgactctgctactgttctgttatactatctatgggcatgtccattaatgttaataacttcatttattggtctattagctatgaaaatagtaatacaactaatgatgaagatgaactggaattatttacagggataattgcttttgatataggtaaggagaaatttaatcttataaagttacctaaattttggagaggtaatgatggtggggacatagctaaaatttttgggtgggtgtctttctatgatatatgtggatgaagacacagtagttcacatatggattatgaaaaattatggtgactcttattcttggtacaaatattaattttttagtttatatgatcttatttcagataagcttggtaaattttttgagcaatgagattatgttagtttctttatttttgactggttattattgtagtaagacacaagtgtaagataagaggatgatatcctgcattggacttcactacttatgcagagagcgttttcaggataaatgagtgacaatttcgtatatgttttaaaaagtgagtttaacacttttggatctttcctcaaatgcgatccacccaacacgaaagaaatcctctcatctcgacaacacgatccatccaaaaattggttttgaagctcttaattatgtgtctgctcccatctcgtttttgtggatggatgaggatgccatagtttagatttctaaacccagtgtgagtctaggtaaagctcccatacatttatatttaattttcttttgattgtatatgtatgtttattgtataaacttttggtttgaatttgtttttgagttttgtgatataatttttttgatttactgtgcatatactattgttcattttatcaattcctgagttattttttgcagatgtattcatgatattgattattgttaatgaatttcctttgatcttgatggttctcatacttttgtttacgaacatctattttactttttgtgtacgattataattttcactgtacaagcattttggattattgtaaaacaaaataaagagatcttctttaaagaaataaaagaaattgattgtatggacatgaacttagttttactccatctttgtaaatgtattgatttaagtttttgttacgtgatattttgtatacataaattttattgtaatgttaatctgttattgatataaattaatgaaaagtatttataaaattttatcttatgataatgtctatatatttgcattacaaaattctattttctaattatatgtttttttattaaaaaattatttaataaaaaaattaaaatatatacaattttattatgaaattaatattaatttaattattttttagtaacatttttccaaatgatactaaaaagaatatagtgacatttgtacctatactcacatgggtatatcttacatttttcacaaatgttattaaagccattaatgttactaaaactacctaaaagtgacattttcaaatgttagaaaatctaataataataaaaaaa

SEQ ID NO: 45565 - DNA, 1343 bp, Cannabis sativa
tatatatatatatgaataaatgaatatatgctaaaaacacttaaaatcattattatttgactaaatgttagctaaaatgtcatatacagatgtgatcttttcagaaacatgacatatataacaattaatataatgagaattggagctaatagtaataaatttaaaatagagaccagacaaaggaaaaaaagtacatattttggaggttatttaattttaataatatagctagctataattaatttataatagttgtttttaattaagtgtagtaaacatgttatattgtttctttattaaaaaaataaccaaacaaacatgttatgatagattaagaataaaagacgatttatgcttcaagaaattaaaaataaataaaatctacaatatgtttggattgctactttagaattgaatttgaccataagttgatataattatttaatttaacatagttacctaattatataattaaagacttttaagattgcgcggcaagtatctttaaccatactctctaaatacacttttttataaaaataaaaagtgagtttaaaaaaaaaaaagttccaaccatgaaaaaaaattgctctttataataaaaaattgatagagatttctttaattttttgctaattttttttaatattataaattataaaatattattgaaataatcaaatataaagtaaagtaaagagcatggtaccattatgctcttatatatactctaattcttatagatgtaataagaatttgagagagtaattgtattttaattactaaatttttttattttaaatattacatattaatattataaattttatgaaattactaactatgtaagagaataaaataatataaatttatatagtttttaaataatgattgttgtgatctctcattcaataaaatatgcaagtatatactcttccaaattaagtccaaacaataatatgttagttaggtagcctttcatcaagaaaaaaatgtcacacaattcctctctttttctgtcaaaataccaaagcatagtacaatgaatatgtcaatattagattttttttatatatatataaaaaaaaaaagaaacacactcactaagatgctcaatatggcttaattagggtgtagatctttcttaaaaaaatattatttgcggtaaaatctctttatgttttaattttttacatttagtttatttatttatttttttcgcaaaactcctttttatttatttttttttataaatttaagttgtcagctgaatactacagttaaatactaactggattaaaactgtatttattttgaagttttactttcacggtgatatttta

SEQ ID NO: 45566 - DNA, 2546 bp, Cannabis sativa
aaaattctcaaaaaccaagaattttagttatataggtatactttatatagaatagatatgctgttatgttccaattgctttttgtagtgattttctatttttatctgttattaagatctaataatttcttatctcttcaactaattttattcttttctcttaatttcttgttgaaatgggtcttttgtgaatgaacctgcatcaatttgaaattcagttgatatattacacaacggtcagagcaacgccgaagaagcaaaattaatgacaggtaattcgctgctcttttcactacgtgtgacagatgtatgccctgagtgaatcgtgggatgctccacttctctggtcttcatctgttaagatcgaattaatttaaggtctcctaataataagtgacagaagtttattatgtgttgaagaatttcttattatgtgtactcttttgtaatattaatacagcaagtttatcaaaatgtcttcaccattttgttacagatgaaggaagagtaacaaggttatttgctgtcatgactcataatcacttttaacataggttaccacctcatatcatgcattgcctaacactcaagatatagcaaataacagctaatttatgacatagtaaagacaaaccttttgccttgaattcatgaattaattaatgagtacattgccttgcagttaatgtgtgcatgtgccaaatgaaccaatggaagaaggagaggcagaggaagatcaagcttcattattactcaaataatgaagttatgagcaaagccattaaaaggagtgactgcagctcgtggagagtgaaattgcaatgacgagaggtaattttaaagaagaatatacagtgattatgatgtttgtttaattggggcatcaagaaattagagaccacttttgctatgatgtacttaatttgttgccgtgactaagtatttcaagaaatagcagatcaatcaattgttttcaagaaataactttgctggttagtggttattgctgctttgtttatttgaagtttaaatttataatgcgtttcagaggttaagagaacttatccctaatattgaccaaaagagagataaggcatcattcttgttagaggtacacacatttttgtaatataatttcaattctttagcttgtacttatttgtggagtaatggggcatctgttaatcattctacaggttattgagtacattcagtatctacaagagaaagtacataaacacgaggggtctttccaaggatgggccaacgaaccagcaaagttgatgccttgggtaaatatttcttcctttcctagacaatgaatatactttctcataaaaaattaccattcgtcaaaaatactactttaagtaatatttatgtatatgctactgaaacaataaggtcgtgtctcaattacacaacaactcaaaatgagagattcaagatcaaaaatgaccaaggcctttccttctataaagttaggtagcctagttcaataactgaactaactaacttatcaaaaaaaaaaaaaacagaattaatgaaaggacattaactctacctcagcaatgtctcagcttatgaaaaaaaaattactctctttcttctttttcatttattcttgttaagattttctaattcatgtacctatctaacttacacaaggtcatttggatattgatttaaatgatgctagaagacagcaaacaactacagtaaggtcacaaggttttctttttttttttttaatgctaattgattacttataatctcatagttgttaaaatttaattcttacccgcacagaattttcaattgttgttttgattcttattgatgaaatatatgagatattatatatggaatatggtatagtcacatttttttcattgcaaatatatgagattattttatagtatgtattctgtatcttatgggttttatggtgaaaaaggtatctcccaaagcttgtggtcatactcgaggcaggaaagtggtgtcgagagaggaagcagtgatgcggataaaagcaggcattgatgctcgggaggagagtgggtctgacattgttattgttgcgcggactgattctcgtcaaggagagtgtctttagaagaatcactctggaggacaagggcttttgctgatgttggagcagatgttcttttcattgacgcactagcttcaaaagatgaaatgagagctttttgtgaaatttctcccctgattcataaactggtatagtttattttgctttgttagaggccaaatcacgggcaaccatatttttgttgaatgttaattattaaactttcataatgttcttttgctaatttccaataaagtaatttggtaattataaatttgactttagtcaaatatatgttaagacttaatagatttttgcaaaatgttaagccttagattttggtagatttttgaattatttgtattttgacatcaaagcttttaccgacaacatatcaaagcttttaccgacaacattgtcctcggtataaatgggttcgttaggccaaaatgaaa

SEQ ID NO: 45567 - DNA, 6993 bp, Cannabis sativa
  modified_base (75)..(80): a, c, t, g, unknown or other
gaaaactacatgtaaacgtaaatgtcttctaatcttctattgataataaatcagattatattgaaataggttttnnnnnnggcataaaatcccaacacaacaacctcttcttcattatcttgatcaaagcggacctcaccttgatccccaacttcgttcaccttgacattaccaacgtgcacagtgtgtcctcctcgtttgacccttcgatgtacagggcatggactaacgccattagctgagcaaattcttaatcgtcagggtcaatttgtcggtacttctgtttagtccgcgccactttcttcttcctaggcgagtgcctagatgaagggtaatgaacgacgttgactactatttctgcttccacgacatgcctctttgaaggctccggatcaccctcaagcaaagtgttcagaaagcctgctcagaccatgtacatccaaggaggcaagtattgcctaagtcctcgatttaattccaaaggaatcgcccgtacacatcaccaccaatacgatttgggtagtagtggtgttccacggaaggtttgaaaggctttaatttgtcacttgtcacttcccattcgttgaagttggacgttgaatttttgcttgacgatgaagaggctgcacgaagcctaggctgatcctcgtagagtaaccgaagaatttcgccgtccacatggttcttacctccctagaagtcgcccgggttcatctacaaaaggaaaggaaggtaagaactggacaacgccattgtttcttttaaaggaaaacaacttcaatactctgaccaggcatattttaaagatcgaaggaaggaaacttcgtcctaatgacgaggatctcaattcaagggtgttcaagaacttgggataagcctagaattcaccagaggcaccgcgcaaagcatatttgaagaaaattttcaagaaaaacatgggaatttacaagaattttacaattatagtttgtgcgcatatattcaacatcaaaatctaaattctaatttcagaaatgaagaaaattcaagttataaaccctaatttttgtaggagacacttctaaaagagaatgcacgagataaaaaagaaattgcataaaagtcgagaaacttactcactgtagagtttgttgagaagaaacttgagatggaatttattggtaacctgtgaatatttgaagctttgaagaaagtttgaatacttgggagagaaaataattttgctctgatattttcaagttttgaaacaggtaaaagagtataaatgagttctatgacaccttttataggtttctggaggggtgttttcataattcaacatttcaaaatttggattttttcccaaaaatatgtagaatcagtactcttggggagtacaaccgtcatcacatgttcctaggacgtgattctcacagatttgaaaagacatttttgttcacctacctcgcagttcgagcagtgtcacccaatttacttagcacgtgggccgatgaagtccacataccaaaaaaaagttttcatgcggacttgaggtaaatgttatcccaaaatctacacagggtgacataacacttatttgggtgaaacatggagcattttaagacctggacggagggaaccttcgttggtatgccatccagagaggattatccatcaaatactacttatttgaagaataaagtaaaagtaccacacatggtaaatagtacatccgaccaacgtcaatttcatggccattcgcgtatcccgtctagggtaaatgcgacagagaaagccttacatatattttcctcctttatttgtcaattaaatccccattttcatgagatttttacacgtaaataatgtaatttagaaaagtaactattattcctttttatcattatttcttctgggaaaccaaatgaatgtgattattccctattaatagtaaagctatttcactattcagggatccaaaattcaataatttaagagagttcttatgctgtaaaattataagctttcgagagagatcaaaaacttcttgtttctttcctcacaagttaatataagtaaaaggggagtaggctattaccaccatcacgagactgaaactctataacaaatttgtgttcttatttttaaattatattatttttaatcacttttattaactcagttagttaaaagtgaagtcaataattttatttatttatttttattaacattaaatcttcaaatatttataattttcaaaaaactcaataaaaaacatacaatatataacatcatataaaaaaattaagaatataactattcaacccacttcccgcaatcactttcattttataaattattagagttagtcccacattattactgtgtggaaataaattgtgaatgagctagtgctcctattacatattgattttgagatccccaaattctaacctatataattattttagtaaaaataaattatcatttttaattatgaaaaaaaatgatgagtagtcctcttaaaaagaaaaagtaaataaataaaggaaaaataaagtttaagaaatgatatgaaagcggagagaagtagcgaagagaggaatagaatagaaagagaagtggtgcgtatctggaagagtgtggaatcgaacaaaggtaaatgccagattcgatttcgtccataaattcatttcgggtgttgtaacggtgtcgttttgtgctgaggcaaggcgagagaatggaccctgattcgcccaattcggacaacttacggagctggggcaagttcgttgccacctgcttgatcggcggcgtcgtcgtcactttgggggccacggctttgcttgcctcctcttcctcaccctaccatggtgattctcagctacccctcggaattagcttccgcaggaggaagaaaaagcctgtgcgggtctacatggatggctgctttgacatgatgcactacggccattgcaatgcccttcgtcaagctcgtgccttaggcgatcaattagtcgtcggcgtagtcagcgatgccgaaatcattgtcaataaaggcccccctgttactcctctacatgaaaggtccgtccgccttcaacttcttttcattctcgtttaatttgtattttgtgtgctttatcatcttcgttaggcgggaagagaaggtgtatttggaatttggtatacagattagatttgcaatcgttgtgaaagaaaatatttttgttatttaggatgatcatggttaaggccgtgaagtgggtggatgaggttattccggatgcgccttatgccataaccgaagatttcatgaagaagctgttcgacgagtataatatagattatattattcatggagatgacccttgtgttcttcctgatggtactgatgcttatgctcttgctaaaaaggctggtcgatataagcagatcaaacgcactgaaggagtctctagtaccgacatcgttggtaaaatttgtttcctttccttatttgttacatttgacgtatgttttgatgattattttctatgtgtttgagatgaaatattttttcagcatttacgtttttcacattatgatatgatgatgttcccaaccatttaaaagatagaaaagaaaaggaaattgtgtgctcgtttcttcttggttttgatgtttattcttgatggggtttccctgaattatctgaaactctgcaaatagtttactgattctcagtaatgtgtggtcagttttctgaggggaaatgaatagggtattatgtttgctctatgattttcattttttttttggctacaactcttatttttgattttgagtcgcctgacaattttgattccttttcccgattgtctgattactaagtaaatttttaagtgatatttacagtaatttttattgcttttttttaacacttatttcattcattcataacgactctgagggtccataatacttatcatagtccatgtttagaaattatctatacttagtttgattaccggtactggagttatatattgactgttacagtcaatactatttgcaggttgtatcttgtagaaatttgaactggtattatttatttttattcattttctcccatcatgtgctcatgaagtggttgctatctccatgaaagggttgcagaagctaatgatgcttttatagtgataatgagcttgtctaggcatttatttgcatgtgatgcaaagcagtttagtctttgtgcggtttaggaattttattttatttccatttgttttgttttttaatcttatgttgagattcattggatgtgatgagctattgtattatcactcaaatggttttgctgtgattttgtctgcaggacgaatgcttctttgtgtaagagagagatccatcaatgagagccataaccattcctccctgcaaagacagttcagccatggtcacggccaaaaatttgatgacggtggatctggaagtggaactcgtgtatcccattttctacctacatctcgtagaattgtccagttctccaacgggaaggtatgcatttataaattgctcttgtactagtgttctagaaggaccttctgaatcttgattgaaatcaatgaggatagcaagaattcatgaaacgagatagaagagacttaacgatttccagtcagtaatttaataacttaattattttgttatgaaagtgggctaataaatcacatagaggcgctcctatgtactataataatgtatgtttctgattaaattgcaaatcagacataaagttggtgtgcaagcctaaattgtcaagcatcagtttgtgtctctagcaggatatagttctgcatcttcaacaagagaggtgtacacacacccattaaggcttccgaggcatatggtgatgcttaccttaagggttttgatgtagtgttgctccggcaccggtcccaatactattatgaagtaatttgttatttttcttaatgctgaagtattttgagaagaacattgcattcatttttctatacattattctggatagaacagtactggtgccggaccgacacacatccatgacatatacatataaataaataattatatagggataaatattcttgataagtatccttctatcctgtttagattgtatagaagtcgttcttcttgtagaaacatttgtattactttgtttctgacagattgaatatttatttattgattcaagtttttttcctaattgtgaaatttgaaacacagtttttctgtacaacacctaattgtaaactcatgctatgttgttgctgcaggggccaggacaggacgctcgcatagtttatatagatggtgcatttgatctttttcatgctggacatgtggaggtgatattaatttctttttttttttttttgaaataaagtgttcatagattagattaaattagccctggtcattgctaaaaaggctcataggtatggaagaaacatctaagcaaccattaggattgtgggtaaaaacccacttagccacgttatgggccataaagttacaagttcttacaatactagaaaataaacccacaaaagtggaagaaattcttttacaatgagtagaatagttctcaatctcccatctagagtcaactccattgagagagttgatcaccaccttagtattactttccacaattacaaacttgcaacccttttctgtcgctttctccaaagccaaaccacaagctgcggcctcgccacaaagagcatctaaaaagtctaatttcgctatagtcacctagaccacagcaccatgatgatctcgagcaacaactgcaatacacctgttatccatgcccactttaacatcagagttcaacttaatctagtcatgaggaggaggccattcattcaaaggaatcggagtaggagtaggagtgagagaagctctgtaatatgtataatagtaagaaatagagttaatatagtgtttcatgttattcaaatttttattatgtaccttatcgtattgagcccaccaaattgtgtctacaacaatggaggcataaagaaaaatctcatcaacacttattcctttgtctttaagctccagatgaatttggcccagtcgaacactcgaatttctgtttttgtaacggggaatatacccacagggatgaccgccacaggtgataagccaacttgcatcggatgaataggtgctccattgattcctcctcaatcccatagatggggcacaaggggtaatcaatgtggaatctcttggccaaaatagagtgaattttaagcacgttggagaggatactccaccaaaggatcttgtgacactcaagaattttgctattccaaagcctattctagatggagggagaaacctcgcaaagtggagcccttcgaagggcttagattaagcaggaaaatttgctagagaagcgaccactccgctcgttggtccaaacccaataatcactgccttggctggaaggtctcctccctgtcaaaatattagcaatggttccttggtcaaataggtaattcagcttctgtatatcctaatcaccattgtctgtcagaaggtcagccactttactcaacccaagagaaggcttaccattagatttcggatagaaatcttgtcgacgagtcactaaagaattttctcaaatattgctatcttttccattagtccactttacaggttcctttcctgagagtgtcattagctttcaccacatttttctagaaccagaagtccgagtctttatacttgcaattaaggaaatttttaccccgaagatacttagctttcaaaatcttgcaggaaagagattagctaccagtcaacaaattccatccccattttgccagaaatgcttgattcatttctctgattttgtggaagcccagttcgtcacgagatttaggaagggacagtttgtcccctaccttaagatgcaacccatgattccatttttttaaaccccatcagaaatctcgcaccatg

SEQ ID NO: 45568 - DNA, 1923 bp, Cannabis sativa
agccgagccaatttataaaccctgattcctactattgcctcgataacataaggaccttcccaatttagatcaaacactccaacagatgcatctcgtgtgtttgaaaatactcgtcttaacaccaaatctttgacattgaagagcctttacttagctcttttgttatagtatctcgtgattcgatgttgatatgctgcatttgtaacttgcgactcagtatgtctttcttcaagtaaatccaaggacaacttaaggagttcttggttttcttcttgattgtagaattctggtccgtgagtcgcaacattaacttctactggcagcattgcttccgagccaaatgccaacgagaatggaatgtgccctgttgctgttttttctgtcattctgtgagcttaaagtacttgtggtagttcatctacccatctcccttttgcagcgtctaatttcttcttaataatatcctttaatgttttattaacaacttctacttgtccatttccttgggttcttgaaactgacgagaagcctttaataattttattcctctcataaaactcagtgaataatttgccatcaaactgagttccattatcagatactattttaatgggtatcccaaacctgcaaattatgttcttaacaacaaaatcgagaacttctttgcatgttatggaaactagaggttcgacctctatccattttgtgaagaaatcaactgctactaccgcgtactttgctcctccttaccctatgggtagtgacccaatcaagtaaattccccgtattgcaaatgggtatggcgaggtcatcattcttaattttgttggtggtatgcgaggtatatgtgaaaatctctagcatttatcgcatctcttgacaaattcatgtgtatctttgtttattgttggccaataatatccttgacgaataattttccttgataaactttgccaacctgcatgatctccacaaaaaccttcgtgaattttcttgattatctcgtttgcttttgttggcaatacacaccgtaagagagtcatggaatagcccctcctatataactttccctcaactactgtatagcaaggtatagaatacaagagtttgcgtgccgcattcttgtctgtaggaagttctctgtttgagtagatgtttgagtattgttgtcatccatgtaggtgaggcatcaatcatctcaacttcttccttttcacatacacttgggtcgctcaaaacctccaccagtaccaggtttaagttatcaagttcattttgtgaggccaatttggccagtgcatcagcatttgagttgtgttctcttggaattagttcaatcttaaaataatcaaacttctccaagttcttctgaactttctccaaatatttttccttctttaaacctttcacctggtactcgcctggaatttgattcacaatcaattgtgagtcactatagcatataagatttttgacttttaatttttcggccattcttaaaccagccaacaaagcttcgtattcagcttcattgtttgaagtgtcaaattagaatcttaatgcgtagtgaaatttaaagttttctggcgagataattatcccttatgcacccgagccattttcatttgatgctccatccacatataatttccaagtttctgtatcgtggttgactaatggatcttcttcggagactatcccttattaggaaattaaccaaagcctaatctttgattgatattcttgggtaataagttatattgaattgccccagctcgattgaccattttatcaatctttctaaagcatcaggttttgataaaacttgtcttaattgttgatacgtcaagacttttatgaaatgtgcttggaaatagtgctgggttttatgccctaaataaaactctttacaatctgattagt

SEQ ID NO: 45569 - DNA, 1698 bp, Cannabis sativa
ttgatgaaaaaaactagtttcttgacgaagaaactaacttattgatgaaaaaatcaatttattaataaatgagctttggtgattgattttgattgcatgagaaactaagcaatttgaatcgcaggaaagagaaaaaaatcttgtgtcgctggagagcgtgatcctatttcgacaaattaattatcatttttaatatgtttatggcattttttatttaaatgctcatatacttttttttttgaaaagattaaatgctcatatacttagtttagttataaaatagcatatttagtaacattaactttatattaactttatatgttatatatatcaaaacttttatttattttctgaaatttttgtaaatttttgtaaatatcacttttaataaatattaccccattttaaaattgtaacatactattaatgtaatctttcattttacttctaaaatactagttgttattttagctatcactaaccctccctcctccccctccaagaaaagaaagatgttgagaagaagtatgaagctataacaaataactttttgcatattgcaattgagttgatgtcttgcagttttgttattttttttactggaacacagtattttttgtaatttgagattttaaaactttaaatcaatatttttgaaaaaaaaaatacttttgtaaaaatgtaaaaaaaaattaagaagaagaagaacagtaaaagtgtaaaaattaccaaaaaataagtatttatgtaaaatcttaatttttttggctacgggctcaatgctaggcccacaggcccattaatcccaaaatcttcactgctacagcttaagctcatccttatttgggcttgggctccatcatttttcacgatgtatagcctttaaatttttttttgaaaaagtaaatgaaagggatataaaacaagattttagatggtttagagtttagactattaattagtcctagtagtcagttggaatgagaacttgcaaagatccaagttgtcatggtcgtacaatccaaatccatactccataggcctatgttggagtataaagcaagtaaaagcccttcgtacgtaatctctctttgggcggtcacgtggagaccaaagaaggtatttcacctattttttcaagaaaaatggtgcataataatactataatcagaagaaggggttagagaacaaaggtgcaaacacataacctgcgtaaacttttctgtgtccaaaacaaaaattaactattgtagaaactacgctataagataaaaattaaaaagtaatgttatgtaaaattttcttccatattttaataaaaattaggtgacttttggttggtggtaatagaatggaaagaaaataatttttatctcatttttgtttgattgcattttaaactattggaatatcattccagtggaatgacttttccactattttgaaatataaagaaagaccattctaatgcaagatttgaaaaaaaaattaatttttttatacattttaaattttattttattcctattccaattctcattctcattcttactcttatatttttatttttttcgaccaaccgctacattagctcgccgttttgatatattttaatccgcaacaaaaaattgtgactattacatagaaaagaactatattcaaaagctaaatttgaaaatatataaatataaataaaaa

SEQ ID NO: 45570 - DNA, 2442 bp, Cannabis sativa
ggccggcacaatattatagtttttttcttacaaaaatacacatttttttgtcatttttttactcactttttttctacatttttacttaccaagctttacaaaatactgtgttaaaagtttcaaaattataaaaatactattttttttaattaaataaaaaaataactaaaaaagctaaaaaataactcaaaaacaacataaaaacaattataaaataacaaaaaaataactacaaagcaacgggaaaaaaaaaattgacctaatcgcaatatgtaaaacaatatcaactcctcaatatatttttatattatgaatttttcttttttacttagttttgacaacttaatttatctttttgtactaatatattttttttttttttatagaatttgctgttacaatttcatatttttaatttttttctctttcctttttgagttagtgatagttaaaatgatgatttgttttttaaaataaataaataattacattaataatagaagtaataaaatcttataatttcagaatagggtatataatataatggataatatataactaatatgtaaaaatatctactgtagcacattgtgtcaattaaaaaataaaaaatcttatcattgtattttaataaaacatgtcaaaaaaataaactaaatatatgtatctaaactacaaaacaacacatacaaaaaaaacaaaaaatatcaggaagaaactaaaaatgtacatcataaaaaaataactcaataaacaacgtaaaaaataataaaaccaatgcacatatataaaacaaaaaaattgtgtagaataaactaagaatatacccataaaaaatgcatataaactaaacaatatttaagcctgtcaatcatgttattgatgaggatctttttgagcttatcacccctttgttttcttcggatatgaatgagcacctcactttatgccccttcttgtgaagatattaggagagttatctggtctataggtcagttgagagctccaggcccggatgggatatgcctggccgtttttatcaagcacattgggagattgttgcgggtgatgtggttggtacggttactcaatttttccaaaccggtgagtttatcaagactctttatcaaacctctatcgtgctcatccccaaaaaggatggtgctaataagtttgacaattttaggcctgtcttgctttgcaattttgcctataaaatcattcaaaaaatttagccaaccatcttggcgagattctaccgtttcttatttctcctctgcaagatgcctttgtgcaaggtcgttggattgtcaaaaatggtacgatagctcaagaaaattatacactcatgtaataagaaagttacgagtgttagctttatcgggatgaagttagatatgtccaaggcttatgagtgattggaatggagttatttagatcatgtgttagaggcctttggatataatccaatgtttcgaaagtttgttgcttggtttgtgtcttttgtgactttttcggtctcgcttaatgatggatctctcaaacgatttactccttctcgaggattaagatagggtgatccactccctccctacttattcatcctgggtagtgaggttctatcttgagagttatttcaggcaaaaagttgaggggttaattcatggtttcaaagtttgttctcaaagtccgacaatctcccatttaatgtacacggatgatactttttgtagggccaatagtgaggaagtggaacgggctcaagattgcttagtcaagtactgtaagtggtctaaccaagctgttaatgtggccaaatctaccttcgtttttactaaaaatgtccagcctatggatgttgatgttatttctatccgtttggggtacatgggactcacttatgaggattgtaaccctcttcttttttctaaaagtagatctaatgatttccagtttgtggtgaatcgtgtcaaaaagcagctttaaggttggcggtgtaaatttctctcccaagatggtcgtataactttgttgagttcctttatctcgagtaccccgttgtacactatgtctacgttccttttgcctaagactatttgctcagtctttgataaactagctcgtaaattttggtgggttggctcaactgagaaaaataggtttcttgctttagcaaattgggactccgtttgtttgctgaaaaattgtcctagtttagggattaagaagttttttgatttgaacttggctctcatctctaaattagcgtggaagttggccagtggtgattctacccttttatgtaatgtgttccatactaaatattgtaaaaagggggacactttttggaactgctcgctaacaacttcggcctcccttttgacccaaggcatctttgctactcagggttttcttcgtacgagagttgcgagttggttggta

SEQ ID NO: 45571 - DNA, 1018 bp, Cannabis sativa
aaaagaccttaaatatatctttaagaggagtagcaccttcgtcccaactgcgagcgatttgcagtgttctcccatctattttattttatttaaagcacacgcacacactcacacattactacaatacctgtttctttaggatttcaaagaaggtcatcttttataacgtattttaaacatacggattgcgcactttaacccgaaccaaatttccaatcttgatgacatccaactgcatttcatcgtttagtatttttatagcctgcattgaaattatagatgaacatttaggtgaataccattgaaagtaagcctcacacatcaacatacataaaataaaaataaaattatagttataatacgaattcaagagagaaaatgtatggtaatctctacctgagcaagaggtacacttcttagtttaaatcaagcaatattagtttaacaaaaaataagtggatgaacgtttaattttagctatacaatctgtcaaaaagagaaacacactaacctcaatttctaagctctcaaattctgctaagatctcttcttcgtcttctgctgataattgctctcgcaaattgcattaagctcctgcagtgaaacaaatccaattataaactaagaacgttttgagaataatggtaaaaactgacaccatatatcagcaaaaatttataccataatattaaacgacaaaaatttaaaaaacaaaaaaacaaaaaaaaaatcgtaatggcaactaaggaaataaaaaacaaattgttgttatttgaactttccggagaccataggcatactcgtctacgaaacatcaaaaatttgatcctcaccaagcacaatgtcattgcatgaattaactctgattttctctggcttatcaattaattgattttcattcccaaccaacctttacttaagcttaatgaagcaaatttaataaagcaattgatactaacaaagattaataataaaaaagaaaactcaataaaaaagttaaaagcactgaaattttatc

SEQ ID NO: 45572 - DNA, 1403 bp, Cannabis sativa
ggaaaacaaaagggatttgagccaagttgtgcctgatttgggaaaagaagccatgattatgtcttcatctttgggtttgaagtttttttggaaggcaatcacattgggaaggagattggatgggaaccaacaattttggtataaagttataccttgttttttccaaccatccgatttaggcagctccgaaataaccaataagtctagtactgattctttgttgtcgttgttgttgtcgtcgtcgtcttcagtattttggccacaacttgtagaactgtttgaaaaatgttgtgatgcttcctttgacatgtttttagtgtcaccaataatcaatcccctagtaaatgcacctgtatattataacatttttgtattagaaatgtattttaacatagagagctatatatatggtctcaatcaactctcttattattttataatttaaacttaaccaaacaaataaatgcttaattataatttatattataatcaatgagactgtgttgtcacttcatatatctagatataacaaaagatatatgtttatgaagaaatatgcctgtgctggaaaaatatagttacaaagcaaaataacgaaattaatactaattaaatgaaacaatgaattcgaaccctataataatatattttcttggagaaaaagattaaagtaaaacctagatctttgttaattatgtacttttcttcttttgattcggggatgaaatgtataatatatatatatatatatatataaggttattcctctcacttaaatatagaaacgtacagctagctatgtatacagtataatggttcaaattaatatatatgtgtcaaaactaatacaccaagtgtctacatgcatgcatgtcgctacgtacgtgtgttctaatgtttttttttttcatatgaatcatcaatcatgtatgtgtattgctcaaaattttatatacaacctaatagcattttatgagtaaagagaatctaaatatctataaaattttacaaggtgtcaaacaattctttctacttctagttatatttttttaaccatatacatgtaatttttctttttactatgtttttcattttagcaattacaatctctatatttgtattagaattctgctataaaacattgtttcttgtgcgccatatttcatagacgaggaataacagcaagtaaaattgatttcttcaccttgcttaattttgccctccttatccaccttacaattctttctaaggtacgtagtagcagctattccaagcattccaaagagaaagaacactcaaaaaataagtgagctaccgtctcatcttcaatgttgcatagaaagcatttagaattctcaaattctttatactgcaacttattttttgttttgattctattaagc

SEQ ID NO: 45573 - DNA, 1625 bp, Cannabis sativa
ggcttcaatctttctcaagagttcttgaatgatatggaagcaaccgccgacagggtgggcggcgcgtgcatcggactggaatatgattgttcgcatggcttgttctctggcggcaggggaatcgagtttcttgatgattttggtaatgttactgacaccgaagagcttgtgtgcgttgaggaattgtctatggctgtcgtgagggaaataaggagccaatatacaatcaggggcacactttctacgctggtatttacaggcggcgcaagcttggccgttaccgtttcctttggacgaagaagacgaggttgaagacgatgagtttgatgaagtgggtaatgtggttgttgtttgagggttcaggctcattgttctctgagtatgtatatatatatatataatataatataatcgattataattgaaatgaaattatgagcaaagatttcatagcgtttccggtgccgtggccgtggctattgggggtgttattattattattattattatttaatttctgtttgaatattaaaataataaatagtaatattatgaatgaagaagctgttttttctgaataggtttgttaatttctttgtagggatattgaaggaaggaaaggagaagtaatgaattgagaggtaaagatcttaacagattctgttttgaaatcctattttgggtactcactcactttgaataatgattaagaataagattatatgcaatggatggcgtgacatggaaattaaaaaatatatattattattattattattttgtttaaaagttttttttcttatttggaaacggaaaaatttgcacatgcaaaaaaattaataagggttaataaatcaacaaaattaatggatcttgatcatattcatacctacggattactaaattgataaataaagaaaattaattatttttttttgttcttcattgaatcactattaattccaagattatatcctttaactttgtaactgaacaacatattgaaggcttcataaatattaaagcccaacacaattttgttttggattttttttttctttttttgtatttataaattaactcaaattgtaaattttaaaaaaaaaattaaacaaatagtatataagataagatctctttttgtttttaccatagtcaaatcaaaaaaaaaataataataataatcaactcttttttattttttttatatatacttttgatttagtattttactataggcaagcacatgtacatgaataattacatataaaacagaaaaatcaatttaaaaggaaaaaaaatcacaagtatttctttcctattcaataatttacgaaaaagtattatagtgcatgtttatttaaaagggatcttgtttagtaaactttgtaacaagaaaaattagcggaacataaattaagaaaaaaaaaatctactttttttttttataaagaatgagattttctttcctaatttatttatttttaatttttaaaaatgaaaagttttctaagataagttttttgcttaccaaaaattataatgtgcaatatttttagcactagaatttatattcttattttaacaaatattattactttatagtgtgatattaactaaatatt

SEQ ID NO: 45574 - DNA, 1043 bp, Cannabis sativa
taccattttaaagtgaatcataggcctagttgtagtacaaggaggaaaagaagaaagaagtcaagtgataactcataaactcatactgtattttgctaatttaacgaatttgtcacctcaaaacaggtttaattcttttctatatacaaaagttaaaagacttgaacaccagattgataacagtttcactataattgggaacaaaacttacgttgttctccaaacaatttaaaataacaaaaacaaacaaaagaatagaagaggacgaaaacccatgggagtaatagcattttatgtcatcaaaacatttacattgatagacacaaattttgaaactaaaacacacatgattagtaattaattgccaaaaagagtagaaaagtagttgtgtaaacatacaattgcaggtgaccgggttcgaagtagctgaagggaaggaccaatttgtgttcctgaactcgggtgaagtgaataagttcttgatgggttggttcgcgggtccagagtcgccaaggccgtgaagccacaaaatgaagcttcgagccatggaatctggtcttctaaatgacgggttaggtcggaaaactagtgtgaacaataaagtgccacttagggttaatgtaagaagagtaattggcttagttaatagcacaagcttcatcttcgatcgtcttcatccatggaggtttgtgccgtacaatttggtcaagtttccgaaaagacttcaatacccctcatttcttctgattacgacgtcgttaggtttgttcagcattcagatataggcccagctcaccttttgcagcccaattaaaaagttccattgaactctaaaaagaagtccttcctttttttttcttctgaaaaatctacaaagaagtttgagagattagaaaatcacactttatacaacaaaaaatatttgtactttattggtagagatatttgtaacacctaagtatctaatgcaacaaaacatggacgaaatatactttcactaaacaattaacttgggttcttaaaatgttcacaagtaaatgaca

SEQ ID NO: 45575 - DNA, 1286 bp, Cannabis sativa
atgaggttgggtggactccaacccaattacacggataataatataaataaggctaatactataagagcattgctattaaacgtggctttctcgatatatcgcgttgcaattagctagtgaaatccgatacttagttggaccaatagtaatattgacacataaaaggatactaagcatcactagtccttttagtatttcagaaatgcttaaacatatttccattctctttggctattgatgcatgatcacatcgtattttttatgagcttttttttcattttttttctctttcattttttttttatatttttttagatttttattaatttcaaggtgtgtttttttttatttattttaatcttctatctataatgaaataaaatagaggaatgctaattacaacatcctatcacaaccttttaattaatcttcatgcccaaaattacatgtcaaaatatattttttatagcgatgttcgttataattacaatatcatccatataaatttttaaaaaatttaaataatttattttatactactggaaacagagttcttgatcatattccagttgaccacgcgtgttcaaaaaatttaaaacctattaaaaaatttaaaacctatttttagcactgtaaatttttagcactgtaaattattcaaaaaaaaaaaaaaattattgggatgattttgtgagtataactaacactatacgaaaaattttaaaaaatatttcaacatatattttcaggtacaaaaattaactaagatattgtaataaaatgatgagcggagcactctacatcataataaatataacacaagttttatgtccactactggaggaatcaagattctctgttaaaaaatagtgtcctataatgtactatgaaattttattgtgtttctttttggttctttttgttttaatacaatcaatttaattaattttagatttgttttatttatttatttgttttagttattagtttttaattttagggaaaaataaaaattaaaaaggttaggactaaatttggagcgtccacgtgtcacgttacttacattaacggattgtgtatgaacggacaaataactttgtcgaccttgggtattttcaccgtcaattttcgaggttggggactaatctgcatcaacctcaagtttttaggaacttttgccataattatccctatttactataaactaatggtgtgtttggtaacacttttttaattagtttttatttttaaaattaaaaaagtgaatttttttttaaaaaaattat

SEQ ID NO: 45576 - DNA, 2496 bp, Cannabis sativa
ctaagaaatatatttagagagaatagttggagatactataaagcatggatctgaactaattcatctattaaacaaataacaaaaatatgatattattctaccttaaggttgttcatagataccgttaaactgcagtttaaaatcggactgcgacaatctaaactactgtagatcgttatcggcgaacccgtttttggttatctgattaatccgaactgttcaccacttaatagtttcgttgtggttcgtaataaatagttaatggttaaaccgtaccagaccatttgtaataaataataaataagtaatgaatatatattattatatgtatgcgataaaagaaatttttcattaaatacccaattttgctattattacccaattggattaaatgggtttagaggactaaagatttaacttttttgtgtgttaaattttttattgcatcaagtttagatttttatgttatattttaattttatattactatttatatagatttattacttatcatactaaatatatactttgaaaaaaaaaaggtgaaaaatttagtaaaaatagtataattactttaaaaaaaaatgaataattataaactctgcttaaactatgattttgaatcaaaccaaactatttttagtggtttggtttggtttccaatattcaaaaaactgttatagtggtttgatcaaaaaatataaaaaatcagatcaaactaatctgacaccttacctaaacccaataatacacccctcaactcaacttcccccattctatctcctctccctctcattctctacattctctctcttataaaagaccacctaaactcaccacaacgcaccgctcaccaccgcgcacatctcattttcttgctctaagtttaggtaacttccaaactatacatatataatttatttttaacagatctatacatttgtgtttgtatttccttaatttattacccaaaaattagattttaaatttttcgcattttctctttttgcgatatttagcaatgtatttacaataatagaccaaatctgaagttatggatgaagtttagcgatgattagcgatgttggcgtatttagcgatgtatttacgatatgagactaaaactgcaaagcacatcactaaacaacactaatcatcgtaaaaacgtgtgatttagtgatgtgttttgtagtttttagtctcatatcgcaaatacatcacaaaaatcatcgctaaatacgcaaacatttactattttagtcaaacattactattcatcgctaaacttcatccctaatcttaaatttggtttatcattacaaatacatcgctaaatatcgcaaaaaactcaaaaaccataaaaaaagaaaaaaaagcacaaaaaattcaaaatttaatttttggtcaaattaaagccaaaaatttaaaacttagagattgtttggcttcataatttaaaagttgttttcaaatttaaaaacgaaaaatagcttttgaaaactaatagagtacgtttagactaaatttttaaaaaacaattttctgaaaactaactaaaaattagaaaatagaaaatatcaaaatgttattttctattttcgaaaacaatttttgtttttttttttttttgtctaacatattcttttttacattttcgatcacatactcggacctagatctggactcgaactacgaaacccaaactcgaacccctaacccatgtccaaggtcaggtcagtcccagggccatgtctagggtcgagtggtcccaagaccaagtccaggtctaaatccaagtctagggtccagagtgggctaagttcatgtcgtagtatgatatagaatattaaaaaaaaaattagtaaaaaaatttaaaaataattttaaaaaacataaaccaaataccattacatttttaaaataataaaaaactaatctttattctcatttttaaaaacacacttctaaaagctcaaatccgagaacaacacagtcaaacaaccttttactcattcagaggaaaaagataaagatttctcagcaaaagagacagttttgaaattattattgggcacaaatggtgaaatgcttcgaaatttagttatcaaagaagctgttcgaaataaagaagcctttgttttgtgcacagttgttgatacatataatttgatgcaagatttgatgaaagttttaatttttaatgggaatggagactcatctggacctgaaagcatgttagagctcagaaatcaagtatctagaatatggtgacttcttcaaccctctgaaagtttcgatccagcttctttgcagcccctgttacaagtgctgcaacaaacggggggatgtagtctgagcgggcgtgtgattggcgggattactcaatgtctggctactcggttactacttcaacaagtgcttcgagtgccaccaacttcatctgcctcctctaccacttaaatttcatcttatagtttcaattcaagcataatcata

SEQ ID NO: 45577 - DNA, 1027 bp, Cannabis sativa
gaatttcttatgtgtgattgaattagtgggaagaagaatgagaaagagaaagggtttgggtgtgaatagaggaaaagagtgtgagatttcggggggcgatgtagaactgaagatcgcgagaatgattctgaaagaaattttgagagttgaagttggtttttgttgtcctgatttggttatggtgttgagtgatgagatgtacttatctatgggaactcatctaagaaatttctttgggaataaattgagtgagttgagtttgaaggtgaatgatttgaagattcaagctgatgaacaagattttgacatgatcaaagaagaaaagagattcaaaattgctaaggaaacaatcattgatggggttcataacatatggaacaaatttcaccttattaactcatcatcatcatcataacaatttgttctttttttagtgtttttttattaataaaatgttgagttttatgtttcataaattctttttaagaaatagagcttgtttgatcaattttacgaacttcgattgtttctctaacacattaaatggagtttggttgggatgaatcaaaatataagaataaaaatgtaattcggaattgaaatagaaatgaaatggaataaaatttaaaatgcataaaaaaatagattaaaaattattaattctttttcaaatcttgcattaaaatgtttgatgagacaacactccatgctccaattacatccattgcaacatgatgaatgattttttactgcttctttctttctaggaaggtttttctttgtggcaagaaagaaaaacaagttatttatgttatgttttagaatatgaatcatttagtaaacgatgtgtcgtttatttcatcatttataatcattcagtaaacgacatgtcgtttatttaagcataagaatccttatttatgaattgtaccaataacataataatcttcaatgaaaaggcatatatatatacaatacaaagttattagtctgttacaagtctttacaaattttatttgatattcaa

SEQ ID NO: 45578 - DNA, 841 bp, Cannabis sativa
atatgaaggaaaagaaaaacataccaaaaatgtgttgttatgtggaagaggggagtaggtagggaaatatagatggttcatttatttttataaccaagtcaattcaaatgcttcaacttcaattattcttgttcactttagtattgttactactaatgtggacttcacttttgcacctttttttttttccaaaggaaactttaattaagatgggaattagttaacaaaataaattagagaaaaacttgtgtataaatattaattaatttagtttgagatttaactacaaagatatgaaaatcattgttgtgaagggaagtataaattctctgacattgaaataaagtttgtatcccaaagaaaattccaacaaatctctttttatatcataaaaaagagaaagggaagaacattcttaacttgtttgatgtaaaagttgatacaatgacttttctttttattttttgtttttctatttaagtgattagagaaaaagtgaaatgaatattgatgaaagtgagaagaaaatagactgtaataaaaaaatatttgaaaataatttatttttatttgtaaattttttattttttttttaaatattaaatgaaaaaagttttttcaaacatgtttttaaaaatatttttacttttctgaataaaaaataaaagattatttaaataagtgttgccaaggaattgttatctaattaattattaaaattaagctgagagactttaatttttcttttattaaaatctcattttttaaataaatatttttaaaattgacatttagtcacatgtttgaaccatgtttgtggcgtgttaaatttttccgaatt

SEQ ID NO: 45579 - DNA, 2756 bp, Cannabis sativa
gttaagagagttgagaagaaaagactgagattttgacttacttgccaccctttaggaatgaggtatccaccatactctatatcctttagcgcttttctgaaactaccaaagataggaggaatcatcctcagagtttccattgcaactctccatgtgtacttcatcttggaaaggtcttcccatgtgagaaacatccctgcttccttggttcttgctatattttcttgttctgaaaccataaactaacaaccatcagccagaacttaatatgatgacaaagtttaaaaacaacctttctgactcaagctgctacagtagagaaccttatgcttattggaaaggaaactcacatgttaatcgccacaaattgtgacatatggaggacattggggccacttggattttccaaagaggacataggaggtatgtggggtggcaatttggatattcaaaatgaggaattcaaagaattctcttgttttgtgctttgaacaattagtctttcagatatcaaatgagagagagtttgtttaccttgaagaacactttcgtaaacagcaggctcgttggatagaaactgcaacataaaagtaataagaatagatgaagtgtcatgtcctgctgtcataactagcagaacattgtgaaccatttcttcttctgttatcatttcttcattgttgtcatttcggatactaagcaagcaagtgatgaggtcttgatgtggagaagcacctttctgttccaaatccaccctcttttcgcttatgagctgtctcaacatgttttgagccagtttgctcgcttgcaggctgcgtctgtatcgtgtgaagggaaagtttagaggaactgaccacattccacccatcatttgtcgaaacaaacccacaagtttgtctctttgagaccctcgttgtattccgaaaagaagagagcttattatgttgaaagttagggtcttcatcaatggtaggacctatattaccacagcaggttcatttattgatccatgtactctttgtttaaaaagcaagcatactgagtagtgattcatcttactaacaaaacctttacaacaaacgtatcatgattcatatagctcaagtcttaatcatgtttgtataacaagaacagaaaataataattataacatacagttacttgctgttttccttgccaatgcatctcaaggtgccacctgatttcttcttccaactttcccacacaatctttaagtgactctggcctcaaaaacaacataagtgcgtttctaactcgcttgtgatcatctcccgtcagctctaaaagactccggtcaccaagaaccatctgtatggacttgacttgttggttagtgatgatgctgcaactgctagtgaatatgaacttgtttgcagcaggtccgtggagaaaaactgttggatttccgaagaggcttagttttgaaataggaccatacttttttattcttttctccagccatttttctgctgtgtttgctctcattgctcttagtaaacttaggctttggcctattatgggtagtcctagtgaaccaggaggaagtttttttgctgatctttttctctttataaggattaggaagattgggatgagaagcatgagagttgtgaataaaatactcatgatgtatatgaaagagagagagagggctttgagagagtgaaatgaaactaggtaggtgtttatagaaaatgtttttgttgttatttggaagggaatatgataatcttagcctgaaaattccttttcagtatctgttggagaaaaaacaaagctatctccttgaaagacataaacgtcataaggaaatagacatggctattttattatgaaaaaaaaaagatctagtattttttgacaaaactataaaaacttcaagtaaattggtattaattgatcacgtctttgttaaatctaatgtaagttggcatttctacagtattgtttaaagtatgtttactgcatttcgatatctctattatatatagtctaaaagatgagctggttttgctttttctaattaaaaaaagaaaacaatgaagtttgtgtaattaatcttactgatgcagattccgcccaattttgtctttggctttattgatcaattggaaatgtcatatgcatgaagcctaagattttgcattgacattatcatttcatgacaaaaaatgaaaacactgcgtacaccttatttaattaaaagatgctttctctttctcaagtgctgtttttggtgatgctgacaattgaagagaacaaatttacacacaaaacctatacattctattgacattattatttcatgacaaacactaaagacaaaacccatataggattcatttaattaaagaagtctctttcttgagtgttttcttttttttggtgatactaacaattgaagagaactaatttgcacacaaaaactataagagattgtttgagttttcagtttttaaaattgtatttttaaaagtgagaaaataatttaaaaatttaatgatgtttggataatattttgtaaaaactatatttaatttttttttttttaccaagaaaaacctacttcagtattctacaccataccacgacatgaacccaaccccaccttagattggatctggacccgaactgagattcaggacacagactctgttaagaccgcttagctttaatttgtaaattagcagataattagaatttaattatggaaattatttattaattttgaatta

SEQ ID NO: 45580 - DNA, 3421 bp, Cannabis sativa
aaaaaaaaaaaaaaaagtacaacaaacaaagtgtgtggttcatataacttgtctattaaagtttcttttgcttgacaagtatatagaacctaataattaataattaattagccttgttaaactaaattttgtggctcttttcttgaaaacgtaaagattatggtctgtattagacatgtttatattttgctcttgatataaattgtctaatattttggtacattttatgcgtaaatatcgatatttatgagtaaatatgtttccatataagaattacttacaaaaaaaaactatacatatataatcaatacacaatatattgtaatagaatttgaatatatttaaggaacataaatattaatagtaaaaccactttaataatatgtactattatctctttgaaaggtaaatggaattttaattaatgagtaaattggatatagactatgtacatattgctcatcgagtacaataaataataatagactaatcaagtcgtttaaaatatatatatataaaaaaacatcctataacatcataataaactaaaagatccattgaagcatcaaaagaatgtgaatataatgctaaatttttttgtaaaagaatatgtgatggatcacacctatcaataataattcgtcaagattttctaataaaaattgggacgagacacctcaattattaaaactacaataaaggagaataacaaaagtagagttgaacatccgatctaatccaatattattctcctgagtcgatccaatctaattagcactactacaaatatcaaaattcgcgacggtcttaaaaataatttttttcggagaccgtcactaaaaaaattaactatttaaagtcgtcgaaaaaaatttagtattcccgacgatttaaaattgtagtaaataaaataagcgacgttttttaataaaataagattttttaatggacccttatacccaacgggaggtggtggtggtctgagtctgggtctgggtctggattcgggtctcgggtcctggtccagagtcctgaatctaggtccgggtcaaagttcgggtctaggtctcgggtctgggtctggattcggggtcatgggtctcgagtccaggtttgggttcgagaccgagttcaagttcggggtccgggtccaggtcccgagttctaagttcgggtttggattcgggtctgggtctacatatcgggtcctgagtccgggtctgcgtcccaagtggctctcgagtcctaggtcagggtccgagtacgtatgggtcacggtttgggtttgggtcttggttttggtctaggtccgagtcccaagtctgggctagggtctgggtccgggtcctgggtccggtcaaggaccgggtcgagaattagggttgacctggatcctttgtgaatattataatacaagctaatacaaataatttgttatgtattaaataataatacaacttacattgtattaaaagtttaagtcataataattaatacaatacattatgttatctaaatatggtattatttattatttaatataatacgactcggcgtaccaaaccaagccttaatatatactttatttcataaacgaaaatgaattatcaaaaaaaattagtatcaaacattaaattactaatttcttatattttgaaccgatgaatgtagattcgtggtcaacgaatcatattatgtatcatcaaacaaagaatattaataaatcagtgctacctttccaatattatgtatactaaaaagtttattattttttaaattcaaatataagtaagaaaaaatcttaatttgaagaatataattagatcacagacaatacatataagacgtacaatagaatctattatatcttttttaaagcaatagaatcttatatcttgatcaagtgaaaaaaaaaaaaatcacctcgagaaaaagagaggggaagaagaatagttgattatttagctttaatttaaaagacttagttaaaagagtgacctatgcgccgaaagtctttttttttttttttattatatccatagatctttaacatcatcatccttttttagactaaattaatctttagcctttttttattgaaattcaaatgtttttttgagcttttctatcacaataacattgctaccaaacccatcagtaaatgtactcaattattcaaacaatatgcagagtgtgttgttgttctgacaaaagtggccacaaaaaataaactagtttggtgcctacataatataaatctactttcttatcattattttcttgaaatacttactttattcctcttacattttacatatgattgaaaaattctcacacatgtgaatgaaatagaaaaatgcttcataactaattccactcaaatatatatagttgcatattaaatgatgaactataagtctatatacagtctctattaatgtataaactataaagtgatattgtgaaattgggatgtaattgtgctacctaattataatgagtggtgttatttttttttaatatatatacatatatagattactagtacttgatgatattcatatacatacatatatttagcttaaaataaacaggacctaccgacagtgaaattaaatggagaaagaggtttagagatttaaaaatgaaattaaattaaacatttaggtgttcaatgcaaaacgacagtaactagttaacttacaattagggatcttggatagtgattagattcttttttctaactaaagtaaaattctagaaggctgttctttagctgtaaatagtaaatacgggtatgttgtactagtctgatttaattttttcgtgttttttaaaatactggcatgttgtgttgggccataaaaaatatggatcggatcgtgtcgtgtaataattttataaggtaggctcgacacgactagttcgataatttcgtgtcatgctccgactcatttttcttaaatagaccaacatgttttctaattagggtcaaatttatgctctatattttttacatttttattacaattgatgagctaaatactaaaatttgtgtattttataatataaattacttttttttaataattacacacaatcatataaaaataatgataattattacaagttgaatattactatcattttaattgataaataaatatttatcattgttattattatcaaattattgagtattttaatgtgtcatactttcgagttaatctatttgtgcttaaatgtcgtgctttcgggtttgtcgtgtcgtatcgtacctaagtctatattttttgtatcgtgtcatatctaagcctatatttttttctattgtgtcgtgcttaagcacatattttttttatggggtaaataccattttggaccctctgttttgcaaaagttaccaattagaccctgtgtt

SEQ ID NO: 45581 - DNA, 1785 bp, Cannabis sativa
ctagagattaagtaatcaaattaaaataccataaaattttatgaggatcagacactactacaattttaccttttagtgacactatttagtgacttgagcttttgtgcgcgtcactaaagagataggagtgatttttagtgacatgcacaattagactctaaatattttgtgttagtctcctaaaatgtgtgtcattaaaatatgaagtgtcactaaagaataaaataaaaaaatctctaatttttgttaaatgaaaaatactgacttatagagacgtgccacgcgcgactaggtaagcatgtactgacatgcttagtgtgtcactaaaagtgtcttcagtgacgcgcgaggcatgtcaatatatgctttttgagtccctccttgtgtgactctgaatattctaatacaatttgtataatttaaataattatactcatcttttttatatatattaaatatagggtatgaggtacattaaaaaaaggatcataatatttttattaaataaataagataaatcctttccaaaaaattaaataatataataaaccctaaagctaaacaaccgtacatctcttttcccacaccccctttttgcgcctcctatcactctctctgaaatctcaatattttatttgctaagtctcaaccttaggacgagaagatctgaagaacattggccataatcggtttttctcgatgccggtagtcaaacaaaggcctagaacggcctctccgatactcaaagcaccatttgatgtcgttggcctaagtggaccactatcaggcgttattggtctaaccagataccaatttgactccggcaaaggtgctatctttcatgactagcagcctcaatgaagcacggatctaagattttttccacccaaacattcaggtaccaccctcatattcatcttctaagtttttttcttcatcgtatcatattgtttttcctattttctattttttttttctttgtatcttaattgatattatagtgttctctctccctcttttgtcaaaactatcttgtctatagatttaggttttggtttagctctcaaaaaagtattatgttttgtggttttgatttgggatttaataatacctaaagatctaacaattaactgagaagaataatattgaaccaatagatttttggattttttttttaactattccaaatattatgtctctgtatatacttttattagtgttagttgaatcatttattgaattagtgacccctgtacaaagcattgagattgatttttttttttttttaatatttgaatcattggccactaatgtatattttctgatgagtgattcatttaaaagaaaaaaattgtatagtatcatgctttatagtttattgcttttgctaaaaaaaattaaaaaaaaaatcatattaattaattttaatgatttttatgtatcttattattttcagagcaagtatgaatacgaacaaaagaaaaaagggacttcgtttctagttttaccggaatccaagtctcttttcgatggtaatcaaatgtgatttctctcaaatgatcaaaaactcttcaaagttcctttattttttagaaattgaaatgggtatctcttgaatgatatgtaattttagttattatataatttatagttatggatttattgatattacttatgtttcttattaatgaactaatatctgtaagatttattagttttgttgatgtaagtattttgaatattttttttagcaatagatatgagatctattggaattattataat

SEQ ID NO: 45582 - DNA, 2011 bp, Cannabis sativa
tctctctctctctctctccatggacacagctcactggcctcctcaggtaattaaactaaaggagctttaaattttcctattagttgcatcaaatatcatctaattctctattttaatttataaaaaaaaaaaccaaataaagttagttttctctttttaaaattttcttgtttggtttttagcttcaaaaggtttccactttatgtttttctcatcacaaaaagatatagagatgatgttattgttgctcaactcatgctcaaccctccactaattctactatctgaattttttgtttgttattgttgtttatattgtctttcaaagaaaaaagatatatagatctttcttcttcaaaatatatagtttgaaagttgaaagtactatatatcactttttcttttatttttttaaccaaatcacacacacccagaaaaaagagttgagtaattagttgttgtttttctatataaattcttatgatgataatgattattattaatataaagtcatgacttttttccttttttattttatatataatttttcagggtattggagtggttaataataataataataataataataataataaacccagaatggaattaggttcaaacaacaacaacagctcgaatgatattattattaagagtaatagtaataataatatgttaggatcatcagatcagagaagaaatattacaaggccacaaaaagatcaagctgtgaattgtccaaggtgcaattcaaccaacacaaaattctgttactacaacaattacagcttaactcaaccaagatacttttgcaaaacttgtagaaggtattggactgaaggtggttctttgagaaatgttccagtgggtggaggttcacgcaagaacaaaagatcctcatcatcatcatcaccatcaccattaacaacatcatcaccaccttcttcttcttcttctttacaaacaaaaaaacttcatcatcatcatcatcatcatgatttattaccattaccatttactttccctaatataattactcatcaacaacaacaacaacaacaacaacaacaaaaccccaaaaataaccaaggtcaagatcttaacctcactttcccacctcaaccgtccgatcatcatcatcatcatcatcatcatgatataaacacgctctcaagatttgtccacgtggatcaaaaccctaatattgacacaacaacaacgacgacaacaacaacaacaacaacgagttcatcagtacaacaacaactctcggctatggagcttttgaagactggtatggcttcaagaggattaatgagctccttcatggccatgccaccggctaataattctgatcataatcataataatgggttttctttgggaggtgagttcaaacctaataataataataataataataattcttcatctcttggttttgatctggatcacgggtacgggcaagaacatcatcaaaccgggttcgggtcgggtcaagatcatatcaatggtgctaggcttttgtttccaaacaatcatcaagatatgaagcaagtttcagcaactacaagtggtagaggagaaagagataataatcaagatcatagtaataataataattctaatggatattggaatggaatgttaggtggtggatcttggtgaaaacgacaacgttttgatggtaactaaatattattgctttgaatcttctctccttctagctcttgaaaaaagaaaaaaactaacaacttaggatacattatgggttctttgtacttttgtttttaatattttgtatttgtttttttttttagtgaattaatgtgtatgtttttgaagctttatttttaggttagcttcaagggtatgtatgtgtgagtgtgtgtggtactttctcaaattttatgatgatgatgatatatagtttttaatttatttatttatttggtttgatattaataatttttgacttaattactgggatctgtgaatggaaattatag

SEQ ID NO: 45583 - DNA, 2177 bp, Cannabis sativa
tgtaagcaaacaataatacattgatgggtttttggctgaatctaaggttttctctgttttaagaggtatttttcctttctttaatttactatcacctttatatttctgggattccattttctgaattgggtatgcttttgaattgctagtttcaataaagacagtttcttttcaatcatttatagtctttggttccttatcaaatgagttttgggtttaaaagtgtgttcatataagcttatgtttcttagaaaccccaatttatctattgcttttgctccattggtatgctaatgttgctttagattaaacttggctaatttattttttttgtatcaaatgttcaatttttttattatcttatcactgtgaattattgttattatctttgattgctaaaaaatggaatagtgtcattaataattttctttttgaaaattttatcaactctaggagataccgtggattgcatagagcctaggaagaagatgtgggaacaacttgtattgtagtattgtagatgaggatggttacgagttcaaaactcattgttcaacagtcatctaatccgttggaaagaatataaatttgtatattctatatacagagactaaaggaaggtaaatatcatattattttttatagacttaaaccaatcatttgaattgagatggattgtggtatagtacagtcgacaattatgtgttttatcaggatgattgcttttttttttcttgctggaattaaggaactgattgtatgctctgaaggatccattggtgattttgtaatcagggagagaaatctcctcttgaaatagatagattttgatcatcattgcctcgacataattcaaaataaaataggaaccacaaagaaaatcaaactacttagtacttactaaaatgttggttagcagcgaaaccaactgagttagttatctggattattgcttgatttgttgaataatgagttgatttggattctatatttattgatagacttttacatacttcaacaacaaccaaagcttgacatacacatataatttgatcattttttacggtacaattgatttgattgtcattttctactagacaaaatcttcattctattttttattttttttctcttatatgataaatatggcaagttgttttccattgactttgtcttggtgattctttttttcttttttaaagaaataatatgacttgtccgggtaaaatcatgtttcctgtgcactcacatatgaaacacatatcaactattaaaatcttaaaccttttgacttttttggagctgccttggctttagccatcttactcttacccttccgagcctttacttgaagacctttttttgctaccacatatattcttgtttaggctttttaagaattgccttgttgtatagtttatcaatcatcctattcttcgatatgttggcaatttctgtctgctttgatatggcattggccatcttgtgcacttctggagcttcttcattacaacatgtttcttccgagctttggcctctgccactttatttgctggctgagcatcgatttctttgaactgagcttatttcgaggcatattcacctcttctttggttacatgcttcatgtgtggtcaacacttgttgtcaagtatctcagtctttgcacaacactttgtataagttttgttttgtggtgtttttccgtttttcctgtgatttgggtgttttataaatttttgttcttgagtttcttgtttgaatacttttaacttgtgatcttgaatatattaaatgatgtttatgagtttttagctagagattttactgttttaacatttgagtattaaacttgttggaagttgctctacaaattgagaattaataaacaattctgttatgaccattggaggctttactaaaaccattggtccattaactatataaagtgcctcaactatcatttgaagtgaggagaatacaaggttccaagaaccaccagagagagtcatagtgagaatagagagataaaagaaaggttccaaaaacattgatggttttttggctgaatctaaggttttttctatttctcaatttaagacctatgttgtaatttcagcggaaataaccttgaggattcaatcataaaatctgcaatgaactcacaactttgacagt

SEQ ID NO: 45584 - DNA, 1371 bp, Cannabis sativa
tagcacctacaaattactattaatttagccaataattaaatagatacaactaaataaataaactttctattttattagtctaatattataattattatatgatataattaaaggaaggttttcattaagtaatatgtttatataatttaattaattaccagataaaacaggttgaatattattgatgaggatgcaagtggcaaggacaggagtaagctttttgacaagagtttcaacgtctgagtcgtctgaaaataaggttggatattcattgcgtgaggcgatcaatataattgacaaaaccaaaccaatgatgaaggagcttatcactgccaccactagtgagaattttgctgttcttgggtgagctgcccctaactcgtttgatactctcacactggataaattaatatggtcatcaaaataagaaacacaaaatgagaaattataagtaaggaagaaggaaagacataaaataagatgagaggagcgataattacaacctcttattacaatcttttagtcaacttttacgtccgaaatcacatgccgaaagattttttttcaattttttttcatagcggcaatagttatagttacagtatcatccttgtaaattttaaaaaaattccgaatagtttacagtatcgaaaacagagttcttgatgatattctagtttatcacgcgcgttcaaaaaacttcaaacgtattttcagcactgtaaactattcaaaaatttataaggatggttttgaaaacataacgaacatcccctttaaaaaaattcaaaataaatattccgacatatattttcggacatagcagaaagttaattaacggcagtaagatagatatttaacatcatcaactaattgcatacatcattgcaattttgtcatttgtgtagtactactacgtacagtactagtactactcatgatcaatgatcataataccttattgctgcatttatgcccaaagctaccatcactgtccaccccaatatgttcatgctgcaaattattttagtatagttagttcctttatcaattatagatagatttataaatttaatgtataaactcttaatatttttatgatggcctatactcttaaataatcttaattaagtggagaaaatgttagggactagtggtgtcttttagcatttttttttaataagcaacgttattgggcagcaatagtgcctaatattcttctagacgtgtcgtcttacgagtgattagcgatataatctataaaaattattatattaaattatatataattcgatatttaattataccaatagcgatattgacacgtatagccttcagcatttttccatattaatttgtatagctaatatt

SEQ ID NO: 45585 - DNA, 1031 bp, Cannabis sativa
  modified_base (568)..(572): a, c, t, g, unknown or other
atatagagagagagagagagacaccattttttcttgtgatgtacttttatggaatgtatttcgtgatgtacggcagccgttagatagaaggagttatttaatctaagggctgaaattaatttagaggtaattaaaattaaaaatggtaacatactctgagatctatctaataatgtactctgagatcaatttactgtattgagaaatacattccctcaaagtttataaaatcgtttccctctatattcattattctagttttatgagagttatacatgtgggagagtttagtgtgtaaggacctctcccgtgttggaagttggaccatttcataagtgtgatctgggtacgtcgacgcgtacatggaacactcacgatatttacaagtttttttatttttttatattatttattttttttatcgggtgtctagatatttgacatcctgtgttttatctaaatacaagtttggtaccttgtatttttaataatgtttatttggtatcctgtattttaaaattatacttatttagttaaatttttttgataaaatttaatcaatactatnnnnngtctaaaattttatgaattctaaattttaatttatttatttgattatatataactgaaaattatttggttaaattaataaaattgtattaactaaattttatttaaagtactaaatatgtacaatttaaaaatatgtgctatcaattaagtaccaaatatgtttttcataaaagtactcagtatattcccttttttatccaacaatatctttatttgtacgattttttttttgtttttttttctaataatgattgatttgatacgtggacaaatataaacctcttcttttgatgcacgattttggtatgttcaattgctacgtcatgttaaaatcaatgatatttaattcgttttctacctaacaataattcggttgtgtttagtttgatataatgtaattgtaggaataaaaatagtaagggaatggaataaaaattataggaaaattctacaatgca

SEQ ID NO: 45586 - DNA, 1726 bp, Cannabis sativa
aaaaaaagctagagcttcagcttgtaacactgaaaaactacttgagacatcacaaaacaaaaatcaaaatataaattgtatcaagtaatactaaattcaatataataatatgtcaataaaacactaaactttcaaatcttatatcaagtaaaataaaaactaataaaaaacttaaaaaaaaaattaaaaaaaaaacaaaaaaacttatcattgaattaaggcttggtaattaaatataaatgttagtatatgtacttttcgtacataatttttaattctttaaaaaggtaaatactattttagactatgtattttgtaaaagttattaattagactatatattttgttaaatgataaaataaatcttatattttttaaaattgtacaaataagactctggactattttttttatcaaaataaaactcaataattgataatctaatttagagatgttgtgacaaaattaattatattttttgtatctattcatgttagaaattatcttagttagtcatattaaaaaataaaattattaaaaattaagcacatagtcctatttttactattttaaaaaatatataatctattttatcatttaacaaaaatgaaaattcaattaataatttttgcaaaatacaatctaaaatagtatttaccctatttaaaattataaactttataaacactatgtaacatccaacttattaattaattattttaacttactacttttatggttgagtgagcctaatctagtaacttaaactatgtatatttatagagtttttataatgagacaaaaaaacgtgaagatttatcccaaagcaggtgaaataaaaaacaattaatataaggttgatcatagaattaatatatttaatttattattattgtttttttcatcaacatttattatattaaaaatatcaaggagaaaagatcacataaaatggacagctcagcaacgacggttgatcacacacaccacgcgtatgtcacgtgcctgccaacgtctgacacattatgctcagacatttgcttcgtgtctccccatgtaattttatttatttttaataaagaaatagaaaattctaaaatagttctaccaatcaatattaacacataagaaggtacaaaacaatattaatgtattttaacatttctctaaaatgttttcatatctgaaaaataattttagtctaattttttttaatgatcgtccatattatgtaaaaaaatttttaaaaaaaattaatatgctgaaattaagattgaaactgtttatgttataattataatgttatctcttaaaattttgaataatttacagtaccgaaaataatttatcacgcatgtttaaaaatttttaaacctattttcgatattataaactattcgaaaattttcaaaattttacaaaaataatattataaggaacaccagtatgaaaaaataataaaaaaaattattctaccatatattttcagacctataaattaactataaggttgtgataaaaggttagtaacactcctcatatatatacttattttttcatatatcataatatatgcgtatagtatagttacacatatattggtgtctagtatttttgtgagttataatagtgctataattagtataacttaatatcgggttctacttattttaatttaataaaaattgctaaccaattatataacgacactttattgtggtgttag

SEQ ID NO: 45587 - DNA, 2276 bp, Cannabis sativa
cttatgtgtttaatttcatggttttagagaattcatatttagggtgttaatgaaacatacatgttagtaatctagatcttggtaaaataaattccaacaaaggacaagtgcataaatgtagcaattgtggtgtagtagatcatattgcaagaaaatgtctaaaaatagttcctcaggttcattttatctattttttttttatttgcgcacatgttagttttatgatgttatttagttactaattaagataaaatttggtgatttgtaggtcgatgttcaaccaaaaaaaggaggaccaccatttaacaacccaactgatcagaccaaaaagaggaaagagagattgaggaagcaaagaccgagggagaaaaccgagggagtggaagatgcaaatatataacaatttagtggagatgataaaatattttgattaactaaattgttagatattttgtatgtaaatcggaactaattggagtcgacatccttttgattaatttaacttttccaacttttgatgcaactagaaattaaattggagatgttatcctttttattaactgaatttttcatacctttggtaaatgatttaattaagtagtagatgtttatgacaattgtgtattgtagtgacgtagtgactaagtggatcattatatagtatttagacaatataacaattgtattttgtaaaggattttaatgcatttggtatgtagctaaagattattaattatcaatttcatcactgaagtcaacgatacaacttattatcaatttttttaactttgaattttattaaatattttgtaggatttacactccacaaaacttgttatgaacaaaatctgttgtgataagacttaacaatttaatatattcataacctattctaattgatatgaactaatcttaataaagcttattgtaaaaatactccataaccatttaatgtattcataaattattcattaccatacaacttacaactgattttataatatttttcacatttttaaagaaaaaaataaaacaagtagaaccatcattaaaataacattttgaacacaaaaattacaataaaagaccaaagcatacaattgcctttctttccttaatcacaaaggtagtttcatttttatctccaaaattgtcatttctgtgatggttgttgcattggctcctaaaaattgtagagggaaaaccaccatgactatcgccataactacaagatggagatctttattgctggcaagaacaatacccactcataaaggctagcccactcaaacctccatgcaaggccgtccttaagattttggaggccatgttctaatcttataaattgggcccctaataaaattagtgatattgattaattacaattttcactatgtaatttctgatatcaaacagaatattcactattattacggtaattacatcactaaccaaatttacatttattagcagctatctatagaccatatttaaagcattaatttctcattcacacattaacctaaaatagctatttattatatattaaatataatttttccaatacattcaaaatgatacaattaattcttatttttcttaaagaaaaaattattggaagtttaaaaatatgtatatgatatagcatgttaatcttccttttctttactctcataaataattttattttttaatttttgatgaaaaacataaattgaaaatatatatgatgaaattttttaactatttggaatttgacacataaatctaagaaatatataatgtgtatttaattgaattaattattcctatgaactatgaattattttttaaataaaataatgagtttttacaaaaataaaaataaacaataaaagtttatcaaaaaaaagaaaaagaaaaaaataatactaaaatagtgagaatatttctaatagaaagatgtgtgtgcatgtgtataaatgaatttttatggaatagttttttattaaaaaattgaaattattttttaagaattgtgtataattgtacagagaagtataataaatatgggcccttaattttttgggccctgtgctactgctctgcttgcacatcatttgagctgactgtgcctccataaatacaactcacccactcaaactgtgaggtttagaacacttagggccagtttggcacagctgtgctgtggcaaaaagcagctgtagctgtgctgtgataaaaagcagctgtagctgtgctgtgagaaaaagctgctgagtgtttggtaaatataa

SEQ ID NO: 45588 - DNA, 1989 bp, Cannabis sativa
tatacaagatggtagaacaccaattggttgtaagtgggtgtataagatcaaactcaatccagatggcactatcaacaagttcaaagcaagactttactgaaaccttcagtccaactgtcgaaccagtgaccattagaattgttctttctttggccttagtaaaaggatggtgcatttaacaattggatgtaagaaatgctttattatatgggtatttaaaggaagaagtgtacatgacacaacctgttaattttgagctacctgatgctcctcaccttgtgtgcaaactcaataaggctcattatggcctcaaataggcaccaaggagaaattacaacaattcttactatcctttggttttatttcatccaaatctgaccacggtctttttattcagcacacatctaagttcatgattctcattctggtatatgttgatgatatccatcacatgtagtgactttgaacaagtttttttctgtgataaaggcttcagactccagaatctctctcaaaaatcttggtcatctccactatttccttggtattgaggtccacaaacatgaggaaggcttgcatctggctcaaggaaaatacatcaaagacttactttgttgagctcaaatacaagatgcataacctgctctaactcttatgactagtggcttaaaattgtctattttttagggtgaccttattgaaaatccacaagagtacatgtctatagttggtgctattcaatatttggccattaatagacctgagatttcatttggtgtgaacaaggtctatcaattcatggcaaatcctcttcatgcacactggaatattttcaagaggatcttgagatatcttaatggtactttatctcatggtttactccttaagaaacctatagaacttgatgtcacaaccttctgtgatacggattgggcaagtgatcctgatgataggaggtcaacctcaactttttcaattttatttgcttctaatcttgtagcatggcagtgcaaaaggcaacacactgtctctcaatcaagcacaataaatgaataccgaagtttagctcaagttgtctcagaaatcacttggatgcattctctgtttacaaaatttcatattcaacatcctagatcacctgttatatggtctgataatttgagtacccctcttaactgcatatcttgtcttacatgcccacagtaaatacattgaattggacttgtattttgttcgtgaaaaattgtcagagaaactagttcgaattcaacaagatgatagttttaccaaagatatttctagtacaaggtttgctcagttcaagatcaaacttagtactggaaccagcaccaattctaaatttaaggggagtgtgaagaaagttagttgttaagttgttagagctggttgtggttgttagaattcggttccatttgattgagctatgtatataaactgttttgtactcatttgttaactgaataagaccattctttctagtcttcatcttcttcaacctttcacctctttctatgtctttctctatctttgttcctctattttgatccatgctcttcttattctgtaacaatggtgagacatgttggacatcacaacacgtgaaaatataattacaccaagacttgaacactttttactagaccacaatacaccatatacttactcttttattttatcactagacacccttactacacacttgcgtataactcacactttatctttaaacacttattaagaactcacacacttatgtatagataacttagcacacacactaagacttcacttatttttgtgcaaccacatccatgagaccaagggtctatctatagtgcatcatggttggttgatgaagccacttcaatttgttaaagaattctagcattgaacttgacccaaaaactagaaatatctagtgactattatttctaaatatttctaaaaaaattattttctagtcatttc

SEQ ID NO: 45589 - DNA, 793 bp, Cannabis sativa
ttatgaattactaaaagatatttatatctgtttctttgttcagctgattgagtgtccatccatctatgagatgttggcaaatcctgattttaattggaaaaggcaaccattaattcaagtttggcgaaagcaatcgaaggacgatgaaacatcggttgaattggaatcctttgaccctgttgagagtataaatttgtttgaagatgctttgaggaagaatgaggtataccacttcattctaaggtccaatatagcttagacattcacattaacattttccattgatactgttttttcccttataaccaatggactgagtttcaatgtgtgcatttattaaaagttagagctcgtaacacattattttccacatgcagctagactttgatggtaaaaaaatagctctacctttcaactatgctattctcaaatgggcctccaatactcgccaagttctaaacaatgctaaactacctgatggggtcagcttctatagcatctatgggacatcatttgaaacaccttttgatgtttggtaagtacaaaatctattttatgaaggaacaaaagaacacaataaagaaaagcagtcaaggatctcaaggttcagttttcattttgcaagtcatatggattaatcctaaatgatatgtaaagccttgctgtaatattaaaattatattaaagtaaacaggagaactttttcagaggctggttttttttttttttctgccaaacttgcaattctgtgcatctgaattctgtatacttaaaatgtagctacggttcaaag

SEQ ID NO: 45590 - DNA, 1646 bp, Cannabis sativa
ccaataatgaataaatgatcttgttgttgtagttggttggatcatcaatgtggaaaggaaaaaaaataaagaagtggaatatatacatttatataactttaaatatatatatatatttatatagttatattattaataataatttttattattttattttaaaaaatagtgtcaaatgtgttaaacgagtcgtgtcgtatttgaccttcgtgtcaagtaatgtcgacatgttttggaccattatttaattttctcgaccctaacctgtaatgccctaacccctagggacgtgtgtttttttttgataatttagtttataataataaactaacgatttaattaacattttttgattaaagtaaaattttattaaaattcactttaaactaaaagggttacatcgacaaatattttgtttcgtggaatttctattacaaaagttttacaaaaaattcagtacaaagtttatatctatatactatacagatatagtgccaaaaacatcttctgacaagccggtatcgcaaaccagataggtcgatatggacattttttcgagaagatcaccgacgacttatgactgacctaacttctctttctttttacttacaccacagaacacccataaatcataaagctcatcaagaaaagtaaatacaataattacacgttactttcacaaactattccaaataatcacaaataattagcacaaaaatcacatatacatatagattcagtactacacaagtatttgactaacaaagacaaattatacacattacatcattaagtaaccattactgttgtttcctagtaaggcaaccgtaacaagtccaaccagacattcaatgtcactatcgttacctgatgaggtaatcgataagtaagaaacataataaaggtctcaatttacaatcatgactctttttcgtaaaccagtaactatcgtatcttataattgataataatcgagtcaccaacgataataatcgtatcttatctcatttaaattcaaaacctgaagtattggtattgacaaatagcatgaaaataccctaaatattgacaaaatacaaaaacgatattttaaaaaaaatccctaaaaaatgatagattatttttgtaaaaacagtataaactgtttttttgggttactgctaggaaaaatggcagaccgttttataaaaaaatagtacaggaaacaaacacttcgcattttatacttctcaaacctttccaaactcaacaaatttcaatcaaacttcccaaaacaatctaaaaacatcaatataataaatatcttagctcaaacaactcaaaaacatcacctatcaaaatccaccattaaagcttaagcaagctagaagctctcaacaaaacctgtaccaaaacacctaaaacaactctatacagcactaatttaaatatataatctaacctataacaatttgtaaagaagaaaaacacttaaaacacacaaaatcccaaacttaaactcttacaatacaaagagaaactaagaataaaggttaccttgattatctcttcaacaattttaccttaatctaccctacaaaaaatcttacttttagtcacaacaaaacttgtgagtaaaagtgaaaaagttgttactaattataaat

SEQ ID NO: 45591 - DNA, 1526 bp, Cannabis sativa
tgtttatcttctcatggctatgtacatcccctgattcacatttgcggtgaaaaaatttaggcattacttcttgcccttcacaaggtgaaggtgtctgaagagcaaaaaaagtctgccatgagttcccatgaaccgctcgtatcttttgctttgagctgtggaatgtactcttcgcctgcggtaagccaaatagtacctttatacttcttactttggactttttatcattctttttccaatgaatgaaactatatcatcatgtggttgttgatttcaaatgtataggtaaggatctacacagcaagaaatgtaagggaagagcttgaagaagcacaacgagatttcattcgagcttcagttggaattagtagcaaagggagattgttagtcccaaaaatgttgcactgctttgccaaaggatttgttgatgataccaatctggctgtatggatatctcactatctcccaccccatcaggctgcatttgttgagcaatgcatatcgcagaggcgccaaagtcttcttggttctcgcaactgtggcattcttccctttgattcacgcttccgatatctattcctgcctgacaaagttcctctgtaatgattatctgacttaatttgttataccacatgccatatcttgtgttgttccaacaagttgggacgatagaaatcgagcttcaacgatttttggtcttttgccttgtagaccagatgtataaatccctaaaagaaagggtcttgtacatttttgttgatgcataactggttttgtaactaatgatgtttactgactgactggtttttattcaagctttgtgaaataagagtgttctaaatactacacagaattttattaatgttgtcaatattttattatacataaattggtaagtactaatttaactgttattcttacactaactcatataatataaaatttatattatccttagaaaatgattctagcgatttctttaaatcattacctctaggtacaaaagaaattatgaattggtagtaggagaaatagatagaaactaatattaaatatttttttgttgtgttgatttgaaattgggttaactgacagcggagttttattaattgctgataatcactacgtgtaaatagaggttcgatctccttaggataatgatctattccttttttaattgtattgattctaataccttgcagattacaggttaaaactttgtaatttctagctatgactctcttcaatattatagtactgagaattgagtgttacaaatttagaatttatgagactttgtgaagaaaatagactatgtgtctagtgagtgagggggcgtgagagagaggagctatggggcgtgtgagacttagagttcagttctgttttcatgtggtctaatgccctttatatagaaggttgcactgccgctttatgtacaatcactgccgagctccatctcactgttcctccaacttcgcttttcctttacctacacaaggtagcaaactgatgagtcaacagac

SEQ ID NO: 45592 - DNA, 2080 bp, Cannabis sativa
atttcacacgcttatataataaaagtaacatggtacattattctgtttgaatttattgtggagagttaaaattttttgaatttctcaaaaaaattataaaatatcttcaataattacattatatactatcatataaaaaaaattaaaactaaaactatttaaatgtgaaagatgagaaatgtatttatttatataatccctaagtatagttggattgatatggattaaacatatatcattacaaatataaatggataatttgtaatggtcattgtttaaaaaatgaataatttgtttcaaatatatataaataatatttttactgaaatcataaagaaatatttaccccacaaaagtacattttaatatttaaaaaaattaaacttaaaataatttttaaagatcagtcttaatatttttttaatttttttttctcacattgttttatgttaattttaatatttatttgtataatttttttaaaatcatgtataatttttttattttttttaaaaaaaatttatataatactttattttaattttttgtcatcattatttttatttgatggatatatttttgagattttttcatttttaagaaaatctacatagcaactaataaagttattcaaatccatatagtaattaccgaaacaataaaaaaaaattgaaaaaataatatacagagtaatttttctatttttcaaagaatataaattaaaaaaaattattaaaataagtgcacttataaatttttgtggtaccaaagaaataataaatatatataattgaaggtttattaatttatttatttaaaagtttatggaagggccgtgaaaaagcgtacgatagcaacataaaaatttatgaaaaataaaaaaggtaaccgctagtggtggtgtgttgccttctcaggtacgcagagtgcgcagtacgcattccctactttttcacatccacacgaaagtaatcagtgaataattaatttcacattttagagattctttaattaatcactcacttttaattttattattattattattattctcactattaataattattataacaataaatcattttgttcattaaaaaacaaaacagtattaataatagtatcataacattaacagcacaatatctccccacgtcttcaataattattattatttttttttattaaaatacaataatatattatcatcatggccatcatatttttattttggggacaaaattctcatcataattttaatctttattaaattgaatttgttactatcgtttctttaattattaaacatatataaaaggcaatatatttcattaaataaatttaaggttggatattctttttcttttctatatataaatttaataatttgaaaacataaaattcgactattaaattaagttattttaatgagaatctataacatagttagttgaaatatgggtttaccataatttaacaactacaaaaaaaaaatgtttttattttcatccactctctttaatatactttttaaaataaataaactattttataaatgaaattatataaaaataatgtttttatttatttatttatgtttttttttgctgaatgtacttcgagttgtgcacgtaaattacatatttaattatttatttcataaaaagacatatttattgattttataaaataaatatatatattgacacgtgtatggttgatggtgtggttgagcttattagttaaaagattaagatggtattggggtcttatcaaattctttgttaatggtcaaatataacccttaatcttatgctaagtatcagtaagattggatcaaaagagaggataaaaatgtcattttcagtgaacttagttcatctaattaagtggtagcgtgtgtatggttgagaaaaaatatatattaatctcttaattactaattaatcattaattaaattaatgtcaatttcggatggattagatgtgtgattttatacatatagaacaacttcaagcacacaaataatgtatatatttaaagctcatcattttctttcacaccaatgattattattta

SEQ ID NO: 45593 - DNA, 1755 bp, Cannabis sativa
atacacatcgatggatgtccaaggcgattataccattggcttacattgcttttattcaaagacaaagaaacagtagtagcaacagctgctgtagtaagggtgtcttggtgaagcaagaacaattttccatacttttcaactgtcccaatcaccacattcagagtaggatcctgaataacataataattttgatgaaacaagactgaattaagggtattaagcatgtaatctgttatagaaaaaagattaagcttaaaccatggtacataaagtacattctgcagtatgatttcgaatttatcttgacagtaccaatgttttggacaggaagatgttgtccatttggcaaggagacatattttggaaatggtatgttagaaaaagatgaaaaaaaattgagattgcaacacatgtggtgggtagcaccactatccacaactcaagtagttgaggttaaggttttacctgccaaatttgatgcaataggtgtcattgcagcaggttctgcatttgttgtgttgctgagttgttggcttaacagggatattaagtgttggcattgagatgagagatcaacatgaacagagctactctcaatgtcgggtttctgggtgtttgtagctgcaacattggtcttggctttgcccttttcttgcttctatttgtccctataaccaggaggaaatccatggaggaaatagcatcccacaatttgagtaagatggtccaggtttcttggctcttaggggattggtggaactagatgtagcagccaaaggaattaaatcaaaggttcccagcaatctttgacgttcttcttgaacgatcattggaaacactcgggacagattggggataggttcgttaagcaagatttgagcacgaatcgaagcataggattcatataaaccatttaagaattgaagcacttgattttggttgtaataatttaagaaaactttcattgcaccacaagtgcaagtggttataggttgaaattcttttaactcatcccatagggatttcatctttgtgaaataggtagaaacaaaacaatcaccctactgaagccgagtgagctgtgtttgtaattgaaatattcgagggccattgccttcattaaaacgctcagcaagatcgttccacatttcagtagctaaatcaaagtacattatacttcgtgcgatctcagatgaaactgaattaatcaaccaagacattaccatattattgcaccttaaccaagagttgagattggtattaccaggttcaggacgagggagagatccgttaatgaacgcgatcttgttcttggctgtcaatgccattgtaattcctcgtttccatggctaatagttggttccgttgaggatagtagtcacaagaaccagatcaggatggtcgctagtgctgaggaagaacgggctggaatgatcatcaacaaccgatcgagagtggagtttctgggttgagttgtcttcaacaatggtggaattgtcgtgaaaaccttgatttgcattccgagattgaactcgtattggaggaattcgacgagggactgctaaggaaggaggagtagggatagggtcggagttgacctctgctgcgggattatcgatcatcgatggtgtagtgccatcctaggatcgagtagttggcctggccatggaagctgtgggtcggagttcttctgataccatatgagaaagaatagagagaaaacagaggaataatcagagcatttggtattttatt

SEQ ID NO: 45594 - DNA, 1834 bp, Cannabis sativa
aaaattatatcccaattatcttttctcttgaagtactggtgattgtagtcaatgtttaatccaaaaatagtaatagtagcaagatatgtggtcctatattttgacgtggaaaagaatatgaaaatttggacaatacttattatgaaaagaaggaaaaaagaaaaagtagaatatatatacatatagatattaacttacatccacaatgcaatcgtggaagtacaaccgaagtagggatgcagccatcctggtgtcatttctgatagcttgccaaacattaaacctaacaatcattggcaaccttggacacgattgatcatagaatcgataatctagctgcccttcaccaaaagagaacattagaacaaagagcaagaaaaaatacaaaggaatgaaggtgaagttacaatgggactttgtgataagtagtagtcattttttttttttttaattaatatttgtaattctcttgattgatgcaagagtgtttatgttgcattctgatgattttcaactagagtctttgatgtcaatttatacatataggaaaaaacagtggagaaaaatgaaagtgatgaatccattggttaatatgcccacagtggccatgtcattatggcggccaactatagaactaaactatttatttaagtcaaagtgatgatggtcacaggatgcattatctcttttggactatatacagtgattgcatgatgaagtgcttccattataatctgactacaaattaatatataatatgtataattttaaataattgacattatcacaataatacaggagtagagtacttttattattattttgtttagaacatctttaatgggcataacatgatcaatttcaaggacaatatgcatgctctgtatgatagcttatcgttggggacaacctctgatgtcgtacctgatcactaggtttgtagtctaacacgtgtaggcagagccttcacgggctaggggtgtagcttagtttatatatcgtatctcaaaatgccttgaccctttagggaaaacccatattctttgcgggagctgatggctttggttcttggaacggagggagactttggctcacggacactcttcgtgttgctagcagtcagggaactccctatcacggagactcttcccacaaagttagcgcctttatcttcccagagcatcaattaaggaagtttttcagctattaacttcttagccttgcttgatcaaagtacatgtgtcatgattatgaaaacgcgaataacaataatgtattgataaccaataaagaattcattatttttgttattgaattttgagataagctcctgtgtttttattcattatctggtttaaaattttaattctaatttcaagtttgatttgtgattcttatgagttgttattaatcataacaattagcttggtgtccaaattttgtaactttataaatatgtgttttctgtgtgagataggtaagtgtgtgagaagtagagtgatttgtgaaatgagaagtgagcatgagtttgttgagtagtgagagtgaggaagaaaaaaaatgtgtattgggattcgggtggagagattaagatagtgaatgtgtaattttgaagtgaaatatatctctctttgtgggtttgatagttttaccagaccgagtaaattgctttgcttcgtttctttattattttgacgtgcttaaaatttattattttttccaacaattttattgttttaatcgttgctggtttgagtacactattcatccctgttttatctgtaattattatttgtgaattgattaatcatgtcattactaattatttgttgat

SEQ ID NO: 45595 - DNA, 2633 bp, Cannabis sativa
tcatcaaaacaaggagatctaaaagtttgagttaacacaatagtggtatctcaagctttccctgagatctgtcaagtcttgggtgacacttaaacgagcattctatgaccaattctccctatcaaggcacagactaattgagcccaataatttggcttcatcaatcagcaagaagaaaaaccactaaaggattacatacaatgattcttaaaggaaactattcaaataagaacactcagtcaagaagccacggtcatggcaatagttgttggactaacaattttaagtcaaccctggagagacttaaaactcaagtcaatagacattgttcaagagcttttagacggatttgaagatttcatcaagattaaagaagccatcaagaaggtcggtagagttgctcaaatagaagcaaccgaatacactatttatgtgataataggaagcaattttatgtgacttttatatatgggtttaacaatgaagaagaaaaaaagcctctttgaaaggatttgtgtatactgaatggaaaggatccttggttgtacttggggactttaatgatatcctttcaaatgaagaaagaatagcggctagagtaaagttcacctcatcaaaagatttccccaattgtttggcaacatgtcaattggaggatgtaaaatatggtgaaaattttttcacttggtccaacaagcaacaaggaaaagatagaatatacttgaaaattaataggattcttgcaaatcaagcatggattgatgagtttcctaatgccgaagccctattgttgaatgaaagaactattgatcactcgcctggtttactaaaggtatatcctcatcttccttgtggaaaaaaaccattcaaatattttagaatgtggaatattcatccggaatattctaatgtggtttctaattactggaagcagaatattagaggaactcttatgtatcaagttgtctctaaacttaaaggtctcaaagggatctttaaagagattaatcacaaaggtttctctactactcttgcttcaactgaggaggccaagctagctctcactgactcccaaaattagttgcgagctgatccttttaatgttactttatagctataggaaaaagaatacaaggataaatatgctgatttcaagaaggcttcttgctcttttttatagcagaaagcaaaactaaattgtgttaaagggggtgattcaaacagctctttattccatgtgagcatccgtcaaagaagaatttataacaaaatttattcaatcctcaatgcagatgatgaaagagtatatggagagcaagttgcttatgcttttctcaactattaccaaagcttacttggtactagactagaaaacagactgcaagtaaatgttgatataatgctccaaggacctcttgtcaccaagcaacaagcagactttttgttatcggattacactttggatgaagttaataaggtcttctttgatatacttggcctcaaggctcctgagcctgatggctatgggagttatttccttgaagataactggaagttggttggagatgacatttccctagccatcctttctttccttcactttggccaaatgctaaaagaaataaataatatggttctgactcttgtgccaaagtgtaaatgccccaatatagtaggagaatgtagacctattgtctgttgtaagtcttgtataagaccgcacccaaactcatttgcttgacactcaagcttattcttccaaacattgtggctcagaatcaagggagtttgttaaaagtagatcgattgttcataatataatggtatgtcaagatcttgttagaaactatggaaagaaaactacaagggctatctgtatgattaagcttgacatgcagaaggcatatgacacgattgaatgggatttcattgaagaaattctccatgcttttcaattctcgacaaagtttatcaacctgattatgacttgtataaggactcctaaattctccttgtcttataatggcactttacatggttttttcaaggctaggagaggattgagatcacaaggagatccaatttctctccttctctttgtccatagaatagaataactctcaagaatcatgcaaagaattgggaggaaaaaagagttctacttccatgaaagaagtgatggattaaaattgaaccatctatcttttgctgaagatgttctctttttagaagtatttactagatgttacaggggttgaaattattttcttgtacatcaggtctcaacccgaatccatctaagtctgctatttattgtagtggaatggatgatgggatggttcaaagagtcttaagagcttttggtttcaccaagagtcaacttcctttcaaatacttggggattcctatatgtgcaaaaacaatatcaggcatagaatgcagtattttggtggagaaaatgatagcaaggattagaagttggagctcgaggaattcatcttatgtaggtagaactactcttattggttcagttcttgttgctattaactcatattggagccaaatcatggtcctcataaaaaaatcctcaatgcaatagcagcagtttgtcgtgccttcttgtggaaaaatca

SEQ ID NO: 45596 - DNA, 9643 bp, Cannabis sativa
catgacaatcatgtgattttatactcattactttcaattcaaccatattaccaagttcgtgatgttaaatgagtatccatcaggtactttcatctctgaaaatactttgcaaacttttttgtcttttttggacaaagggaaacaagtaagaggcaaatataatcattcacctttcttttcaggtaccagagattgtctgatacccattttaatgagatctaaacgactagataaaccttatttagttttgcaaggaatatcaagtaaggtattgataatactctcacacacattgacatccaaacattgtcgaaccattaaatttttctaatatgaaaaggaaaagaagattgactttctttgaaaataactatttgttttcttatttatttatatattattatttttccatctttccatacataaaatctacgagttctacttcttggagaatttgttcccctaatagtggcaaaggagccatatctccatctttagtaccatcgaatattttcttctttcgtctaggaggatgatctttaggcaagtatcgtctatgacccatataacacatcttgtgtccatttgggaagcaacaagcccatgtgttagtgcaataaatcaaacaaccttggtaaccttttgtgcttaagcatgataaattactgtaagctagaaaatcgctaatagtcaacaataacactaccttcagattaaagaattctttcttaaaaccatcataggcctgaacaacattctcatacaattatatcaaatcgttaattaatagttctaaatatatatcgatattatatccagtttgttgtgggcctagctaatatcattaaagaaagtatattaattttttttcatcactaaccatggaggaagattgtacataacaaggaagacagtccacgaactatgagttttaatcatcattgcatttgccattaatatttttgttagatttttatgagtcaagtgtgttcatggaatgttattttttatgagatattttatggtaatttttaaaatttatttgacgttttattcatccttaggttttctaaactattatttcaatataatttttgagggttacgcctcaaggcttacttgcattattttaaacattgtaactaattattaactaatcttactctaaattactaactagtaactaattatagtatactaaattattaagtagtaactagtccttaattttaccaaaattttagaagcataacgactatagttgaacgttcccaaaaatttaaagctattaataacaatcaaacacaatccaaaactttataaaacaatcacaataacatttaacaatacaaaaatttgtcacccatctgaccgcgttatacattcactacggatgaatatttaagatattcaaactcatctaacatgcatattattctaccatccgactgtagtacaatatattgcagaacatacttcactataaataaatattaaatgtatttaaactcatctaacaggcatattattctacccatcatccgaccgcaatataatatatcgcagaacttaattattacttatggaggatgaatatttaagatattctaactcttctaagcattgataattaattaataataaaagttagtaaatgtatatatatagctagctaaaagccaataaacaccaaacaatttagaactttgtaattacctcataacctgcaatataaagaaatactataaaataaaaatttaattatttaactacttactagttatataatttatgagtacttagttactaactgttatacccgaacttcagctattcaccagaagctgacatgtgtactataaaaggaatatgaatcaactcaaatattataataattaaattgcattattagatgcagtttaagtaacttgttttaattaattaaagttgatagaaatattcaagctcgctgccacataagcatgagtgagataagaatataactattacaaatgtaattgatgagacactacgtctatctcaggataaacagagtatataataagagtgtataagacaagacatcaaggagcttacaactcattgacccacatacttaggagtaaaagtttgcaactcattgactcacatatttgtacatggaggaaataactacatttatccatctcaccttttatgcgacagagtaaccacctcgcaaatatctttacgatatgaagaagactatgaggagaagtatatctatacttagtattttttcctataaagacggaaaagaaggaaaaatcacatttagcgagaaataaccttcttagtcagtataaccatttaaggataaagacaaagagtggttgggtagttattagatattattccatgtgcataaaaataaaatgtggggaatgtccacatttcatgaacaactataaatgaatagatcccaataaaaataactgacatcctatgcacctataaatagggcagaatccagggaaaaagaggatggaaaacttgcgagaaaaactattattacgtttattgagaattgtactctatatccaaagaaatatcccgaaaggaaggactcgtgcagtatatagattttaaactacaaaatcacgttaaatatcttgtgttcatttattactattattaaattctatggtatatttttatgtaaaaggctatatatttagttaacacaagtctgcgttaacagtttgatgctttcattgagagccttagtaatagaaactcaggaaaaatccctcctttgagacacaattacaaacatatacctatggcagataacatcacccacaacggaagccatccagagaaactaaccatcgccctagaaaagaacctcagggattgcagagaaccaacacaattgaaacaccacgttctgggaagaacgatggaaatttcaatcctacttgtgaacagatcccagggagaagaagtaaagatgcttatgatcctaccagatatgtcccactagtggaactagaaaacatgcaacttcgataatgcctggctgaattaaaccgacgaaatgctaagttagagcgagaaagaagccacggctgccagggcaacacagggaaccattcctcaaactcaacctgatccatctgtaaggagaccacaaggaagacctcgaggttccacgaccaggagggaagagaataaccaagggaatcccacaaatgctcaggaagaacaacttaggaatgcgagggatgtcccaatggatagagaaaatccacccagcacaagtaatgctagaaatcaggagcatcaacgtggtgctccaagaacttcccacagttttgcaaaccagggaaatgaacaaattgatgtacctgagtcatcttgcatgaatgtggatgcaagacaattgcgaccaagaaaccaagaaatccttcataatgatggaagaaatcctaaaaataaacctgggtctggtcgacccccaaggcatccacaaaataggggatgtgtgtcaaatctcttttggagaagaagaccaatgcgagatgagacacatgaagcaagtttgagtacaggagagtcacgatcctacgagcataggttgtcaactaaaactaacagacaaacgcaagacgagaatatatctcgacattattttactgaccaagaaagtatgagtaacttgggtagttaccagtctgaaagttattcagggactagatctgtgagtaattatgagcggaggcatcgtgaacctgatctctgcaagcaattagatcgaaggcaaccagaccttcgtgagcacttgaatcacaatgcaccttatttacgtaaccaacttaatcaaaatgcaaatcaacaaccagtggatcgcattcagttgcgagtaatacaattggaggacaaatttaggaaatatcaagatggagaatatgacaaactgctaggatatgattcagatgaagaaactgaaccattccatcctaacatcctaaactcacaattttcttaaggatttaaaaatttgcatgtctcgtaatatgacagatgaactgatctagttgcccacttaaacaattttaacactataatgcaagcaagcaatatttcaaacaacttgcgatgcatattgtttctgaattccttaataggagccgcaagtagtttgtttgacaaattcgccaaccattctataacttcttgggagtagttgtcaaaggatttcaaaaagcaattttagcctacaagagatcgtcgaccaaaggcatccttattgactaacatcaagcagcaactaggagagtcccttaaagcatacttaagtcacttcaatacagttgaagctaaagttagaaatttgaatgatagcattattaatagccctttaggctataattagaactgatttatctactgcatggggacaattatgggatgatttgcaatggtgtcctataaggaatatcaatgaatttaatgaaggagaatagatttttgtgcaaaaagaagaagcacaaaatgagatgaagctgttaaagtcaggcccgagagattatcccagcactagcacagcaacagcgagcaccgtgactacgaaggtagaaaatcccaatggatcaaataccaagaggaaggatgagtcaggagacttatccaaggataagaaaaaacaaaagaagcatgagaagtatgtacctatattattcagtgtatactgaatttaatgagattcatgagaacatctacctcaccaatgaaaattaggtcacattttgctgaccagaaccgatgaggcatgcgaggaataagcaattcaactaagtattgtcattttcacaaagatattgggcatacaatcgaagaatttcatcaattgaaacatgaaattgaaagactaatttcgtgaggatattttaggcaatatatgaagacatagggaaatgagcctaatcagtccaacaacccgaataacctaagattgcaacctcccccgtagagggcgaggatatcttagttatttctggaaggccacacctcgtaggaaatagcaatggtacacaaaagaggtacattaatgtggtaaagaatgagttgtctgcattcgctccaaaatccttgaagaaaacaaaatcagatgaaccagccatcatcttttctaaagaagcttcaaagcatgttcgatatccacatgcagatcctctcgtgataacaactcaacttgccgacaaaagaataaataggattctcgtggataatgaaaactttgtcaacatcctttataaggaaacattaaagaagatgggattagaagaggcaaaactaagaccttgcatggtaaatttgtgtgggttcacaagcgacaatgtcgccagcctaagcatagttgaacttctcttaactatgggggaaccacactgtttgcgacccaaacgcaagaatttttagtcatcaacatcctctctgtctataatgtattgatgggtcaaccagatttaatattgggggcaataagctcaataaagcacttgtcacagttagaggcgaccagctgttagccagagaatgctacagagtggaacttaaaaatagaagagctagtcatcgattgatggtaattctaaccgaagaaactaagaaggaaacagaagacttggatcctaggatccatgatgataataacaaacttaagtcaatcaaagagttagaagaggtgaatttagacccgaacaattccattaagtgtgtttatattgggaaaagtttgggggaagaactaaaatagcaattaatacacttttctgaaggcaaaccaagatcaatccgcttggagccattcagacatctttgagataaactgaatgtgatttgcaatcaccttaatattgaccctaattatcctacaaaatgtcaaaaacgacgaccactggatcctaagagacaaaacgtgctcaaagaagagtttgataagttgttaaccaataacttcatatgagaatcctttttgtaacactctactagtttaggcgtggttttgtgattttatattaattgtgcagttcgttactaatcaacagatttattaaaaattgtgtttaatgaaaacttttcttaaattaacctttactaaaaataaaataaactttacaagctgggatcccgcatttcaaaagttataaccaaaatacaacatactagtacaaaatttgtcgcctagccactaaataaaatgcagcctattgtcccgaagaccgaaaactctaggtctaaccgccccaatatgtacaatcttcatcccctcgaactcattgtttttcagccttaactttacccttacctacacacataaacaatatctgtgagttgacaaactcagtaagaaaagcataatcataatcataaatataatccggatcacaattaggcccctatacacccaactgtaaccatatcctgcaccctaggcggtactgagtctttaacgttcatatgacaatactatcgaccctaatattagcctatactcgatactctagtcataccaatgttgtagtgtcgatagtatctgagcaaaacatacatctatcggtatctaatacaaatctacgtatattgatacctctatcaatgtaatctaacatgcttaacaaacatatatgctaaaaatataaacacatgtgcatatcattatactaattttactacgttttcgaattcaggtgtgccaatcaacctgagtggaactgcggctcgatggtttacgggcccctaaatcacaatattttgtaaagatgataagtgatacgctaaatcacttttcacggactttaaacttaaaactaaaggtttccctattgatatctatcaagacaaagtcctaagtatcgaggaaacatgagaaaaactacaaaatggggaacctgcctgaaaacggcagaccatttaagaaaaatgacaggccgtttttctgggtcctgtacaaagaaaaacggtaggtcgtttctacagaaacagcctgttgtttttcactgcagaaaaataacaagcccccaaattgacctaaaaccaccccaaatcttccaataagctgcagaatacatatacatgttataattaaccatttaccactaaatggtaatcattgtagagttcaatgttctgggtttcaatgggcttcaacttatttggccaattataatcctgcaatcattgcttcatgttccgcttcattgttggatgtagtatattcaaatcgaagggaactttggagttgatgcccttgcagagaaattaagatgatttcggctctaaaatctttctcatttgatgctctgtcaataaaaaccttccacacctctagttctggaatgggttcctctggattattattaattccagtacattccacaatgaaatttgttagagctttgcccttgattgagactctagactgataatgaatgtcaaattagctaagctccataactcattttaataatcttttagaggactccagcttgtgtaacacttggcggagagggtgctttgtgagtaccttgattgcatgggcctgaaagtatagtcttagcttatgtgaggcgattagtaagcaatatgaaagtttctctatcatggggtatctagactccgcgcccagtaatctcttgcttacgtaatacattagaagttgtacatttgtttcttctcgcactaatgtggcattgatggaatgattgtacacggccaaatacatgtataatggttctcccttaaccggtttggacagaatcggagccttttctaaagttcttttaatttttggaaggcaacttcgcacttggctatccactcaaactagttgcttccatgtagaacattaaagaacataatacatctgtcaattgattttgaaacaaatctgctaagcgctgcaatccttccaattaagctttgaacgtctttgtgttttcgaggaaaggtataaccagaagggcttggatcttatccggatcatcttcaattcatctagagttgacaatgaatcttaggaattttcctgaaaaaaccccaaagatacattttttgggattcaacttcattctgtacttccaaataatagaaaaagtctttactaaattattactatactctttggatgtctttgacttaactagtatgttatccacgtagacttctatatttttccttaaaatatctttatacattttattcaatatgtcgatatattgctctggcatttttgagcccaaaaaatattacgatatagtagtagtacacacctttgtctgtttatttatttttcacatatttttcgtaaatatgtgaaaaataaataaagtttatttttatatggcataaataaataatacaaaaatatatgaaattaaaaaatatcaaagtttataatatagaaatctaaaaaaaaaggccataaataaatttcataaaatttttaataacaaatatcgccaaaaaattgttggagaagacatcggcaccagaaaagtcccaagaaaagtcatcagtacctgaaaaatcattgaaaattattgttactgaaaaagttatcgaaaaattcactgtcgccgaaaaagtcatcaacgccaaaaaaattgttgaaaaagtcaatgaagtagtgtcatcgtcaaaaaaatcaccgaagttagatgttttaaataaaatagaatcggctctataacataatgaataaaaataagtaacacgcaataactcaaaccgactataattaaaatagaaccagttttataacataatgaataaaaataaattacacataataacacaaaccggttataattaaaataaaattaattttataacataatgaatacaaacaaataatatgcaataactcacactgtttataattgaaaaaaataaagaggaaattaattcctaaaacactaaaacatagattaaaaataatccacaacaaaatgagtaaaaataaatagcacataatacctcataaatcggttctgattaaaaaaaagtggggatcaattttaaaaatattgagacataaatctaaacagagccggttccataacaaaataagaaaataaataacatacaataactcaaaatataagataaagaaactggttttatttatcaactagttaaaaatgtaaaacaaaaaaatcagtttcataaaacaactaagataaaaatttacacacaagaactagttaaataaaataaataaatcaaaaaaatagtttcttgaattaaccaaaacaaaaatcaattcctgaaataactaaattaaaaacttgtaatgcccgtattaaaaaaattgctaattcaagaaaatcttattagattatattaatataacttcgtaaatcgggatgccaagttttaaaaaaaaatgctattgaaaatacatgtattatatataaagttacataataataataataatttttttacaaccattaggcaacatcaaaatataatccaaaatacagtgtaacggaaaccctgcaggttgcactgccgcgatatgtacaaaccttgcctaggcccaactcactgctcctccagctttgctttacccttacctacacaaggtagcacactg

SEQ ID NO: 45597 - DNA, 1632 bp, Cannabis sativa
attgttcatgaaactaccctctaacaattaaaacttgaaactgtctgaatctgcatacgaggtgaactttgcaatttattgctactcgttggcaccttttacaacattaatttggtaaattaactgaagttgcttggtactcagttattcatttgcttatacatttatccaaatctttgtttcaaacaggtcccagaaactgctattttctttatagaggacggtagaaaagtgccagctgcttaacgtgtattcatggcagatacagagtgaaatttaattatcttcctcactgttatcgcgaccttaatcagactcactctactctgagaagtacagagccagcagagtttggtaaacggccagggagactttttgtccattttaaaaacatttatcgtttgctgcatagaatgatataattatgtttttttgcttctcttttttggggctattgaatggtgtttaatatatgaggatcttctttaatcacttgtgtaagagctaagagcaatctctacttctttcaccctcatcattttgagcgagtggtgttttcagattttgcatttcactgaaaagtaatctaaagcaacaagatgttgctgctgatgcatagccctgcaatatttctcatcttcttacttgattgtgctatctcttgtattatggtgacccaagatggttgccctaacttattgcttgagcaaatgtgatacgtaaattttatttttatttttgttctttaattcaaagtgaggatggagaaagtaaggtgaatgaaaattgtctggggtggggtactgatcacttgagggccttgaagattagacaacatacgccatgtcatctgataatctgataaactaattttttgatagatttaattactaacacgagagttggtagttaggtgttcggttagaggtaatgaaatggaatgaaaaaaaaaaaataattcttatttttggttttatttttaaagtattgaaatgtcatttatattctagttatttttttacttttaacaatcaagcgttacggaatgagatgtttgttatgtcagtttgagttggaaagaatagagttggagggagtagacttgaagagaatacaaaattcaagtgttggaggtgattaatattattaccattttaatttaattagtttttacttgaaaacacacaaaccttagttattaaaatttaatttaagtttgatattctcatttaatttaattctgtgtctaaatctcttataaactctacaaataagatcaacaatgtgagatagaacacacatttatttaatcaagccacacaaatttcttactcatctaaggagcaattcaatcttgcaaagagaggagtattatttaattatgcattaaaaatgtgcatttggatacaaacgaagctgagctgaaatgtttgttagtgtatcttctttgattgcagatttgaacacattcaacagctataaagtaaattcttaagctcttggtcgttcttcactgtgtctattattagattttatttttcctattgtaattgaaaaagtgaaaaaaaaagttgtaattgaaaaagtgaaaaaaaaaaagtttgaaaagcattttattttgtcagattgaga

SEQ ID NO: 45598 - DNA, 1585 bp, Cannabis sativa
tgtctccaatttgtgtatttgtttatggtttccattgtttctttactttcgtacaattcgctttttgggctgagctagctaatgcagcccaagaaagggggtaaaatacataatgggcttggagcagaataggctttaaatataggaggaaattagactatattataatacccccctttttatatgggggaaatttacaaaattactagaatttgggttaacttttacaaaaataccgtcacgtggaaatcttttccaaaatactgtatttttataaaataacagtaaaacacaaaacagaacaactaaaaacaacaatggaaggataaagtaagcaactttggttgagagaaggtgatcaaaattcgaagtatttccatgctatagcttcctctcgtcaaagaaacaactctattcaaaagctttaaaatgttaatgggttatgggaaacatgggaaggtggtcttccaaatttgattactagttatttgagcagttgtttacacctggtttagtggagtttcacgaggttgttgataatgtttcagttgttgtttcgcgagactagaatttgatgttacttgagccgatttctgatgaagaaataaagaaagcgttgttccaaatgcacccaaaaatccttaggacccgattgtatgaccccgagttttttcaaaaaattatggccgattgttggtgatgatgttcggctgttggtgcgatctttttttgcctcaggtttgtttcctccttctttaaatgagactaatattgttcttattcctaagaagaagaatgcagagcttatgactgatcttcgccctatatcactttgtaatattctttataaagtaatttctaaagtgttggccaatagattgaaacttgtgttgcgtgatgttatctcagaatctcaaagtacttttttgccaggatggttgatatcggataatatcatggtctcatttgaaattatgcattacttaaagaggaaaagaatggggaaggatggttatatggctcttaaacttgacatgagcaaggcgtatgataaagttgaatggccttttattgaagctgtgttgttgcaaatgggctttgatagaagggtgatttctctaatcatgttttgtgttagcacagtaaggtacaagattactcatggtgggcattctatggggcctattaatcctgaaagagagttgcgacaaggggatcctttgtctccttatctcttccttatttgtgcagaagggttctcctctctattaaaggcttttgaacggcatcatcgtatttttggtattcgagttgcaaaaggtgctcatgttgtctcgcatatgcttttcactgacgatagttatgtgtattgcaaggctaaagaggtggaggctgctagtattcttcatattctccaattgtatgaaatggcttcgggtcaacaagtgaatttctctaattcataaattttctttagtaagaatactctcgccgatactcggtcccgtttgtgtaacatgctgcaaatgtctgaagcttctaataatagcctttatcttggcttaccttgtattatgggccgaaa

SEQ ID NO: 45599 - DNA, 1730 bp, Cannabis sativa
acaacaacatactaacctacaaaaaaattcaaactccttactcttttctttagaaacataattaactaacaagtatcctttgtggttaaaggaatttacccaaattatataaaaaaaaaaagaaaattaaaatataaggtgtttctagaataggccctaaaagggtgcacctatccaatctctatcggcatacacgattgttctagtttaattaattttatatataattatatacattataattatttaagacataaatcatgtaaaatttaaaaaatttaaaataatttacaaaaaaaaaaatagtgttagaaataatttcacaagagtataaaataaaagagataagcgcaatattttttgaaccatgtttttggtatgtcaaattttttcgaattttttaaaattttaacacattttaaataactataatatagagaattatataaaaaattaaacgaaagattttccccgaaacaaatcctttttaagagatattgtagaactttataatatatatttgtatgagctggttttttttttttattaattatgtgtaaaataataataatttttagatgaagattttataaatttttatctatatctatgtatttctaaagtaacaatttttggggagatcggtttggttttggttcaaggcgagtgtggctattggtttgattttttagagttattatctattgaaatagatgaacacttctgtttaatttgttttaaatctattaaaagaaatttaaaagtaactaatattatctgtttctgtctagattttatgatttataatctaagctttatatatgtcataattacaaatttacaaacaatattaatttttatattgctaaaaaaaaattattaaatttatattgcttacaagctcaaaaattttaaatatttatgccattatttactaaaaaaaattatgtttttatttgaactaaagttgtgtctcgagtaggctttggaccaaatttaattgcaattaaattatatattttataggtttatatataatgtctttgaaaataagattttttttcttccaaaaagttaactaatgagaaatataatttttttaaaaagttaaaaggtaattgctaggggtgggcattcgatctaatctaattagacttcaaaatctaatcaaatccagtccaattattaattggagtagattggtcttttaattggatatccaattacacatctaaattttaatattaacttaaaaaaataaagaaaagtacgtataaactaaatataaccatttatttaaatttaatactctataaacgtacaatcgttacaagtgcaatgcaactaaatacactaaataattaagtgttaaaagttcaacgcaaaaaaatttaataaaatataattaatatatattatattttttaatatcttttattatataaattattttttaacatagataaataaattggatttgattggtttataattagattttgagatttacattcaattaccgatccaatttaattagaatctaacttttagtatccaatctaatataattgtaattagatatccaactttttgttattaaattggattggttcggttcaattagattagattgcatgctacccacccctagtaataggcatggttttatcaaatttgattctccctcccccaatttaaaatttttctcattgttataaaataatataaaa

SEQ ID NO: 45600 - DNA, 1166 bp, Cannabis sativa
  modified_base (215)..(217): a, c, t, g, unknown or other
tatatttttagtttttaatcactcgcggtagatatttatatattagctaattattacatattattaaattaatatgtgttgaaataatgtgcatctatatagtataatttatttatttaaaatttaccattaacaacaaaaaaattagaagaatattctaattttgttgtataacataagtataataatataattatataattatataattaaannntaatcacataataaattaatataattatccatagtgattaaaaccatattattatacttatacaagaaaattagaatattcttctaattcttttgacttcacagtagtaagagtgtgagaattatataacaaaaaaaaaaaaacactcatatttaattaacattcaaatttgagaggaatattgccacaaaaatgaaaaaaaaaattaatatattgagaggaatatttaatatagttaagttaataattcaggaggcattatttctttttgagaagaaaccccaaatgactactttcaagcaaaacgcttgaagaaaatgtggaagtaatactcattatattaatttatctcatataaaataagattatagatacaagaagagtaacgagaccatcaaaccttattaataacttttaacaagacatatatttttaaggaatgagtaacaacattaaaagatttagaacaaaaaaaattagcaaaatgaaattcagcaaaactatgtctaaatatgcaaggactaaacccaaagaagccaacaaaaacttgttattaaattttaccacattcaaataattaaattcaaaaagcacattctgaaaacccaacaaacgacattcgatagcaatattttttaaagctaaagtttttgccatttcaagaaaaaaaaagtacctaaaatcttttaaacagtagaaactataacctcacttgtggagtcacgaattaccataccaaaactacatctatcattaaaaatgtcgagtatttttactattctcctaccaagaggtacccaattaagattggaagaaccacttaaacagaaagataagtttccaagcatgtgacgaaaacaaaataataaaagatctatttaatatttattctttatttaatgtgaataaaaatttatttttttagaaaataaaataaaataattaataa

SEQ ID NO: 45601 - DNA, 2621 bp, Cannabis sativa
atacaacatacattgtattaacattttgtgggttggtaaaataaattaatataatacattgctttatctaaacatagtgttatttattatttaatacaaatcaaccctaaattgctttattaatactaatacatacccatgcatgtataactatgtttttaattaaaacatgcttttgtcatggttgtagcatgaagttaatcattttaagaatatagtgtgttggaaaatttctcatccatcatgtatatatatattggagaaataaaaatggtgtagtgtaaatatgagtaggtagatggggcaagaagggaatccaaaaataacaattactacttatgagtacattcaattaatggtgaatgaataggtgaagagaagaaagaggatattgaagagggttcaaacttgaaattaattatttgaatggattgaagacagacattcgaggggggaccctcgtgatagtcacgtgctcccactcctaactcctaagacaatacacacaactgcccctactactacattacattacatttcttctctctcatacaataataatagtagtagtaaattgcaaatgatctctctaggcccatcgactttgactatatataataaggttatgtttagtttggtagaatagaatggtaatgataattgttgggtctgcaactaaagtttcatattggcgagaaataagaaatattatgggtatataaggatgaatatttctaataagtatctttttgagaaggtgtccaaaaataaattcgtcaggatttagacctaaaacgaacaatatcataccaatgtggatatacatggtgtctgtcgtcctaacaagtggtatcaaaactgaatcccaaaattaaccatgtgaatgaaacctcaaaatatcaaacaaaaggagaagagcctcaataatctcacgatgggatctgtggatgtactctagtagataagcggtgtgctatggaggagttagcctcagaaaagaccaagaactctcgagatagagtagatatatggaagatcgtttgagggaaggaagtttattcaagataaacaagaatacccatttatagaactgtgagtattcatgtacaattaatggagagtactcaaagtaaaataacgaataattaagtaataacaatgtataagggagaaagagaattataataatttagctagagcttggtctgcttagtctatttttgcaagaatttttgtgattattcttattttgggttggatcactcctttatataaaatataagtgattctttgggttacataattgattagacaagacagttacaatattaatgaaatttaattaagatgaaaaacgtttgttgaataaattaaatgaatgaacaatttcgactgttcttgattaatattcgaatgtatgcaactttgggaatcgcctactgatcattcactttcttgagtaacataagaacttgtaggttctctggtatttctcctatataaaatcttgggattacaatctcggggccacttatatatgagatagaacgcatgtgactatacatgtcgtatattgaacgttcatgtactgacaatgttaaactttacgagttcaagatgagtagtgaagcaatttagttattcagaccaggcgcttataaagatgtggtcattatgtggaacgcagtaaagaatcacttggtcctcgcatataactgatgtatgcacgacttgataacttctattggtcctgcttttactttactatgagataaacataaatacccacttacagaattacgagtattcacgtataatggagaatactcaaagtaaaatgatgaataataaaataacaatatatataaagggagacaaagaattataaaggttcagctagagcttggtttgcttagtccacttttacaagaattttttttttattattcttatttcggtttggattacttctttatatagaaagcaagtgatattttggattacataactactgattagacgtgattgttattacaatattaattaaatttaattaagacagaaaacatttactaaataaatgaaataataattttgactgtttagagttaatattcaaatgtatgtgactttaggagtcgcatactgaccattcactttccttaagtaacatatgaacttgtgggttctttggtgttactcccatataaagtcttagaattacaacctcaaggtcaattgagatagaatgcctacaactatatcggtggtatatatggcgttcatgtactgacaacattgaactttacaggttcaagatgagtagtcacgcactttagtcattcagaccaggcgtttgtaaaaatgtaatatttatgtgggacacataagagaatcacctcacatataattaatatgtgcatgacttatgataacttcttttggtcctacttttagtttactatgttgctgcatagtgtgcgttactacttagtctttgttagttcagtcatgtaatagcagtcccactctttggcttatgaggcttggtcatccaagcttaaatgtaatgaaaaatatgttagtaaatgagaaaatttgtttcaaagttcaaccacaat

SEQ ID NO: 45602 - DNA, 2576 bp, Cannabis sativa
  modified_base (787)..(789): a, c, t, g, unknown or other
ttagaaaaaaaaattatacacgatttaaaaaaaatatgaaaataaaattaaaagaagtgttgaaagtaacacaaaataatatgagaaaaaatttaatttattttttaaaaaaagtatattaaacttattttttttaatattagagtatattttttatgttgtggagcagaaatagaactcttctatctcatatcaagggcgaagttagaaataaaattgaagtgagacgattacatatttttatatcttgtccagacttcaaaattttaacaagattataaaacgtatttaattatgttaaagtgacttttatagaatgacattctatattttcatccgacacagtttctaggtagttcaaatctcaacaataatattttagttattcttagaaaaaatagtaaaaaaaaaattaaggcgtggagtgttgaacttgtgacctctttaacttttaaaaggatcttcactactacatcaaacaaccttacttaattttatttgaccacaaatatatttatataaagccctaaaaaaatttatttagacctaaacttcaaataaagaccggtcttaatattttcatctaaggtgactgctctacctagtctacacctagtatcacccttgtttcacatagatccactttcatttgttaatgtaacatttttagtatcatctttctatgttagtagaattttctctcttgcttctaaaaacattacctaaaaaaaaatagtgaacttattctttaattaaagtatgtacatattatatatacaattatttnnntaattttatgatttgattattttaaaaaattgtacttaatatattattattatatattttaattggattgtaataaaatttgatatgtaaaattgattgtttatttaatataatatatcttgtgtcaaatacttaaatattttattattaaactataatgtggtgtattttttttttttttgactaatatagttatagttatatataataataattttgaaatattaaagtttacttggttattaatttcaatcatttagaagtaatttatttgttactatatgtattatctaaaagggtatatgtgtaatttaatgataaaaagcccaaactattgccacttttatttaggttatagattacaccatactaaagatagaaatttatactgagagaattagcaagtgtgggggacccacccttatggggtggggatttcctgtcttggtggttaatgaagcagtggtgggggacaattttaatacccgaagcggagatggggcaggggcggaaataatactattcacaccatattcgaccccaatatatatagtttctttttattcttaatgtatatataatatatacatcattgataatcatccataatcaaaattatatatcatatacttaaattatgaagatctaatgacgatagtaaacagataatcattgtaaattataagtgtaaagatatttttttctcgatttttaattttatctttgtttactttttaatttgttgggagacttgagaggtatgagactatgatactatacctttgggcaccggggtgcggtgacaccctgctcaaaaataaaagttttctaaatctgattttgatacctcaaatatgtttgtggtacgtctagttcatgtcccaatgcaaagtttaaccatattgcactaagacgggcctaaaaactaaaaccctagttgcgtttgtcaacatgggtgctaggtgaaaccctaggtgcccaagttgatttctgaggtgctggttttgtgtatttttagctcctaaggcatgaacttggatgcttcatgtgttcatggtacagaatactaaaagatagtgagttggatacaatttggtgggatccgaacacccattctggagtcccccaagtcaacttgggtatagggctagggacccctcccaggtcggcttactataatttaggattactcatctctgagatattttctttcttgccacgtgccaaatattaatgtccacattatttgggctacttttggtgtaaacaccctataatcatgttttaaacatattctaacacttaaaacacatcaaaaacttcttgaaataaaatctacaattgttaagctaaatttgagtttgaaaactcaaattcaccaacttatagctgctattagccttataaaccaatcacaaataactaagaatcaagcttagaaacaaattctagcttacccaaattcacagagccaaaatcacaaacacaaacacaaaaaaaaaaaaaaaaaaccaagcttaacatttcataaccttcaaaataaagagttctaggctttacaatgatattgattccaaaactcctcattccttagttaatcttgctgaaacaacttgaatttggtttgaacacttggttcgtccttaggtgagctagtgccgaaagtaaaggggtttggagagagagaatgatgttttgtgtttatcttatattattgtagaaattacacaatatatggaaaaattataagggtgcgtttggaaagccacaatgtaattggatttgtg

SEQ ID NO: 45603 - DNA, 1625 bp, Cannabis sativa
  modified_base (1558)..(1577): a, c, t, g, unknown or other
aacgatttatataaggtaaataacacttaagtccccgatttatcccaaatttatcaatttgtccccatattttactaattgttacatattaatccctctctaacttatatttattttttctcagtaacatgtgcagacaaaatatccacaataatacatcaatgtgacattattttctagacaattaaatctaattaagacaagactcgtaatttaagatggtattgtatgaatagtgtagtcttttctaaagagataaattgaacaagccctaacaagaagaaatcattacttagataagtgcttaaattttttaaaagtatcaatacatttttattattgactaatttacggcataaatacataagtttaactctcaattgtaaataaatatttaagtttaattttttgcagtaataatacttaagtgatatttctgaatctctgtaggtacttgattgttaagtattaagtaaattggcacataaaaatccctaattggtctaggtcatgaatttttttttaaaaaaaaaattatatatactaataagaaaacgatatgtgggtaataacttgtcatttaatggccaagtacctacagagttctaaaaatataacttatgtattattaccgtcaaaaattaaacttagttatttatttacaacctggaattaaactaagatatttatgccgcaaattactctttattatttaatagtaatactaaaaaaaagcataattatttatgttatcggagaaaaattgacaacacaaaaaacgtgcgagtattcaatacacacacgtgcagaattgcgagtatccacctagagtggtaaatactcaaatatcggcttcgattaaacaaataaaaacagtaaaattataaataagacaagaaattatagtggttcagtcaaagctcggttcgcttagtccattttttggtaataattttaacttagtttatttgatctggattactcttttatattgaaagtaagtgtctgtttaggcttacataactagtcagacacgatcgttatcacattcattatacataataatagcaaaaaatatttaaagaataaatgaaagaatagtttttttaatagaacgaaagaatagttttgaccattctttattaattgtttgaatgtacgcaacttgttaagtcgtacattgactatctatatttcgaacacacgagtgcagactctttggtgttttactcgcatattggactttaggcctataactttggttagataatttaatgtatgtgattaccctaatcgcgtacctgggcattcatccgatgacaacttagaacttacgagattctaatgggttgtttaacacattagtctttcagactaaaacatatgtaaatatgcgatctttatgtgtcgcatgagaaatataatttctcgtcgcatataatcggtatatgcgcgaccagtactgacttctcttggtcctgctttttaactatgttgggcatagtgtgcgattagactttgtctcggtcgaaccttttgttgggttttatgtcctaannnnnnnnnnnnnnnnnnnnatcagatttacttattaatataggtcagaaataacatttaacgttgca

SEQ ID NO: 45604 - DNA, 2294 bp, Cannabis sativa
atagtttctatttctttagtaaggataatgaaggctatgaacttcaaaaaaaatttctcgagaatactattactcagagttattatttaattttcctttcttcccgttgccttgatgatttctgttatttgaccttttaccattctgaaccaaaatactattattgtcatgatatttttgagtctggatagatgtattagcagtagtggtatgactttggttggtcttattctgaccaactgtgtctacatgccgaattgcttcttcaagctttataaatccatatgctcggcctagaaactctcccattaaccccacaatgaacatttcaatatctttccataattctcccaaaggttcaattcctcctaggatagcggccagtcttccttcctcagttaatcctttcacttttgtaccctcggtcataagcctaataatgtagtctctcaaaggctctcctgatatttgttttacttcaaataggtcttctaagtgagttgggagttgccttgaagaggaaaactgtgcatgaaactccaccataaaagaattccatgaactaaactttcttggggctaacatgaagtactactgttggggggcctctaccaaggtagctggaaagattctacgccattcatcatcttttacagcatgcaagtccgtttgcattttgaattgcttgatgtgggatagaggatcttatttgcccgtatacatcttccatataggcattttgaacgttgtcagcagaacaagggcattaatttatggtgaaaatggtgaacctcgcatctagtgaagctctaagttgataagttttgggtcgttcagggtttgtactaagctcttaaattgacttatctgggcttgcaccactagatcatctttagctgcttgttggccaacctctgtaccttttgaaatttcaccaagcacgtagttgtccacattaattggttgaatattaggagggatgaaatgtccatcttgtctccctatgtgacttagatcgtctcttaaattgtatatgagtcccaacttattgaagattgattcccctagacaccttcattttaggtcattatcaatagttgactagtttggtatagttgtctaaggacgtaaattatactgaccattccccaagataatgggctagaaaaattttgctcatctactgtgtggcccatagtttgatcatgtctcctcggactaggcggttcattaccatgggtctattgagtgtaattggatagacgttgttttaggtcatattgcgatccattggggatctaagtttctttccctctctttggatcccgtatgatctcatattgaaatctcccactgattgttgtccacttaactgataggctctcttaatcaccacggttgcctgcctagagaaattatcattcatcacatgttgggctctcataatctccatttgttgatccatccactcctagaattggcatttttcctactcgaaggtcaaattcatagctactctggtatccttttgatcttggtgaagagtgttggtgtgcccttgcatcttccctaaagtagttcacaaattttgtagctccgtatcatcaccaatcgccacttgtggttctctaatttttaatacctgggccagtgtctccggcatgagtactagtggttccagtttcctacgtgtcaagagtgaacccagtcaaaggggttgtaattgccagtccaacaaattggggaccacttggaggctaaggaatggttggatcaggatccatcctcactggatttgatttcctggagttttcacattaagatctattaccattggatcggttttttcagtgcaatttcccctccttgtagcaacatccatctttgtgtgttttgaagagaatcaaaacaattctttttctctaaatgaaagcaccaaatattaaccttgcttttagccaacgacggtaagtcaactaaagcgattagaacatatgataattgttaaataaaattaagcattaagaatatagagatttatagagattcaacctcgtgagtatggtaatagcctactcccctttttgttgtattgcttgtgagaaaagaagcaagatcgaagttcttgatctctctcgaaagcttaaaattttttacagcataagagctctctagaacaattgattttggatccctgaatagtaaacaattctagtatttattgagaagaattacattaattaggtttcccaaataaatgagaataatatttttacaacaacatgtgtggaaaa

SEQ ID NO: 45605 - DNA, 1958 bp, Cannabis sativa
ttaatttttttaaaaaagggacatatattaacttaattgttagatttagggtcattttacatcttggcccttagaaaaatgagaatcttgtgtaatagttcaagttgtccaatatttttgttgatccttactataaggaagataagttgagcattacttttttattacaccttaattaattataactgaaaaataattttaattgataaatatcatcttttataattaaaatattaaatataatctcatataacctataaaaaattagagtttttaacgcaaattgagtataaatcaaatagtaataaaagaaaaataaaaaaaaaataaaaaagtgtttatatagtgtaaggggcatgagctccctaataaatataaatatttgataatatatattctaaattttttttcttatttaattgaaaatatatagaaaagaaggagaagaagaaggttgctctcatttgaagcaaactaatatttagtacattttgctttttaaaagttcagtctttgatgattgatgatcaaactttgtgagttgttaaaatattgatctttgtatactttcaataaagtacagtttcaaacatttttattatcatcttttgttcttcaaaaacattttttattttttatttttattaacaattaaaagtgaggagaatggaagaagaagaagaagactaaccaaagaagaaaaaggagaataataataataaaaaaaaaaagttaatttattaccaatctatgagtaaagtaaaatctttaacttttattattattttttaaaaaaaaatactttattttttaatgaataagttattgagagttgtcaaaaattaattggtttctaccaaaaaaaaaaagtgattctactgtaaaatcattctattttttctttgagagaaattaagttcatattttaaattatgtatgtgttaattgtttttatttaattgtaagttttcataaaaaaacataacaaacccaacacaaattcatgttctaaaaattctacaaacacattaaaatcataaatctcaaattaattaataatttgtccaaaaaaaaatatatatcaaactaatatttatgtcgtttgcaattagcaccccaaagaaacgacacttattttttgtcttaaagatttactaaaaactacatgttgtttgcaatgatgaatttttgctgccattcctattttcaaaatttgttgtcgtttttattgatttacaataaactacatgccgtttgtaataataagtttttgctgtcgttctaattttcagaatttattgtcgttcttatagaatgggaaacaaaacgacatgtagttaatagattaggaactgaataaaaaacaaaacaaaaataattaaaaacagcaagaacttttttgagtctccttttttttttttttttttctggtttaaacttgaaagtgtaactaggttaataaactttataaatactaaagtttaactcttaatactaagtttaatttttaagttatatttatagaacttccgtagatttctagccgttgagtttgaagtaaatagtagtcacttggtagtctctaattgggccaagtcattaagtttttatttaaaaattaatttaaatttaccaataaaaaataacacgtaggtaataacttgacacttaatggtctgtcaaaaattaaatttagatatttatctgcaactgagagttagttaaacttaggtattaattaagagtttttataaaaatactgaattttgagaaaaaaattataattttattgtgacactaatttttttacaaaaatactgtcttttaataaaacaaccgtaaaataataaaagaacaattaaaataacagtaaaataactgtaaaacaacagtaaaaatttaatacagtacatagcattttctaaaaaaattacgtcccacaataaaaaaaaaaaaaa

SEQ ID NO: 45606 - DNA, 1826 bp, Cannabis sativa
  modified_base (1452)..(1453): a, c, t, g, unknown or other
aagagttcgattaatgagaaaaaattacaaagagaacaaaataatttttatgcaaaaaaaaagtgaggttacgtgagcttggcaaaataaacaatcaatgaaatttttcatttatagggaggctcttataaacactaaccaatgtgattctttgctgcctagtgttgttgtttctattttgcaggagtttgaggatgtgtttcccaaggaggtactacatggtttaccacctttatgagggattgaacatcaaattgattttgttcctggtactttaatcccaaacgacaagcctatagaagtaatcaagaggagacgaaggaacttaaaaggtaggttgaaggattgatggagaaagggcatgtgaaagaaagcatgagttcttgtcctgttcttgtgattgtaattcccaagaaggatgggacatggagaatgtgtgttgactatcgagccatcaataaaataatgataaaatatcgactccccattcctcgtttagatgatacattcaatgagttgtatggttcttgtgtattttctaacattaatctatgagcgggtatcatcaaatacgaatgaaagaaggtgatgaatggaagacctcatttaaaacaaaacatgggttgtataagtggttagtcatgccttttagaactaatgcacctagcactttcatgtgcttcatgaatcatgttttgcgtgctttcattggaaattttgtagttgtgcattttgatgatattttcatttaaagcaagagcttgcatgatcatgcctcacatttgcatttagtttttgatgttcttaggaaagagaaattatatgctaactttaagaaatgcacttcagcactcataagcttattttcctaggtttgttgtgagtgctacaggtattgaggttgatgaagagaagatcaaagccatctaagagtggctaactccctcaactataggtcatgttcaaacatttcatggccttgctagtttttataggaggtttgtgaaggattttcgtaccatcaccgcactcattacataagttgtcaaaaagaatgttgcatttaaatggggtgaagtacaagagaaggcattttaattacttaaacacaagcttactcatgctcctgtagttgctttgcttaattttttctaacacatttgaaattgagtgtgatgcttctggtataggtattggcactgttcttatgaaggatgggagaccacctacatattttagcaaaaagtggggatgccctaaattacaccacctatgataaagagttttatgcactagtgcaagctttagaaacatggcaacaatatttgtggcccaaagagtttgtgatttgcacagatcacgaatcccttgaaacatttgaaagggcaacacaagctcaacaagagatatgcacgatgtgttgagtacattgagacatttccttatgtcatnnggtataaacaaggtaaagagaatgtggttgctgatgtcctttcatgtaggtatgccttaatctctactcttgatgctaagttacttggttttgaacacattaaggaactttatcccgttgaccatgattttggggagatttatggtgcttgtgaaaaatctgctgagggcaagttttataggcatgagggtttcttgtttagggagcataggttgagtgtgcctaattgttctttacaagatctgttagttaaggaatcccatagaggagggttgatgggacattttggagttgctaagaccctagttgcgttacaagaacacttctttcggccccacatgaaaagagatgttgagcgaatttgtggtagatg

SEQ ID NO: 45607 - DNA, 2479 bp, Cannabis sativa
cagtgtcgataatagtagcagcagcagcagcagcagcagcagtagtagtgagacaatgaagtcatttaagtatgacaatcaacttaaggatttgataagttttgacgaaagctcggtgtcatcgaaccttgcatccacaggaatggttgagcaaagagaagagtatcaggagaggcgtgatgttgttctgtctgaaaatgggaagatagagaatatgatagagactaacattttgcattttgtggacaaggctaaagaaactactctgatagacgcagctgtgtatggcaactctggtctcatcagaagaagatgaagttgttgaaacttttaaagccttcctgctctgcttcttgttgcaatgactatgtcacatattaggtttgtaaataatttaacatgcttgctgtactgctttcttgtcagttactgacttaacttcccaaaaatatggatcatgctttcttgtcagtcacttactttattatgctttcttgtcagtcatgaattattaggtttgtaatcttaggcaactcaagggtaaaatctaaatttggttaaatcaacaccaaaagattttttttttttttttttaatttcaaccacaacaatataaattacacagaaaaaaagtatattctttattattttaatttagaaatatacatatacattaagaaaatttaattatttaattactaataataataaaatattatagacaatcttatatatatagaatagcttttagtgttcgattggattaattttaatgataaataatactaaatttgagtttttagtgtgtgttgaagatgaccataagatctctattctttctctatcttattcatattacttaaataatatatgttttaatatattaataaaaataaaatataatataattgacatattattacaatatgtttaaaaaatgaatattatttctctacatgtagagatgtatctgaagaaaatagaagagtttacatcacttgttggaaggtgtatttactctattgttctttaaattttttaagaatttttatcttaaagggctattgggagtgctctaataatgtatttagttgttactcaaattttgaaaagccctcaaaattatgggaattggtgtgctgggcaaaacaaaaaagaatatgaattgtgttgtgctgatcattttataagtaggcttggcatggtttgtaaacttagtgtttttgtgtcgtgttttacctagattggtttgttttggactcgaatttgtgctcttttgttacaattaatgaattaactataaacggttaatcaatttgtgtttttgtgtcgtactttcaaacttatttcgctgtaaatctataattttagtgccatgtcgaaaagaccggcctgttatttaaagctttacttctaattaacaaaattgtttatagatagaaagagtatcattattgggcaccagtagtgtctaacaccttctataagtgatgttctacgattagttagtgatattctctaaacgatattttctcatgttgtatggaacccgaaacttaattacatcaatagcaatataatagcaaaaaatatgttaaacaccctttagcaattctcgaaaagaaaacaactgctgatgttgacttcaaatgacacaaattaaatcttgggcatcatttaggctctttcaagcatattaatagtgtttatttttttcgattcctcagcagagaacagcctataaaaattacattttaagtaaacaagcttgcccagatttttttccttaatatatgtgctgaaccaatatttgaataacagccttgattacattgaacagattcagtatacctcacaccccaatagacatgaccctctacatctccagagaacccatgctcaataatactcaatactatatatgtgctccaaattaagtcaaaactaataatttctatatgtatatatatcattcattcatctgccttagttattattaaagcccatggaattgattctagatcgaatgttgtgatgatcaaacatgggagccccatagtcaactggtttaatgatcacagtttggcgccttcgatcatgctcctgaactgccccgaatacaacttcgttggttttttcctcattttgctcgtagtaagtatgtggcacagatgagtggtacatgttatgatgctgctgctgctgatgatgctgatgctgctgctgttgctgctgttgtttctgctgctgaaggtcatcgtcccaaccattgtaaaaggctcggctctgacgcaattgttgcaacttttcagcatccttggacatgaaagcatatgttttccgaggtgttggggttcttgtttcaatggaaggaggctcatcctcatccggtatgttgaaactttcttgcacaggccaagtattcaaatgcttttgctgttgtagattttgatattgatagtccaaaggtggttttctt

SEQ ID NO: 45608 - DNA, 1657 bp, Cannabis sativa
tgagatatttgacaaaaaccatgcttacggtgtcagagtctattgtactagctagtttggctagggactccacatttgcattcttctcacatggaactttattaatggagtggtgttttagctatgcaaaaggtctttagctttgctcaagtacgatataattttgagccctcgggcttggtactcacctaggatttgattaaaaacaagttaagagtcaatgtaggatccctagtgattcagctttaatggccagttccaatcaaagtcccactaggagtgcctcatactctactttgctttttgttgtggtgagttcaaaccgtaaagcacagtgggtgtgaaatcctttaggggttacgaggatgagtcctgggccagagtcatgcgcattgaacccatctacataaagcttccaagagggtctagagtgcttctaagttgtagtctcagatgtgcgactatggtcttcactacccatgagttcatcttcaatgtcaatgcactcaacgaaaaaatcagctaatgtttggcctttgattattaggcaaagttgataggagatttcaaactgagggagttctattgcccctttgagtagacgccatgatgcttctgacttcatcaagacctgcctaagtggttggtcagttaacactttgattggacgagcttgaaagtatggcctaagtaatctagaggtcagtattaagcagtaagctagcttcttaatgggggatatctagactccaccccaaggagatgcttgctcaagtaatacatcgaacaaattgttccttcatctcaatgcactagagtagcagtgaccgcatgctcggtgattgccaaatagatgaataattcttcaccatctattggttttgaaaggactagaggtttggccaaatgatgcttgagagcctgtaaggcttgctcccactcactggtccattcaaaccctttgtttcttcctcttagtagattgaataaaggaacacacttgttggtgaatttgaagataacgattcatttggtaaggctttgcacgtcttttatccacgaagatgacttcatgtcttccaatgcctttatctttttttggatttggttcaatcccttggtaattaacaatgaatttgagaatcttttctcattggacacaaaaagcacattttagggtgttaagcttcatcctataatctataggatgttgaagcattctttgaaattgttgatgtggttttcagatttcttagatttaaccagcattttatcagcgtagacttccatattattcctgattaattcatggaacatgcggttgactagcctctgatatataacatcagtattcttaaaaccaaagggcatcactttgtagcagtatatctatttagaagctagtgtgctcttcattaggcatgtacattctaatttggttatctcccgagtaagcatctatgaatgtgaggattttatggctagatgtagcatccactagttaaccaatttgaggaagagagaaatagtctttagggaaagccttatttatgttagtgaagtcgacacatgttctccactatccattcagtgtagacaccaggacagggttggataccgtgactgagtaaaaagcttccctaatgaagtttttttc

SEQ ID NO: 45609 - DNA, 4272 bp, Cannabis sativa
  modified_base (37)..(44): a, c, t, g, unknown or other
tctctctcagccttgacctctctctctctctctctcnnnnnnnntctctctctctctctcttgtcttgtcgctgtcggcgtgaatggattgagagaagtgaagatgataaggtaaatgtattatgtaggttaatgtgaaataatattattttatttttagataaagtgttatttttattattatttgtattgtgctactttaaaaatgggcttgattagaataagagtagacccatgaattatgattaagatattgagtgagggcttttgtgaattgggctttaataagttgagtgaagtgaattaatatatgtatatatcaatatgtgaaaagtttaatgtatatatttgagtgagggctttagcctacacatgggctaaagtccctccgtccctgtctgtagcatataatctgcatcacaatatctaacaatcttgcacttatcaccttttttataaaggagacaataattgatttatctttgacatatctcaatattcatcgaactacttctaaatgtggtttctttggttgttgcatatatctgcttaccacttcgactgcataataaatatctggtcgagtcaatgtaaggtagattagactccccaccagaggtttatatgttgctccatcaggcatgtccttcccaacatgggcacataactttgtattagcttccataggtgttgagatgggattgcacttgagcattccaaatatttacaataagtctttagcatacttttgttgatagagaaataaagcttccttagtttgattgacttctaatccaagaaagtgttctaattctccaagctttttcatttgaaagcgaactgacgagttctcctttgtttgatgaatctctgttttatcatctctagtgataataatatcatcgacagatactagaacaatcgccatatttacttgctttactttgacaaataagcttgaatcactataagaaaatagacttttgtcgacgagattttgcagtgacaaaaggtaactaaacctcaccggtaaccttttgccgacgagacacctcactgacaaaatttttcggtaataaacgttcaagaaaagaggattttttggtgaatttagttcgttcgccaataagaatcactttttctgatgaattacattgtcagcataaatccagtcgccgacattgtcttgtcagttgagggttttttcgccaagttttatcagtgaactaagtcgctggcaaaactttcgtgccaatttttgacatcctacgaaagttttgctagcgcaatcaacttcactaacatttttttctaaatatttgtttgatataataatataaatatattataatcaaatttcaattaaatctaaaatttcataaataataatacaataatataatttcaactacattataaaactagaatttcatattataattatgaaaaaactcgattaaacattgtaaaactttgtaaaaagtcattgttatagtttataaaaattagtaatatttacactgaaattggtaaagtaaattcaaattataaatcaatatcatcatcgtcgtcgtcatcgttgtaatgagtgggaggggcaacttgtgatgaagtacaagtgctaggaggacgtatcggtagattcgaagccatctcgggcatgttgaagctaggaattgctcctgaaacgtattcatgtattaattctgagtatgcatcattttttgctgataagaattaagtacttcctactcttccacccttcgcttcaatctctcatatttctcgacgctgacagtaggttacccgaaggaacttgccttcatagttgtcatatttgctctattttagagttaatattaagtgcttctaattcttccttcaatttaagtattttatcttgataaattgaataaaatctctctagtttgagtattttgactttgattaggtcattcaattgataaaaataggtgctaataaaaaaaattctttattttatcactaactcactatatatatttacatatatttcttaatatgtaatcactaataataattaagtgtcactaataatatgtcatataatttatataatttatgagttaggctatctaaaggttctagagaacataattaaaggtgtgcaagcatttgtgaaacgaaagtatttgcatagcttttgtgacatttaaattattgtttaatgctgattacatgttagtctaatttagagatgattagataacatgtgatttagggcctaaaagatctgaaaagagttaaagagagtagtaattagcattaacaattgggtaattaaatcaacaggattctttcccctaatttgtcatctttgattaaatctttttattgctgaattttattttattgttaatctttatttttatcacaatcacaaaattattggtttgccaaatagaaatataagtctagtttattggtattcaattcaatttcttgtgggatcgacctcacctgtgtgagtactacttgattacatgcacttgcgtagctattcataatttttgtgacaacaataaatgcagaaaataagaaatcaacaccaaaatctatattggttcaagtatgataggtcgatgtgatttatggttatactccagttctggaacaccaccaaaatctccattattgattgagtaagaacatgtacattacaattgagacagattctctgttgagttttatcaaagtgtttcaattctcacactcttatccaagaattttcttcatctataaaagattctacacaactcaaatccaatctctctcttttctcagtacctctctctctacctctcaatcttttctcctcttactctcaatctcaatctggatcttgttattaaaatgacaagtcaaggtagtatttataggcttagaattgaaatcttaaagtcggtggctcaaagaatcgaaattattaagttagttagacaataactaatcttaactaactctcctaggagcgagatctccatgtcagcataagtcttagtgcatctgggaacatatgcgtgctaccaaaatcacggagcaaaggtactcgctggagaggcttttgaataggatagagctaggttgagtcgactatccggaactgccttcgagggagaacaaccttctaggaagaataactacctgtctggaactcctttttggaggagggccagctatcttagaagactgagcccgaagtgggcatgatagtcatctaggaactctctttcggactcaactatcattccacaagaatcgttctgggatggacaagttagctatctaagaataacattcagaagacacctgattttttaagaataacttttgcaaacttttttatttggaggaactataccacagagtttttaaaataaatggcgtggcactgatgatgacaatggattgtagtctgttaccaagattttacaactatgattaattttactatgagagttccctactcaaaagattttaaaataattattagaagtttttaattaagagtttgttatccagatttttaggagtgtctctaatctgtgttacttatggattagttgtgcatgatcttcggataaatacatataacttatttgactagatatgaatattcttattattctgattatcatgccataaatagtatttatttgataaacatgaaatgtatagtattcataactagcagcttgtattgatattattatatttttaataaattttttcattgcaaaaaatatttatatctaaggaaagagaaatttatatttctttatttttgtagtaaagtttataggatggtttcttattttattcgttgttatatgtatgttgttttgttttatattttgtagtacctatggttaagttgttgaagttatgagctacttgaagaaatttcacaatgcagcatacatcagacaagttctatatattttaagagcatttcatgattgttaaagtatttacatttactatctgtagtttttaagatttatatttggtaaactgaaattttgtttgtattgtcttgctgccccaatctaaggttcagtaaacaatcgctggctcttgaactttcctgaaaaaaacatctttgacataccaactattcatcacatagcctggaagttgtattttattcttggctcccactgaccaaattgtttttgaattttcatgttccttatttaatagttgacatttattaccttaaatatggtcttt

SEQ ID NO: 45610 - DNA, 1907 bp, Cannabis sativa
ttgtgttacaatttattattacaattctaaactatgacacttgtatttttgcattaaacatacgaacataaaaatgcatatacacatgaaaaaaaatatacatatattctaaaaatacatatacatattcccataaatcataattcttcgttaaattaatctatatatttttattttttatatgaatgtatacaaattttatagtttagagggaatttttgtaataaaataaaattcagtgggcaaatagttcaacgagtacaaattctatttattatattgttgcaaatttcgaactcctttaaaatatttaaacacgaggtgtcttcttaaaaataattagtcgctttcaaaattagttatctatttaattacaataaatattcttaacgtattatttttgttgtaatttttttcatcttattttatttattaattttttgtcaaattaagtagattatttaacttattttactaattctgttattaataaaattatacaatttttcaaaaagaaaatcaagtaatatagtagtatttatttttttgatctaagtcaaatattgtatgtatagttttttagtacatttttcttaaaaaaatgagattttaatatttaattatgtgattgattgggacaagatatcgtaaaatacggttgtttaatttttggtatagattattagtagatatatacatcctcagttttgagtttgaccgtcaaataataaaaaaattatgaaactaattaattatcattattattttagtacgtaaattgattagactagttaatttgtgacaagtgccaataaaaataaattaatatatatgttatgaaataatgttggaaaatggtcaactcaaccaccaccatgttttatttatctatttttaattgggggttaaactatagcaaaaataaaaataattaggtttaaaatggttggaaatttctatataatatcaagaatttataataatttgacatatcttttacaaaaaattactagaaaaaaatgttatttatccaaacacttttttacacattgaatttaatttattatttttaagggatgtaattaatcaaattaagagattaagagtactatttagattcgatccaattatatattaattaaatactaaattttactatctaatttaatttatttcaattatttaatcgatccaacattggattagatcggttctatttatatttcttgtctatttgattaatttatatttatcaaatattttgatattttaaatacattaatatttgttagattgaatcgaatctatctaataaaaatataatattaatttttatgtatgcataaattggttttttttttttacgtataacaaattaaactacttacttaaattaaatgcaaaaatattacttcgtccaatttaatgttgaatgtatttgaatttttaaacagttcatctaacattcgattcgatcacaataaaaaatctaatatttatgcccactctaataggcatggttgacactattgtcattggtgtgcaagatgggctactgcacaggaccaaaaattatataaggcctaataaattttttcttcaataattttttaggttttttttttataagatcccaacttttcaaggggctactatttattattattttttttatcgtttttttgaaattgtattagaatcaataataatttaataaactagttcgagtttttttttaatgttttataaaatatataaccgtataataaaatatttaaaaatattaatcataaattgtacttttcttttgttgttaagaactcaatttttaaaattaaaacaagtctctaaaatatttaggagaactatcctaataggttatagttagttatagaagaaccaaagtt

SEQ ID NO: 45611 - DNA, 4874 bp, Cannabis sativa
tagaaacaagataaaatcctaaacgaatctaagtgttttccaattgctttgtctctttaatcttaaaatatcaatgggaaatattttaaccctcctccactaattgtggatacaatactaaaaaatctaaactaaatagtatatgatcatttcttatatgaaatttatggatattttcaactcggtcatctacaatattatttttttaagaatgtgaatactttagtaatccatggactatgataggttatggcatgatattttttaactgttcaaacttggtttgctagtaaatctaaaaagctagctagctcaactgtgcctaatattacccattggggactcatttttaaaaaaaataaaataaaattatgaataaaatatgtaaaattgtttttaaaatattatttatgttaataatttgaaatagacaatgtcatctaaaaataaaaattaaacagaaatggggctattatctcataatattcagggatagaaagtgccccattcctcatttaggcaagaaatccccacctcattaggggtcggtacccgcagaccccactacaagtgcaattttcatccctaattgaaatttgttttggtagtgtaatgtggctttttgtattaaattaaaggaagttttcaaaaatattttgtaaagttttaaaattacagatatacattttactcagcaaaaatactaaactactaaaaaataatgagaattcaaactcacggtaattataaataaactatataattaacaagcaaaattaactagaaaaacaacctcatgacaaaataataatacaatttataaataaactacataaaaaaaatggtttaattattatttttgttgaagtgttatttttgtaaataaaaaagttcagagtaaaaataatttttttttgtgtccatatatttttgtaattattttttcaaatttttagtcaattatataaatttttaaattaatctgtcgaatattgtaataagattttttatattattaaaggaccttattattaaattaaataagtagattttaaatatattgtaacaatagcaatttttagtttggaagaaatattttaatagtctaaataattcaggagatataagtaatacgtgtcaaaatttggaaggaacaaaaatagaaatgaagagaaaattttatattattgatctcaatatcaatacatgagttaattatttggcttgcctaacatcatatattgctatggtctgaaggaccctgcttagtgcaatatgatcatatcttttggtattactaatgtgtatggctactggaggatgtgggggggatctgagtgagacggtggaggatatagtatcaatgacaagtaagatgggagttaacagtgaggaggattgggaggagaatgaggaggctgcttcatcttttggtgaacattcattggtaggaagaatgattgctaagagagaaattaaggaatcattgtttacaacaatctttagtcgtatgtggaaaggtattggaggatgggaagttaaggttttagcagaggaagaagatgattcttttgtggggataacgtttaagaatcaagaggaagctaagggaattctgagtaagcaaccatggatctttaatggtggactcttattactggaaagatggcctagttcaggtcagtggagagaggcaaagcttgacaaggtccattgttgggtgaagatgaaaggttggcccattaaagctttcactagagctaatgtgactcgtttgggggagatggctggagacattcaggaaattcggtggattaatgagagtaggatgtttttgaatggatttgtgagaatgaaaatcggctttcctttaaatcagagtatttttgtgggaaggtatattccgtgtggaggaaggaaatattggattcagttgaagtttgaacgattacctacactttgttttgcctgtggagtgtggggacatgaaaagagagaatgtagtaaggaggtttcaatggaaatgtctgtagatggacagcaagttcctcggtatggacaatggttgcgagatgacgatcccacacctcattgctttagtgcttttagccagagtcaagcacaagagcaggcacaaactaggccgattgtggaaagcagaggggaaaggatgacgacaatgaatagttctgatggatgctttgaggtggtgccgccagcaagagaaactgctggggagaaggctctgagagaacatctccctgtaactgtcaagagtagtggagcggttatgtatgacaagggttcaatcgtgggggagggaactaattcagctaatatgccaggtggcaatggagtaaaggtgacgtgtttaagtgatgtgaatcaaatgggtcgggtgggggttttgaataatactcagcccaattcaatgggccagtctcacacaaacaatattaatcacctaaggagggctgctataacagaacatgatggtcagctaggggactcgattcatgagcagggtacagaagggaatgagaatgaagcaaagaaaaggaaaaatggagggtctgctagtgagactgaggaggagagagaacgtcaggcacttctaaaagggaaacaaattgcttgtgaccaggggattagttcggcttctggggtagtgaatattcataatggtgagggagagaagttgggcaaggaagtaggaaaaaagtttcgattaagaatagggcacgtaatcatggcaaaggaagagcaatggggtctggtgcgatctcgggtatggttgcaagctcacgagggggtgtggattttaacacaatggggcagccatttgttttcggtgctgaggctgtcaatggttcaggtgcgggggtgattaacgctgaggtgagtatttctaattgtactgatttctcatctcaattttcaaatgatgaagcaacgagtcttgctaggcaagaccgccgagagcaatgaaaatgcttagttggaatgtccaaggtattgggaatccttggacattgcgtgctcttcagtcccacgttcgggatcatgacccgagtatcatttttttagctgagagtaaattaacaagaataaaagctcagaatttatgtttaaagttaaattttggacagaatttttgggatgtggatagagttggtatgagtgggggtttattactattgtggaaagaggagataagtgtgagagttgattcaagttcgccaagtcatatacttgcaagggtggcaggcaaggatttctttccttggactgtaacttgtttttatgggcatcctgatgctgcgcaaaggaagttctcatgggaattgttaagaaatcttaaggaggaaattatagggccgtggctgtgtgtaggggatttcaatgaagttgtgagtttatcggaaaaggagggaggtcgaattagaagggatgtggcgatggaggactttaggacagtgattgatgaatgtagattaattgatttctgctcttcaaaaatagatctaacttggtgtaatggacatgagctaaatccggttatggagaggttagacaggggattatgcaatgaggaatggttgctgaattttgatggagctgacatcatggtattagactggtgggaatcggatcatagaccattggtagtggatatgctgcttgatgcagaacgggaaaggtgtggtaaggtgaagcggaagggtcgattccactttgaagaagcttggtgtgaagagcctgaatgtgaggagatagtggagagggtgtggaataatgaggaaagggtggtttctccgggggtttaaagtaaaaacaaggaaggtaggtgcggctttacatgtttggaataaaaaaaaaagaagaaaatattgaaagaaagaacggaaaagttgaagaaggcaatatcagaattatcgggtagacaagactcaagtacttggggggagttgaaaacgttagagaaacaattaaatgttgtacttgagaaggatgaaaaatattggcgccaacgaagtcgggcattgtggcttaagtggggtgatttgaatactaagtatttccataggaaagcttcagctagaaggaagaaaaatgaaattaaaggtctcatggatggtatgggtatatggcagactgacattggaatgatcaaaacattggtggaggattattttggaagcctattctcggcttcgactctcaatatggagcaagttgatgaggtattaaggagagttcggtcgaaagttacaaatgaaatgaatgatgacttgctgcgtccgtttgtagcagaagaggtgatacaagctgtcaagtttatgaatccagttaaagctcctggagtagatggattaccagcactgttttatcaaaaaatttggggtaaactacaagttgaagttgtcacggtgtgtttgaagatgcttaatgaagatgctgatttggattgtttaaatgaaacaattattgctctaattcccaaagttgagaaaccagttcgtgtggaagagtttcggccgatcagcttgtgaaatgttatctacaagattgtttcgaagtgtcttgcttgccgtttgagatcccctatgagtgttgtcatttctgacacccaaagcgctttcgtacaagagaggttgatacatgataatgctattattgggtatgagggacttcattgtatgaggaaaaatagatttcggaatggtacaaaaatggctttaaagttagacatggaggcgtatgatagagttgaatggcacttccttcgggtgatgatggtgcggctgggatatgacacagcttgggttgataaggtgatgagatgtgtattggaatttattttaccacgatct

SEQ ID NO: 45612 - DNA, 1065 bp, Cannabis sativa
aacaacaacaacctaatatccaacctgttgttcctcctcaactattatgactagggtagtagtacactacttattggttttagcccttttatttattttgttgtaaaattcttttttaatctattatacaaaaggaaaaaaaaaggaaattagagcaaatatcaaaacccaaatttcaaatctagatgtatgacaataaaaaagggctagaatccccatacaaagtattgttttttaataaatctaatcaatccattctctaacttgtaaaagaaaagccattgttttctgtgtcatttcttcctaaaaaagaaaaaaaaatatagctatgatttttttgcctttaaaaaaaccacacaatacacacacttgcattattataaaatataaataaataaaaacaggttcatcgattcaagctatgtatactagaaatatatgatatatattatcaacaacaacaagattaaacaataataaactttacttacataatatgggaatgagctaagcctaggatactagttgagaatattaaaaagaccaacttacattatttttatttaaaagcattactaatatgattggttcatttgggtggcggctgagattatttaaagataaagagttttcttctctctctttcatttcaaaatgtatagacttcaacctaacctaacagaatattgctataagctaactatagtttaacagtatgataaagtgttatataattgtagggatggtaaaatatatcttcgtgtcatattttatgtgacccgtttttatattgtgtcagacgtgttgactcattttttaattcgtgtctaattttcttaactttaatccgacccgtaaaaaatcatgtcgtgttcgtgtcaactcactgtaacccgttttgatattattgaagttggcattatagagaaaaattacagatttagattcaattaaaaaacttatatacagtatatataatttgttatatatacaataaaaattaaaaaatttaaatattttcaattttatgttaaaaaaaataatttaaaattttttaacttaaca

SEQ ID NO: 45613 - DNA, 2822 bp, Cannabis sativa
  modified_base (2245)..(2248): a, c, t, g, unknown or other
aatttagaatatagaaaaaaataagaaaatattaaagtaacaataccctaatcaaattaatatttttttaaaataaataaataataattaagaatattatgttttttcattaattaaaaatattatgttaaataatggtataatagtcactgaaaattaataaaaaaaaaaactgttaatttaaaaaaattgttagtttggcatttataatagatattgataaaatgaagtgttgaaaaattgtgaaagaacgaaggtgaattatgcgtaaaatttattaatttaatgtgatgatgccgctcatgatactagttttctgtaaattggtttttatgtatacataagaaacattaatggttagccaccctgtatccaatcccactaaaatactcctcgctcgccagaaatactatctatatatattatgtaccgttccaacctctattttaattacctaatctgttgtcgagaaactcttatacaatgatgcttaatgatgatgtttttatagaagacgcataatcaaaactactaaaacaaaaaacccaactagataactgaatcactagtttgataaatcgtaacaattcttaccaataattaagattaatgtgcttaatttgtaatttttatcattgcgatgcatattaaccaaaagaaagcaagggttatggcaaaaaatcctccatatcgatctatatatctatgtatgagtttttaagtaataagaaaattatttcattcggccccaatctgttcccattctaggttggatcaatattaatatccatatgagataatggagattctaaggccgactgtgatcgtggtgcttttggtgttgtttttcgttcttgcaggaattgtgttgaagatttgttttcaatgcatttagatagtactggccttcatttttgtaagccatactatttgtcattatttatgtatttcgttatatatgtatcaatttagttggccagtgatttggcatgatactttaaatgaaaaaagccctactattaattcttcttcataaacggacgattgggaattaaagtgagtagtgagttgatcaagtgtcgcatcattaatatcattactatctagtacttgtcaatatttctaagtgcattttcatgtctcttgtattatacattccattagataaattagtaataaatctatgatcagtttgtatataatataggacagaatgataatatataataattaagtatatgcttacttgattgatagtgcaatactatcaactaagtcttcttccctagatctctaaatcagaagccgtttatttatctaatcatcaaaaagtatacaattgtgatgagagaatatgtatttatagagttagaatggaacttagctacataaccctaacttagctacataatccttgttggaccgagcttgctcattaaagccttcagtcaactagaaaagcttacccttctgcttcacatagactttacacatgcagatgttaagcccattaactattgattaccaataatatgggctaacacggcaaaaaaaataaaaaattatccaatgaaccaaagttttaataaaactaatagatattaatgtaagcccaaataaaagtctaacattctcccacatgggctacattaattttaatacatatattatatatatatatccagaaaatattgtttgaaaatgactcaagggtttgaacaatagaaaaacatttgtggctactttaaaaatgatagttctttgatgtagcatctcaacataccagtctaatttaacctttgataatgaactatgacaatcatattgtttttaaataaacaaaagacattcataatcacaaataccaaagtattaaatcgacatgatcaataagtctagtagtgtggtaagaaattatgttcaacatgtgatcaatttaaaataacataatgtccttatcagtctttaatttcactgataccgtgatacttaataaataagccaattaaattaaccatacaccactttataaataagtcaatgtcactaaacttgcttaaaaaattaagccagcaaaatatcattgtcattaagtaattaaacttaaaatacaataatcacaacaagatatgaactacatactttcaatttaatcattctcgagaatataacaaaacataattgaaagcataaacatttgataaccaaaaaaaaattattggcccaccaagtagttcataacatnnnnaagtaaattacatataaatgtaatctcaaaagatagaacaagaaactcccactaacccaaaggaacaaaagattataaaataacatatcaataacatgtttattaaacaacacaacacttaatcttttggttagagaatctgcaaacatcgacttgatcttacaaaattctatcacaatgtctcttttcttgaccaacagtgagatactttatttccatatatatgtttgaaatcactactaatatcattattctttgaaaagaaaacagcagtattataatcacaatagattagtataggaaaggaaatagaatcaactagttgtacctctaaaataaaattctttaaccataaaattcgcaaagatgacccataacatcgacaaactcagcatacataatagatgatgtgactaaattttatttaatactttttcaagaaatagtagcaccagccaaggtgaaaatataaccagatgttgactttaaataatctacaactgctaaaatttgaatctgaataaccaacaactcgaagaatgtcgacatgcttatacacaagcataaaactctt

SEQ ID NO: 45614 - DNA, 1952 bp, Cannabis sativa
  modified_base (44)..(44): a, c, t, g, unknown or other
tatttaggatgttaaataacacacttgtgagtagatctaagatnctggtaaaataaattctaacactcaatcttccaacgaaactctagatcgttgggcgaattgataactaccctagaatcattctctataataataatattccagctttcatctttagaaacttccaaagccaaccagcagcctgacacttctccacaaatagcatcaaaaaactaactctaatctagctatatgcatcccacacaccactccaaggtggtttctagccacaaccgcaatgcacttgctttccatccccactttaacatcacaattaaacttaatccactcttgagggagaggctgccatccaactaccagacacggagaaggagtagggaaaatagaggctctgtaatcttcataagagtaatgaatagagtcaatacaatgatttatattaaccagtcttctattgtgtaccttgtcattttgagttcgccaaattatatcaacgataatcgaagcataaagaaacacttcatctgtattaatgctttgttttcctagtggcctgatgaatttaacccagtcccacatttgaatgccagacccagaaatggggaatataccccacggggatgaacgccataaataaaaagccaaattacaagagagaaataagtgctctatcgtttcctcatcacccccacacaaggggcaggccacatcctctaaatggagtctcttagaaagaacaacacgaactgggaaggccttagagaggatacaccaccacaatatcttatggcattccaatatgttactattccacattttattccagacggacggtgcaacttcataatgaggagccctatctaaagcttggataagataagccgatttacacgagaagtccccattactcttcttggtccaaatccacctatccttaccctgatcggaaggtccaccccctttcaggatggccaaacagattctttgtcgaaaaggtaagaagattaaccactctgttaccacccaaaactataacaccattcgacttaggataaaattcctttccatgtgagatccaaggattctcccaaattctcgtatcttttccatccatgatcattttacaagcacctttcttcaaaatagctttggctttcaccacattttcccaaaactacgaatctgagtatttgtacttgtaggtaaagaaatattttcctttcatgtacttcgcttccaagaccttacaacaaagagattgactccaagttaacaggttccactcccacttagccaggtaagcatggttcatttctttagtcttccagaaacctaaccaaccccgggatttgaaaaggcacaatttatcctaagcctttagataaatctcatggtttcctttctcataaccccactagaaatcacaaacgatgccatcaatcttattaacaagatggttcgagagttttgtaatatgcatggacagacttacagactcaataagagtagctcgcctagctttcgaaataataatttccttaaatttcccatctaaaatatatataatttaaaacttttatatcccaaataagattttatgtccgttacacttgtgggtttattttgagcttatgaaaattatttgtaagttgtacaaaatataaattttttcataattaactaaaaaaaatataaaaaatttacaaaaatatgactttagagaattaaatatttttatgaattataaatttatatataggactattgatttacattattttttttaatgttatttttgtgttattatttttatattattttgtgttctttttttattattttcatattgtcttatacgattttatataaaatcgtaattaggacccaacaaaaaaaaaatcgtaattaggattaataaaaagggaaatttttatatatatacattatat

SEQ ID NO: 45615 - DNA, 2330 bp, Cannabis sativa
tatactgccagggaagccaagatgggccggcgttcgtggtgtcatccgggcagcgttttccggtgaaggagattgatttcgggtggggtgaaccggttttcgggtcgtaccatttcccttggggtggagattcggggtacgttatgccgatgccgagcgccgccggtaacggtgattgggttgtttacatgcatttactgaagaagcaaatacaagtcattgaaaaggacgctgctcatgtttttactccattcaaatttgattacgtcattaatattaaaaataagtaattattaaacaacaaaatttaatcaattaattatgccgttttgtttttaattacctatacaaaatgatgaataggtgatgatcaatttgctatagattatcggtattcatcaattttgtagcaataatatgtatttaaatggatcattgttcacaaaagaaaaaatcattgaaatggatatatatatgtataattatatatataaatttatttatctaataaaaaaattatatttatatatctatgtgttaatcttcaattttcgcttataatctatctatatatactagagttttttttgccgtcaaatcctacttgcacttatctcaaaagagtactttaaattttggtgggaactaaaactttctaaattaatgaactgttagcaaaggtattgtctaattaatgaactgttagcaaaggtattgtctaattaactagtatcatgaactgtttatatgtatactcttatacatgttggcatatttatattatttcaaaatttcttttaaaattcaaaaaaattataaaaataaaaaataaaaaattataaatattataaattttgaaaatatttttataatttttaaataataatattgagtgtaccaatataaatgtgcaacgtacaagagtatatacataaataatttatgttagcagctaactttgaaaaatatatgataccttaaacttgctaacagtttagtagtttggaagattttaccaccaaaatttgaacttggaaggttaactgcattggattgatagttaagagggtttaaccgcaaaaaataaaaatctatacattatactagtttgggtctaacgtgcttcgcgtgagcccgtagttaaataaatttttaaaaatttataacatgttgattttgtgtcttggtctttaatatttttttctttttttagagctaaataatagtttaattaatagtaaattcagattgttagaaatttataagtaataatactaatgcctagcaccactcaaagtgtcttattactattaataaaattaagtattgagtctcacataacttaatatatgattgttatagaataccgctactcattctcaagacgtcactttattatagtagtcctaaacagcactggtgcttaatagcaatatttttttcaaagtaacaaacattgaatacaagtaaagaatctattttggattcaacaatggaccattattcagtaagttttctttaagaagagctcttttttttatttattctaaataaaagaaacattgcccttaattaaacattacacattagcatgttctacttaaaagagtgaatatgagtagacaaaaatactctcgatcaatataaaataccaacaaactggtataagcacaacaaattaaattaaaaatagggaaagaaataaaatataaaccctaaattattatagtattattatgaaaatcctgaatttgttatttttttcaaaaaaaaaaaatcaaaataaaattttatttaaaatatagaagtataaaaataatttatgcataaaatacaacattaatttcataaaataattattacacaaggctgttaaagtaaaattaaatttatatatgtaaaatttaagattaacaagttaataattaaaatatttgtcaaatgatatttttgtaaattaatatggaaaaactaaaattattagcacttttattgtagttattgattgatttgttgcatgattattagctaatatataaatattaataggaagtgattaaaaaccaaaaatataacaccaaaataatgtaatttatattaaactacaaaatattttaatgaaaaaattaaataaatgttaatacgtaatttaacatgtaaaagccgaaaagttattgatacttttatgtatagttatagataaagtagaagtataaattagtgatgtggcactctataattattttattctcactatgtcttctctctttaattttttcttttttttttaattttttattcagttaataaattttaattattaattaatt

SEQ ID NO: 45616 - DNA, 1571 bp, Cannabis sativa
cttaatagatatatggatgtcgggttagggcatcagccttgccttattaggcaaagggatataagaataccgaggagtggtattcaggttatttttgtgagacaacagtgataagtcgacgatcctatttaggtagtggcagtgatatgaatactggggagtggtatacgggttgtctagtttgaaaatgacggtaacattttgatactagggattgggtattcatgcttcctggctcagtaataactatgacatttagataccagggattgagtatcaaggttgttttattaaacaacgacaaagacattagtatgccaggtgaggaatcagagttgttttcctaagaaaatggtgagtatggttactttatgaagtaacagctatagttattatcattggactggtaattgtgtatagttctatacctttatattgatattcattgtgtttgagtatctatactgaccatatttaaatatatgagtaatgtacaattgtttgattttgatgatgtgagtttacatggtgatatttgtgtgatgaattatatgatttttgttttcacttttcttgctgagtcttcatgactcacgggtgctttgtggtgcaggtaaggacaagagaaaactagagcaaccataagatggcagtcttctccgacaaatgtacatattgacttatccggcttgtatgcttaagttgtcaagggttgctttgggttgtgcctgatgtgtattttgacttactgttgtatatagttttagcaatgtcatcctatttattgctatattttattttggtagattttttaatattatcacagataactctagataatggtacatgcatattctagataactctttgatattttgtgttcacacttgttgatgaaatccaatggatttgtctcgatgctatggtcgagtggatccagatcaatagttatcatcatattttatgaatatcagatatcccattatgtattatatttgtatcctattgatacaatatgatgcataattagtttttgtagacattagtgtttcttgaaatttttatctgttgacactattgcatagtgagagcacatatatgtgtaattatgtagtccaagtggaggaatgtcagaatattttatgtgtggaccaacataattaagtgttcctcactcagtgttgggtattaacatataatgataactatataataggtaatgcatggaattaccattaaaaaataatgggatgggcataaagtaataacacgcttgaggtccatggacacgctccaaagcacctttggtcagcccattgggctaagaaaactaattctctcacattgggcatgtaagcctaattggcccatgattccttataaaagggttgtgctctttattttgtgaataaggtgtgagatatgtgtgcataatggtatgtgagagaatagaagagtaatgttcattatgcccaagctttcttgtttttgctctatgtgagtagatcaaagaagtttatgaaatcaacaatagttcatagctcttgaagattcaataccaaatattaaat

SEQ ID NO: 45617 - DNA, 1678 bp, Cannabis sativa
actacaaatcccattgatgaaaactcagtgagtttttctttatcacactacaattcacctaatttcagcaaccaatttctcatatatatcaaccaatgagtagcaaaattttgaataaagtacctgactttcttgatgagaatagctcggagtttacgagcaagctcttgtgatcgaatcttaagttgaagattcttccttgccaatacacgcttctcggagttcttgatgtgatgagtctgctcgttcttaataagtcgctcgatcccactcgattgcatctttcgctgcataaacgttagggcacgctccaggttgccatcaagcaccttaaccctaattcctctgcattgctgaagctgttcattcggccgtttcaatagggttgccgcatgcttcgccactgagttcattttacacaaatcggttgctctgaacaaagaaattttgtacctttaaacaccagatttcaccaaaaacaaaacaaaaaaaaaagtacaaatttgtaaacccatcggattattgagagagagagagagaacctggccgtgatataaggagacaagaaggaaggagaggcgcggcggagccggagacggagaaggagacggaggtcgagggtgtgtgtgaatcactcttcactttttatttatttatctttattttttgctaaatttatttaattattattattattaattttaaattctattcaactagactaattcggcatataaacgagacacgctagtcataaagtgagcaacctgattagccggctgtttgacaaaacgttaagaaaactaagaaaagataaaaattatttacaatcttcaatcacaccaccaaaagtgaatgacaaaacattcaaatttctaatcatttgtaccaatactagataataagattagataatactaacacttgggaaagcacgcttcaaccacgaaagcacttccttgacaatcacggcttcaacaatctttagaagaactcgctaaatctgtagtcccgaaatcccagccatgacccagccttaatgatctcgaacaaccccaccaaaatcatgccttccctcctcaccaaacaacgcaaaaccaatattcacctcgagttgttcataatctggttcagaccataactcagtctcatccaaaagataccaaatttcaatcgaaggaaacaaacttctttctcgagcttttctccactgatcaagtgatatgagctaaaatgacaacgaactccacctgacttttttttacctttccacgagagttgattctgtgagaaccgaattgtccaaaccaacatcaccgcatggacactttgttcctcacccaaccatgagaacgagtgaaaaaaccaatccccaaatgaccctaaatcaatttgaactatagccaaacccgctacctgccaacatttgtctaaaatcacagaaaactaaacaatgttaaattgattcacctgccccatgacaaaccagacacaacaaaaaaacatccacatgtttagtctccaactgaactctcattggaagacgcccactagccaccctccatacagttttttgcttttagaggaagttttaactgccaaaacttcttccaaaatgccacaacctgtaacaattttgtaacgtcctcgcttcaagcctccattgggtccttacacc

SEQ ID NO: 45618 - DNA, 1277 bp, Cannabis sativa
aatgtaattttcttttgttttattttttaactaatgatatatgtggtgaataacattttcaaattttttatggtatatcctcgaatataatctagctaattattaaattttgtggtctagaaattgtggatccaaattctctatcccaatttttattattttaatatactttcaaagtctcatgaccttattttatcttttcgagaaaaacaaaaaatattgagtaatcctatatactacctatagaaggaaacaagataggatagaaaatatatgaatggattgaatatgcagaattctatttgtaatttgtaataaaaataaaattataaaggtattctctattttattatttttactattgtatacaacacatatttttaagcgaaattattctatatactagtttttaatttttttttttaaatttacagtttaggttgctcagtattttttatgtgggttgcaatataaattttagttacgatttaagtttctctgttgattgctatgtaggttgttatgtgaatttccataaaactatatatatatatataaaaaaatacttttaaagtgtaagaataaaaaattcctatttttaatttatactattttctttccttttgatcacattcgaaatatttatatatatatatatatataaaataaatatattttaaatataagataaacattaaaactagaaaaaatataaaatctttttgagtaaaaaaaaaacaagtcaagaaagtatatatattgaaaggaggaaaaaaaagtattcagagtaaactttaagattaaagtgctaattaattatataagtttttgaggtgtatctattttgtatgtgattcttgcataaatatgtttgagataattaattgtttttatacatatattttcacagaaccttatgccattggagtaatatatagtgattcaaaaggaaattctcacacagtgttagttaaacacaaaggagaagttatattaagtgctggtgcaattggaagtcctcaacttttgctactaagtggaattggcccacattcttacctctcatcacttaatatcccaatagttcattctcaacccaatgtaggagatttcattgttgataaccctcgtaacaacattaatctcataatcccatcaccaactgatccttccccagttcaagttgtaggcattacaaaccattatttcatcgaaaccatctcggctaatcttccagcttccctaactccgttacctttcagtgtgtaccctaagtc

SEQ ID NO: 45619 - DNA, 1154 bp, Cannabis sativa
ttttgttgtttttgtgtatttgtgaaataatctttaaatggaacgtgtcaaagctacataaaagataggacttttttctataataggtcttttagattcaaattttatatttttatctttgtaaggaaaaattaaaaaaaaaaaaatgaaattcaaaacttttttttttcaaaaattccaactgaacaaacaatatgcatattcttcctcctttgttcccagccacactatttcagctccaaaaaaattgtccaagctaaggttgcaatgtaaatcttagcaacaaagcgatctaaacctgacaaatatccaaactagaaaaaaaagagattacaacctcctttattcaaaaatatacaataacaatccataaataataatttgaattctattgtggggcataatttgatcacaacacaatcaaaaggggatttggtgcttacccaaaaacaacttaaaagaatctgacaaaaaatacaatgtaccaatatttttagtgttttcttcataatgaggattgtttattatttttcaattagatcaaacataattcataaggtaaattggttaatttgatggaattgatgcaattagtttataattgaacaactactgatgcatttaatatcatttactgtttgttgttaggtgggttttatggattaaaatagttgtttagaaatattaataccaaatattgagaacaaatacaaaaatttctggatatagaacttctgcaaattttactacaaaacaatagttattgggatgacaacaagcagtatgttgattatgaatcaagtgtagaactaatatcaagggattgtatttttgctgaactagtgcatataatgatggaggaactacaatgcaatcatgaaacaactaaaatacaactgaaataccaactgaaggaaggatgccaagttgccaaccattccaaatcaatgatgacaaaagtctgttgttttacataaagctattaaacaataaaactaatttacacggtatctattgtgtgcgaacacattcaacaacacagaaacacaatcttttttcgtagctacccaaacaatagtgtgcaacaatgtgataatgacagaaagtgacaacaactcagtacatacaaatgtgtagcaacttgacaacaacac

SEQ ID NO: 45620 - DNA, 2784 bp, Cannabis sativa
tggtacaatgtttaaaaaaagaggtaaaaatgatagactttaaaaaagagggtaaaaataaaagaggagaatataaaaaaggcatagagtgtaatttcctctagaaatatttcaccatgatagttaacagctaaaaataaatgaaaatattaaactgctaacaaaacacaaatttagagaattttaccactaaaattttaaaattggaaattagttacaataaactaaatacttatggaggttatgccgtaaattactcaaaaaaaaaataataattattatacttctatttttattaattattactagtggtagattaatttatcttattttgtaatttttatttactgaatttttttggctcatagaaacaaaaaaattaactgacgatgtgacactcttattcagcaatcattaaattttctgtcaaactagacctatagtttgagaagttaactcttgaaaaggattgcccaaattaaaaatctatttttaaaattgtagcattaatgaattatttcaaagaaaataaataaaatataaataagagaagaattatggtctaattttagattataacttcttagtcaacatccctaataaaaaatatatatcatatttttttttatgacggtatttattataattaccacaacataatcctaataataattttttaaaaaatttcaaacaatttacagtagcaaaaataaatttgaaaaatatatcatgaatttactcgtggcaaattgaaatatcaaaaactttgttttttgtattgtaaactatttaaattttttcaaaaaattttagtattaatattataactataacgaataccattataaaaaaaatgaaaaaaacaatattttaaatataatttcaagcgtaaaaattaactaagaggctataataatatattataattaatactcctttaaaaagattgaaatatgagcattctcatcagtttctattctatctttaaaatacattattaaaattttatttttttctattttacatctaatttttacattacatcatacattaacttttttaaaatacattaacggaactctatatttttttttcgaattttaatatattttgattataaatatataatagtaatatatacatatatttctatacaaaaataattatcaaaactcaaaacaattaataaaatacatatagatcaattaataaagtatatttaaagcaattaatattttaaagataataacatatatacacatattttattgattgctcttagagtatttgttgtggtgtatttttagtacggttttttaaaatttttaaaacttttctattttaaagaagctgttgtaagtgttctaactcttttattttaaagtttctttaaaatttactatttatgctctatatttagagaatgttattcattactctaaatatatttttttaattatttttgtatgaggatatgtgtatatattaatatatatttaaaataattaaaaatattaaaaaaattagagttttgttgatatattttaaagaaactgatatatattgtgtaatgtaaaagtgtgtagtagaattgtgaaagtaaaattttggtgatgtattttaaataatagagtaaagaagctagaagtgctctaaatgtagaacatgaataataattttttaaagaacattaaaatgaagaaagaatttagagcatctaactagaagtgtttatataatttttatattccaattaattcaaattaaaccattttaaaacggaccaaataattctaaggtgaattatttggtcaattcaaccatttaaaattttctgattgagttgtaattcaaacaaaactaactcgtggtataataattttatatatggttaatgtatatttgtatttttagtttgggttttaatttttttttttttttaagcgtttatatattacaaccatgttttacctgggactcggacctaggacctccaacacgcacacacctacctatggccacttgagctagcctcaagtgggttagtttgggttttaactggttctaaaggttgttggattatgtagcctcatgtctttatctttagacccatattgaggggtttcgtggattagtgcttctcacaaaacaacttgtccctattaatgtattctgacaaatccacctaatcaaaccctaataaattttctacagttttttcttttcttttatataatataataatatcataatggaagccaaaaacaaattatgaggtttgtgagaaaaacaacaatttatcaaatgctacaggtcctacatgctcctctctgctacagcataaatcattgtgtattttgtaataacttcttaaattctagagcatagaagaaaatatatttattaaaatatcattcattaataaatatgataattaaaaactcaacaagcttgaatttaaagaaacaaattatagccattaattttgagattgatatgagtgagtgtgtgagtttcatttcatttcatatgagatgagatggaaatggaatggatattctttactttacaaaccaaacttaagtccaacttaattaattaaggcaggcccaactcacaattatttatcaaagtttttaattttgatggtataaaaaagtacaaacccaaccaaaactcaaattcaaattcttacattgaataaattccatatgcccaaaaactttaagggtttattttgaaaatataaaaaaacaacaaaaaaaattataaaaatatagttgt

SEQ ID NO: 45621 - DNA, 1370 bp, Cannabis sativa
  modified_base (697)..(701): a, c, t, g, unknown or other
aacgggcagcgattaaagctttacttgggaggtcaatttgaccaagccaagtccgccatgattctggcgccactctgaagaactcggtcaacgtccggctgtatgatgaaaaagacagcgctattgggaggcaaccaaaattttcttgatgttttagttgaactttcgtattttgtttttagttgtttttattatttctgttctttttagtttatgtttagtgaaatggtgaacaaaattttgttttttttttattttcttgtactgtttagaaaaaaaaaattcggggttagacccagtggccctggcgagaagtactgtggccacggccataaaagaactacagaagcaacattttttcgaggttatctcgccgcggcgaggaggagtgccgccgcggcatacaacctgggcagagaggctatttttccacaccaatctcgccgcggcgagcccattcgtggttgcggcgagaacagtctgatgtgaataaaagggggaaaatcacttactttcaaaaacatatcctcttctaaaccctaacaacctcacctccaaaaaatctcctcaaaaacaatttttcttcatctaatctcatcctacaccattcttcttcaaatcttttcccaatctttcatcacaaatcattctaaactacttttcctctcctcaaacactcttttcctttcaaaatcannnnnaaatccctaaaacctcacccaaatttcaaaaaatcactattcatcatattctacctcaagaacttcaaggtttccttcaatggaggtagagtaaagggggatttcattgatgtaacaatttcttagactctttatgcaattattattgaataattttggattgttggagaatcttgaaattttattttgatttgtgggattttgctcattacattaattggaaaaattgtttgtgattaagaactattctatttgtgattgggttgttactcgggaagtgaatttttaaggggaagtgcttccaaaattttcataaattttttagtgttagaaattatgagagatgggtcctaagagagctagagtaagtgagagagggggagcttcatcatccaacccacctaggggtcactccactgttgatagagcaagatttgtgaatattgaggccccagagcgatttctacaactgaaagatagacacttcattgaagataggggcatagatattggtgaccctaaccaaactagaaacattcctactgtatttgagcctctcaaagagaaaatcatcaataggcgttgtactaaatttgtggatgtcattgagcgcaacaaccaaaccttagctttagaattcttggccaattggccagaaagagaggatga

SEQ ID NO: 45622 - DNA, 2306 bp, Cannabis sativa
  modified_base (584)..(593): a, c, t, g, unknown or other
  modified_base (2263)..(2278): a, c, t, g, unknown or other
aatttattttaaaataacattattataatggttttttgttactttcatcgcgaacaaatctagtagtgtattaaaaagtcattttaagcattatttataacattgtattactttagcgatttatccttatttttaacaacaatgtaaaatcttttagtgtattaaaggtaactcttttttaagcttattttttaattttatagttttcttattatctaattattatttattgttggttattataaattcaattacaaacaatatacatatataagagatagagtattattgaaaaattattttaattttttaaaaattttacaggatatcttagacaataataaaaaaaatttagatagcaaaacagattcgggtgcatcgatacattcattttaataagtacattatagaagcatctttaaatatatataaaaagaaaatgtaaaatatgtaaaataataaaaatctaatatacaaataccttgcttttatttttaaacttatctactaaaaaaacctaaacaaaaagcccttatttcttttccttaaattctccttccatattttttatttatttatttatnnnnnnnnnntattattattattattttgggtaaggctccttccattactccaaacccaaaaacttgggcatgaaaattcatacctatctccatctttcttttcaataaaaaaaattaaaaaaatatccatatttataatcaacagtacatccatttccctcacactccatatataattttcataccctaaatccacatcacctctaaataagtatcttatttataacacaatcaatattaagaaaattacacgttatactcactttttattttttattttaattttaatttttttttattaccctttaatttatacccatgtcatgttctcattatgtgtattaatggctttgattttaataaattatgagaggttatatttaatactttacttataaaataacgtatttatcaattaaaattattttataattatatttagttaatatatgataaaaaaaatggtagttcttaacttatcccctcaatattcgcgctctttttatttgtttctcaattattgtattgtccccttggtgataatttgcaactaaaatgggccaaaaaaaataaaagaggaaattaatttttacactcttttaatattttatttttactacctatttttatagttaatgtacttataatattattttttcaacccaaaataataatttaattttcagtctctaatgctaatgcccattgtcatctccactctttcggcgtggctagcccctactaatcccattcaccgacaattttagcttggtttatccttaaaatttcaaattaactatacacatattcttttactctttcttcatacatataaacacatttaaataacatttagtatttatatacatataaatttttactttatttaatcaatttcaatatgaaagaattcattaatggttttaatttgttggttttttatggtggtggaagaattgatagaatgtatatagaggatgatatatcggttgtggtatatggggagagatattaggcaatctccttataaaagtgagtataaaatgcaattaaaaaaaacgggtattattcaaattatcccaaaataaaatgcaatacaaggccttattttataagtttggtctttttgaaagcaacattcacaatttgctatttgaaaaagttatgatccaaatattgagttccaaaaataatgatataaaaaaatatttcactttttaattcctgatatttttgttatttattttaaaatacctatttattcaaattcaatttgtgtaggttatggaaagatacaattacttagctaacatcatactttaatatgttttgttagaactaaacatgttttgggtagactaattttttttgaattggcataattaaatactgtatttttttttaagaagggtactataggttgttagtttaaaacaaaagtagactattttggttatttatacattcttggttgttagtgagtaaatgccatattttgataatgttttagtgtttttttaatgggatattttaaactaaaagaatatgtaacctcttaaaatgtatattaacagctaatgcttagttattctttctagaagctccatttttgtgagatgtttaaaaaaaggtagtatgtttgcaaattagtgtaaataattgaggaaattacactctannnnnnnnnnnnnnnntcctcttttatttttaccctctttttta

SEQ ID NO: 45623 - DNA, 3177 bp, Cannabis sativa
  modified_base (1960)..(1981): a, c, t, g, unknown or other
aaagatgtggctttccaccttctacgccacctaaactttatgaagatttaattgatgggaatgattggaaggaatttgtggtatctagattgactcctgagtgggcgacaaagagaaaaagtgcctagagtaaaaaatatttacaaccaccgctttggacgaggtggtgtgaggaaagtggaagaagaaatggagaaagagttaggcgaccaactcatcgacattgatagatttgaagtgtagaaaagacttcacgcgaataagaaaggcgagatggagggcccaactgtgcatatcgctaaacaaattgtaagttttaaatataaaattgcatttatatttatatttttcataatttatttctaattcaatttattatgtttgtacgatgactttcgaaagcaagtggaagagggaaggatatgtatggaagggaagaatgacattttgaccatggccctcaggacaaatgagcatggtggtcgggtccgagccatgagttatggagtgacacaaacctaatttttccacacttaatgccctaaaagtcaaaagaaggatgaggccaacgatcgcttgtgagagatagagaggcgactccgtgaggtggaggaaagtaatagataaatacgagagcaattggctaatgatgcttctccccaagatagtttagacatatatcacaaaggtaaaattttattactttgattaaaatagtttcttttttatgttactcaactctctcttgggtttgacctcttacttatatgaacacattatttttgagtatcattcatgcacttgagagtataatatttaaaatatccctatttttaggttcaactatatttatattcaagtctatcaaaagcacaaataaagacacgtttattttttgtatcctgaaaaagatagtttggtggtagtacaaagtaaagaaattatctaggaccagggccaccatatatcataacaagtcacgatgaaatccctaatatttaactaaataaaagtcaatatgcatcataacgagtatcttgttttagaagtaaaccagaccctattggaggaccaatttgaccaagtggactgtaaatttttcctccccaatcaatatatgtagccaagtctttcaatccaccactaaatatgcttgatggccaatatccaatttgatcacgatcttttccaagttgaagcaaccatgtttaaataaaatatacttataaacaagttccatgagtcgtgtcgtgtcaactcgtttataagcgagttgtgttgagatttcattttgacacgattattaaaagggttgtgttgggttgagaatatacctatgggtctcggaacgacacaaatacgactcgcgaacacgaattgccacccctacctcagaccttgacccagacctcgatccccaacccggactgcagacccgcaccttgatccaaacaagacccagacctagacctagaccccggcctagactcagacctaacactcggacccgtacaccgaaccctgaaccccgacccaggactcgggacccggacccgaactcgtactccaacttaaaaacagactccaacccaaacccgacccggacccaaatcccgaccctgactcggtccgagacccagacttggatcccgatcccgatcccagacttggacccgatcccgaacccaaacctcgaccccgacctgaactctgaccccaaaacccatattgtctaggaccccgatctcgaccccgaaccccaatcccgactcaaactccgacctcgggtcctagaccccaacccgaacggaaatcgaagttggggtcgagtttatggtaaagataatataattttacacaagctattaatacaagtcaatagcatatatagtattgtattaaataatactaattacaaaaataactacttttagtgacaaatttttagtcacaacataannnnnnnnnnnnnnnnnnnnnnttttagtcacaacaaaatgttacgaatgactaaaatatagtctttaggtacaaattgtcattaatttagttttagtcacaacaagttttgtgacttaaaatacatttagtcacaacaaattataatttttgtgattaattattttgtcacggatcttttagtcacaatatagaaataatgatttataattaattacaactttttcacttttagtcaaattatatgaacatacgttacaactcaattttctatatttgtttcttggatgttgcaagtcaattaaatattaattatataattttgcaaaaaaacaaatatatattaattatattctattttccaagaatattattagctttgcaattaattattttacgatacaaagttgtctttataattggaagttttttcaaacaatatttaactagtacatcatatctatgacacttatatatatatatatatatattaaatatatatatatttatatattttcataattttccattgacatcagtaaccatgaaatattagaaattaaagttactattaggatattttccaaaaacaattctttagagaaatttattgtacaatacacctcttaacaaaaaaaaaaaaaaagtgtttcgatagactcactatctttttcgactttcaaaatattttaatccttcttttttaattcgtgttgtgaatatttacaaaatttcagaaaattttaaataatttaccgtgacaaatttaaattcaaatatttaattacggctgattttttatacgaatgatgtgctatatttatttattttgtatttttttttaatgagagttaaatgatacttattatttacttcatagtcttcacttctcgtattaacaattttgtaatgatggttcttgctaagatagtttagacatatatcacaaaggtaaaattttattactttggttaaaacaacttctttcttatgttactcagtcatgcacttgtgagtataatatttaaaatgtacccattttttggttcaacttttttttacaatcaagtctatcaaaagtaaaaataatgacatttattttttctcatgaaaaagataatttggtggtaatacaatataaagaaatcatctaggaccaggaccaccatatatcatgatatgtccaaagtcaccatgaaatcccaaatctttaactaa

SEQ ID NO: 45624 - DNA, 675 bp, Cannabis sativa
aaacaaaatttgatgaaaaaaagactatttaaattacactaagagatagaaattattttgagctagagtgtatgtaattaataccaaaaacaacaaaaatgggtccatggagcatatgacacttaagttggctcgtaacatgagccaatgatatggtttccccattggctgttaacatgtcatgtgagatttttgagtttttattatattaatcatgagctttatagaaaaattatcaacctctcaagtaacaatgatagctaatttagttaaaatgtagtgtcaacattgactaaatgctcatcttaatttattatatatatacaaagatttttgaaattgaagtatgatttatgaaccaatattatttacatgaattaagctcaacatgtcatgactacaaatcaatttaatgttgtcattttgaagcatattatatatatctaattaatctagtactagtaggtgtgttaaattaatatatcatttctaaagggacaaagctcataataaggattacaacaactgaacaaaccccttcttctctattatttttttatatactagatcattattgaatggttaattttggacttatctttacttttggacttttaataaagctatacataatttctttatatgcatgtaatagtagtatagtgagtagactca

SEQ ID NO: 45625 - DNA, 742 bp, Cannabis sativa
tttaatatgttatggtttatttattttttgttttaacaattttaatgcacaaagcataattaaattaaattcgtaataactaaattatttacttaaaagttaaaatacttttttttttcttttataattaaaaagggatcacgttgtgcaaatctttttctcatttttcggtcattttgaaaatctcaggaactacatgtcagttataaagactttatatcttatcatcccttaattgggtcatcggtatacacttcaagtgtttccattccattaaagatgtcactgtcacaacaacctaacctcccaaaggattaagtataattcctcccataaaagagtatagtgggattcgaacccttgacacaaacaattaagaatgccagtaaatgcataaaatacttttgggtgcttctataatatgcattctctacatgtttcaacttttagaaaaaaatttaatctatttttttcatatttgtgtacgttataatatgcataaaaaagttacgtgtataacacactgtttaaaccacgttttcagcgtgtttaatttttttgaatttcttaaagattttaagatgtcttaaaaaactataccatacatgaccatgaaaaaattattgattaaaaaattattacagacacaaaaaaaaaaaaatacactctttttaagagtgtgcattgtataattttttaatacttttttttaggtttacaattagaacttttaatgtcttat

SEQ ID NO: 45626 - DNA, 1374 bp, Cannabis sativa
tgccagcaccaaccacccccgacctctcgtctcactaatggaattgacaagatttttttttctatatttatgggcaaaaaaatctgttgaagcttacccacaccccatatattaaataaaaggataaatttactccctccataaattgttattaatcctcctcgtgattatatatttaatagaatttagccaatttaagttagttaaatcgattttccaattttaatatataacaataataacaactaattaaaaaactaaaaaatgaatgaaatgtaattggagaggcacctttgtaatgattgtataatttgggagatttttctcaaagaaaaatttggaagacaagatataacaactccatagtcaatgacagagacaaggggccggaggtggccatggcctcaaattttttttacatacatatattaattataatttaataaaaaaataaacaagtatttattgaatttattttttgaacaaaaaaatattaaattgaagctataataaaaagacttctaatcaaattaaatatatcaaaaaatgtggcttatcattatctagcatatgttattttgtctactagaatgggccaaattacttattcactttctttctaaactcacggattttctaattctcatctcattaatactattacactaactcacttgtccaaacaaataatctcttcaaggcttttctttttttccaaattctagagttaaggcttggtgaaaacaaggaaaataattttgtaccctcttattgataggttacttaagcttgtttttctcaatcatgaaaattatcaagacaaagcatagaaacaagatggaaaacaactctctaaatggttgcttagctatttgtattgagaaagatattcctacaacatttagtattgattccattatagatgagtttgcatctataaaggagcgtcagacaaaatttacttatggtacatgcgtttagatgcatctgtataattactaggtaatgtaattattaggatagtaattaattacacatgaaagtagttgcactacattttaaaatacaatatgtgcttggatgtcaaatagtaattgcatataaattcctattttcatatgagttagtaattatacaacttaataatactaattatcaagaaatggtaatattgtgtaattatacccaattctcagggatcacgagaatttgagagtgtaattgataccccttaattacctccaattatatacctactatctaattaccttgttgaacaaacacaccgaacctcataattatttgaaattacactcaatttcaattgcacaatgtctttccaaacacattcttaaagaaacaaattaatttttt

SEQ ID NO: 45627 - DNA, 1149 bp, Cannabis sativa
tttccagtatacctgtacaacatttaaccaacattttccaaccagtatttcacagaacaaaccaaagaaactcaacttgctattaatgatcaaagttttgaactcaaggctttgtttatttttcctaattctttgtatttctcttgatttgatttagcctctttggttttggttgatatccgtattaattttttcaatcttatttgattttgttttatatgatattaattaataatttagttttgtttaatttattagtgttaacaacattttgtttagttttattttgtattttattttaatttgtatatactatttcattagtttttattactcttctataggtgtaatttgtttattcttttagtttttatttgtgtttattggtttattttgtttgagacaagtttgactactttcgtttttaaaagttttagtcatttttatattaatttagttatatttatattttggtacgttgtattttattttctaactttattattattattattttcttaatatgaatttgtaagttttatttttatcattcgtatttatatatatttattactttttaatttattgttatatatttatatatacttatttgttattatttttgatttgttaccttttactagctcttcaaataattttattaaatgtttgagtatatatgagtcaacacttgttgttgcattttttaataattttgatgcttttttcagtttatgtgccttttatggcgcttgtgccatttttgtggcttgtcccttttagtttagggtaattttgtgctatggtcacttgggaagagaagtaatctattttgtgctcatgatttctatttcaacgacttttctcttttgacagataagtatttcaattcttttaagtccttaaatttaagatggattagtttaccatctctctttcgctttatctttttcattatattgtgtggtaatacagttttatgtttggtaattttgcaggttgtttcatggagagcctacacttacggagaatgtatcgataagtttaattttaaatatattatgttggttattaattttctgcagtttcttattagggtgctattttgttgttactagccaaagggtaatacctttggctagtttttct

SEQ ID NO: 45628 - DNA, 3073 bp, Cannabis sativa
aaactacaggccacatactgtaagcttggctcatgttgccaaatggattaaagccatcgacagctaaaccgagacaaacatttcgaggttcactagcaagattaagatgtttggcatcaaagtccctccacgctgcaccatccacagggtgtcgcatcacaccgtcatcttttgatttatcagtgtggtgccataccatgtattttgccgtatgccttgaagtatacagtctcttcagtcgcggagttaacgaaaagtaacgcatcaccttatgaggcaccttttttgctcctgaattttctgaagttatccatctactagtgccacaaactggacatcaatttttatttgcatattcattgtaaaataaacagcaattatgcttgcacacatgaattgactcataccccagtcccaatttcttcaatcttttcttggcatcatagtagtttgatggaattttatttttctttggaaaaactaattttaataacttcagtaattcatcaaatatgttgttaggaatctttcccctaactttcaaatgcaataactttgcggaaaagttaagagaagatatccaatcaaaactaggatacaactcagcctctatctcttcaaataattcgttgtgccattgatttgcactaggattatcatccacttcaaatgacggctgaaggaagtcatccactatgggaatcatctcgtcaatttcaaggtcatcatcagcgccatcatggtcactcattacattagtggcgctagattctgctttctcgtggtaagtccacttctcgtaaccagtaaaaaaatcccaatcaaatatgtgggcttttacaataggtaaagtttgaagcctattgttcacacatcttacacaatggcacctaattctaccacccaatatttacgtttcgaggtcatctctaaaaatgcatttagaccattccaatattgtggacatctacgatgtcgcaatgtggtccaagacttgtcgattatcatctaaaatttataaaggcatataagatttcatgttaatgacacaattttataatatcttaagttaaaatattttatatcattttatgaaattaaaaaaaaatcatgtactattgtttatttttaaaaataaatgttcatcatttaaaagttatcatattatttattaattatatttaatttttaagttattattactttactttttttatatttattaaattttattattcaaaaaacgaattacttaattatttataaatttttattttattaataaattaagtttatttttttttattattattaattattacttcaaatttatgatatattaaatttttcttattttaaaaaaactaaattattatttataaattattatattattacttaattaagttttttttttaatatatttttaagtaattattactttttttatatatatattaaatttttaatattctaaaaattaatagctaatttagtttattttttattttatttttaaaagtttattacttcaaatttgttatatatattaatttttttattttttaaaaaatatattattatttttaatattaattaattaattatttatgattttttatattactaattaattatattttttcatatttacttttcaaacactttggatttataatttttaaagttaaaatttctattatttaaatactgcaatattacataattattttaaaatattatttttattataattaactttttgagcaattaatatattcttattctaatattttcagagaaattttaaaaaatattacataattaattatttaacagacttataatgttgtaactattcaaaagttgtaaaaaatttaaaagcttaatatttttaacaaattagaaaaattataatcctataaaatacatttattactacataaatttaaaatctaaacttttacaaatttatacattttaaaattttaagcattatattatagcaatatattatacaaaaaatacataactatacaaaaaaaaaatagaaataatagggagaaatgaaaaaaaaaatagtgaaaaaacattacatgtgaaagaaaatggtggtgtaatggcggttgacggtggtgcaatgggcggaggtggaggaggagaagagaaatgggtggagaagaggagggtcggagaagatggtcgggggtgaattttgtggcggaaaaaatggaaaaggttttttgagttaggggttggtattatatagtgttttattaccaacgggacccgccggtattaataggggttccgccggtaatacaaaaatggtcagaattcttgactaataccggcggaacccgcctctaataatctaccagtattagccatttcaaattttgggtggtcaaaatcccgcccaaagtattagaggcggattttctgctagtaatactctaaaactaccggtattaatattatttattaaatatttttttaattattaaaaagtaataccggcggattaccattttcaccggtaataactccaataatatcgacagtttgtctccgccggtattgaagcaaattcttgtagtgatattatttagtttgagaaaatacaaaagaacaaactataagaaaatctcacctaagcgatgcgtaataattaaaaaaaataaaacttacaaagttacgtataattaaaaaaaattgaaaatgataattaaagtgaatattaagaacatctttaatgtagagtatttttttttttttgaatgaaatatcaacttcattaaatcaagagcattcagaaaacaagatatccctcaaatcggaccggatatcttactctagaatgcaaccaccagagataaatcgagactgccttgcaataacatgggcaactcgattagctgatcgttttacaaaacgtaacttaacatcctttaaaagagataataacaaacgacaatcatctataacaataccaaaagtagaagacattttttggttgcttcttattacttgcacagataaaagactatcggtctcaagctcaacattcttc

SEQ ID NO: 45629 - DNA, 2295 bp, Cannabis sativa
acacacataacaattgaaattaattgatttttttatcaaatattgattttttttttcttaggcatgaagttgttggtgaagttatggaagtgggatcagaagtaaccaagttcaaagtgggtgacatagtcggagctggctgcatagtgggctcttgccaacagtgcaagccatgcaagtctgagaatgagcaatactgcaacaaaaaaatatggtcttacaacgatgtctacaccgatcaaaagcctactcaaggtggcttcgccgaggccatggtggtcgatcaaaggtacatcttattataaattatagttatttaggataacctcgattcttgagtattattgtcttaccaaacatgtccttatttttttgaaggtttgtggtacatataccagaaggaatgggggcagaacaggctgcacctctactttgtgctggagtgactatctacagcccattgaagcactttggattgatgcaaagtgggctaaaaggagcaattttggggttaggaggagtgggacacatgggagtgaaattagccaaagctatgggacaccatgtgactgtggtgagctcttctgacaagaaaagagaagaggctcttgctcatcttggtgctgatgattaccttgttagctctgactcagccaaaatgcaagagcaatttgattcttttgattatataattgacacaatccctgtttttcatccacttgagccttatctttcacttttgaaacttgatgggaagctgattttgatgggtgttatcaacaccccacttcaatttgtcagccctatggttatgcttggtaacttaatcctttaatacttaattacactaatagtagtttgacaccgacaaaaagggtgttagtaattctttattgttatactctttcttatgtttttgtagggaggaagtgcatcactggaagctttattgggagtataaaggaaacagaggaaatgcttgagttttgtaaagagaagaagttgagttccacaattgagacagtgaaattggattacattaacacagctttggaaagattggaaaagaatgatgttaggtacaggttcgttgttgatgttgttggaagcaagcttacttaaatgatgagaaaagacaaggacatttacttgtatgaaatttaaaagggaggaaaagtataagacataccataccaaacccaaaaatatgaaaacaaaagtgttttaagtttttatttttttctttttttcgtctttctatgtaatgtgtgtgaacaatgtcgttaagtgggcatcgtgttgatgcttttgttaattgtcaatttttcttcgaaaagaaaaaaaaaattgacaaattttattattgcaatgttattggtagttaagtaacagatttttcataattctttttattattatttttttttagttacaaagtttttcataattcaatatatgcatgtgctcgcatttctctttctattaatgccattgtgattgatattttacagactgtaatattttaaaaagatatttgtgattaaattttaatatttgtaattgttacacttaataaaaaaaaatgtaacaaaaagtattttattttaagatttgttggagtcaaactattatttaattgttaagtcaattaagttcattaagggtcatctcataaatacgtacttacatatttttaagcttatataatagagcatagctattaggcactagtggtgcctaataccttctcgacatgtcgcgttgcgattggctagcgatactcctaaaagttattatattaaattatgagagacccgatacttatttgaaccaataacgatattgacacataggagtgtgctaggcaccattggtgccctttagcatttctctatttaatacatagtctaataatatgtctctacgtgttttgaattgaaatttaatggccataaaagggtacaactgcaacaaaattgtaagatatgatatttttgctatcatttttttttattaatatcatatgtgtaataattgtaaatgttaagagagtttcgctgaaaatattcttattttaaaataaaaaagtgtttggttgtgatttaaaataaaataaaataaaaattaataattatactctaattaaaattagagggaaagaaatgaaaagtgtaattacttctaattagttagttactgtttgaaaatatgatgaaataaacccacaaattaagtaattatctcgaattaatcctaaatcctaagcacacccttaatagtttttttttttttttt

SEQ ID NO: 45630 - DNA, 1670 bp, Cannabis sativa
  modified_base (1215)..(1218): a, c, t, g, unknown or other
gacatcataacagtttatgtatttatatattctggtttggttcaggtaactgtgagtggatacgccgcatcaggaggcggtcgtggcatcgaaagagtagatgtgtctttcgattgtgggaagagttgggtcgaggcctctagataccaaaagcctgggatcccttatgtttcagatgatgaaaggtgtgacaaatggggttgggtgctgtttgaagccacagctgatgtacataccaatacagagattgttgccaaagcggtatgtcacacattactattactattattattattattattctaattgaattctctagaatgtgcattgcataatcatatgatatgttatcctaaccacaaagaaaatattattcttatatgactacacacaccataggaaatattaaacaatttctaagcagtgtacaccattattcacaccaccaaatagtgagaaaaacagttggtctgtgaactcctcaactgggatgatggtgggattttggccgacatgggcaattattgcttaaaatactaataataataacactatacaaattgtaaagaagaagttggcaaatggttaaatcaaaaaacaaagatgtcactattattacagtcttacgcttacacagtcacacccattttctttttaacaaacaagtgtccaaaccacacgtcctcactctcaaatgcaatcttaatttatattttgtgtcatatgtcactatttatgaactcctaattatattatactttttaacattttaagatgtcaagatcagtgacacaaggaaccccccaccacccacatcaattttatccttatctggataaaggtgcatgcatcaaccaaccattttactacccttatggtatgtttggtttgcatttaaaggtgatgtaatgaaattataatgtaatcatgattacattatataataatggaattctcattacattgaaaaagtatgtaatgacaattacatcacaaaatataaagtaaaattaaaatcactttaatacttttttttttttatataaatataaaaatgacaattttgtcaatttatcacttattataatattcatttcaataacaaattaaatattgtaatcaatttttattaccatttttattccattctattctctctttctttagcctattgttttctgtttttttgttttaaaaaattgtttttagaaatgnnnncaaaaaatagtttttgaagtttttgaagtttttaaaacacaagtcatgtttgtcaaatagctgttaaagcagatttcttttaaaataatttttcagctaaatgttgaaactagaaactgatgtatgtagctgaggcgtcctaacaaatcggtagacttgaactttgttcctacataacttgatcaattcaatcggatactcatcatttatttttaatgtctctttcacaacataatcattgttcaactttctcaaaaagctgttatatcaggtttttttttttttgttaaaagggttttccaacgaagtgtttaaactccaaacaacgtgttttgaagcttcataaactgaaaaattacttttaaaaagccatctttaaggagtctgatgtttcattttctggctccttcacttgtatagttgtatatataatgatatatataggggaatta

SEQ ID NO: 45631 - DNA, 2717 bp, Cannabis sativa
gtacatcatcaatgtatctattttattttaagaggagaggttgcattgtagaatttccctataatataatttcctcgaaaaatatgaattgggtcaagtactccagaattcacataattatgtagaaattacattgtatatccactctattttatttgttttaatttttacctttatttttatatttttttaaaatatacttacctttataaatgacgtccctattatatttcttagattaatatatattagataactcacataaaaatggatagatttgaatgaaatataatataaattatttagaattaatgaatacaaattcaacatatcaccgtaattacagctaactcaaaatctcacgtaacgacatcatcaattagaagaaacttgaaccatttaaaaaagaaaaatgaaaatatagcaaacgacaccaaccggaaagtcttgtgagtaaaatccaaacgacattaacataagaatcttcaacaaatgaaacgacagagagaaatagccgaatatatattttgagatgttgtttaataaaaatggttctttctttgtctgtgtattaccattaccaatgtcccgtgaagagaaacgacgcaagttccatgaggctgtccttaacatgctatatcctcttcctatttcacaacaattagttatctctctcttcttccttatatatatattctttaattctctctatttacttcttcaacgttttaatgaattgtgaatattaacttgtgcagccaaaagatgataactccgcgttgctgaacaatttcactgaaggttttgatccaaatcttgttccaggtccaaaataatggattaaattccccaaattaatttcgttgaaactaaacgaactcatggtttttttgaattttgacaaaggtttgcagatgacttgggtgggactagttcgaaggcttcctctagcgaggacgacgatgatggtgaaaacgagcctgggaagcttactagagctcagcggaagagacttcggaaaaagaatctgaagatcgatgcttctcgccgaggccgaatcgttgggccccttttacctcctacagcagtgaacgatgagaattttggacttgaaaatcactcatcaccaagtgttcgaccaaatgcctctaaaacagacgaaaagcctggtaatgatttcaatgttttcacgaacccgtttgccaaaagaattcaattatatgatcccttacttgaattcgtatatatatacatatatatatttgtgggatcaggaggagaggtaaatactttgaacaagagcaaagtaaagcaaaggagaatggctaagaagctgggcagagaaagctcggtagcctctcatcaaaatgacaactgtaaacaagataagtagaactaatcctcaagataaaattttatgaatggagaaaagacctccatttatgtttgagggaattgggctatcataaactagacactgacttaagttatttacaaccatttgtggtaaattagtaatgtttaattgaaactgttcttgtcaatgggataagagtaattgcaagcatcatttatgttgtgtgattctacaagtttgtataggcattcacagacatacattctgtcttggaagggggtggaatgttttatgtttttttagtgtttaactagtacttggatatcaattcaagaaatacaaatatgaatttataatatattagacaatttgtggtataaatatttaaattgttgggtttgttattattattattattaaaagaatgtggtgaaaactaatgaaattttaagaaaaggagctttcaaagtggtgactaatggaaggggcatactagatttagcaaagtggctgaccttttgacatataatagtgattgagacattcaaaagtcctatttgacaaagaaactattactattatcttgaagggggtggactaactggccagggaaaagataattgggtctggacaaaggaaattaatgggtcattgtctaggaaatcggtttatcttatccaaactttgcacaggcccctctttgtgaggttggccctccctctagaacaagccctggaacagcaaaatcttaaagcgctataagatcctttggtggagcatcttgtctaatgctcttccaattcgatatattctaaataagagattccatattgatgatgtgggatgtcctatttgtgaggttgaagacaaatctatggagcacttgttcctcacttgcaacttggcttttcatttgtgacggtcctccttgtagggtatctttcatgtatgtggaacatgtatttgcatgcgggactaggttaaatttatcttgagcttaagaaaataaaggcattgatgcaaatgaggtctttctttatgcttccattgttgttgacgccatttggcgggttcgaaatgataaggtacacaataataatctagataatgtaaaataatacattgacttcatttattactcttatttagattatagagcttctcttatccctactcctactctaatcttgttagatgaatggcgtcctcctcctcaagattggctcaagcagaattgtgaagttatagtagggatggaaagtatgtgtattgcagttgtcgctagaaatcaccaaggtgaggtggcttgggtgaacacgacaaggtaagatttttatgatgctctttgtggcgaggcggt

SEQ ID NO: 45632 - DNA, 1979 bp, Cannabis sativa
cgtgaagaatatttgggcttacctgcttatttttgagagagataaaaacaattatttggtgatataaaagaaaggatatggaaattaatgcatgcttggaatgataaatttttctcaataggagggaaagaagttctcttgaaagttgttgttcaatctattccaacatatgtcatgagttgttttgagttgtcatctactttttgtcatcaacttgagcaaatgatggcaaagttttggtggggttcagacactgataagaagaagactcattagagaaagtggaattttctttgcaaaactaaaatagatggtggtatgggttttagatcttttgttcatttcaaccaagccttgctggcaaaacaagcttggagaatcattcaatatccacattctcttcttagtagggtgctgaaaggtagatatttctctcataatgattccatggatgcttagataggcaacatgtcttctctaacttggcatggaatttgttggggtcgtgatttattaaaacctggattacaattgaaagtaggcgatggtagttatctggtgtgcttctaacccttggattcctcgaaattcaacctttaccccttgcgttatacgagatgtcctaacaacaaagtttctgattatgttactgctagtaatgaatggaatctcacccttctgcaacatgacttttcctctgctgatgttgattatatccttactattcctttgtcctttaataatctgaatcataaatggatttggcatcacagtacctcaggtgagtattcggttcaaacaagctatcactttgcttgttctcttgaggaacaagttctttcctctagttctacatctcaagatgcttggtggaaattattttggagtttgaatcttccttctaaagctaaaatctttgtgtgcagggtgtttcaaaatgccatagtagttgttgtctccttgttttatagaaaaattattgattcaacatcttgtagtttatgctctaatgcttaggaattggtgggacatgcgatgttttgttgtaagcatgtgaagtctgtgtggcaattagctggttttgaatttgattatcgagcatcaggataattgaagcatggtgattatattgtttatttggcttcagtttacaccaaatttgaacttgaacagatcatatggattgtgtggtttatttgaaccgatagaaataatattatccatggtaaaaaggcacaacgttcttcagaaatttgggcagaatcatgcgctcacctctacaattttcagcatcactgtatcactaccactacttctattttgactcctgttggtgttgctgctcatttaccgtgacagcctcctcctccacgtaaactgaaattaaatgttgatgtggccattgatacatcaaagaataaaatggaagtaggtgctttaatttgagattctcatggtcaagttcttgctgcaatttctaagcctctaatcgacaattttcgacctcaagaagcgaaagccaaagctttgtttcatgatctcgtttgggcaaaacatctccatttcaatttggatctcattgaaactgattctctgcttttgacaaacaccataaatcatccaacatcaaacctttcttcttttcaagatttggtgaatgatgttcaaaattaattatcctatctctcttctgtttgtgtatctcatgttagacaggatgatagccaaaccgctcatgatttggctaaacaagctttagtgttggataatgattgtacttggttagaagaaatttctttggtcattttctctgttattgtaaatgactcttttatttattaataacagatcttttctaaaaaaagctctttttttctctcttttttatatttttttagtcaattttagttgactttttttttaagtgagttgctgacttttttttttctcttctctctatttttctttttttatttttt

SEQ ID NO: 45633 - DNA, 1232 bp, Cannabis sativa
caggtacccctctcttggattggttgctcggtggtttggagagggaaggaagcattcgacatcccccaagtaaccgtgcttctgaaaaatcttcatttttgtctgggtcactatggatggaggagaaacccaccgaactcctgctgcaccttgtcttctctgagaaacgacctcggtgtattcctcagtaacgtaatctttagtggcctccaggaaattaccggcctcggacacaggttgtccgtcctcattgaagccaccaaagggtaacctccgagttgcaccttcctccttaacttcagaaggagaatcaggacggacctcgccctgatcatccatttcttggacttcagcgtccccctcaatgtcttcctcctcagcagcaggtcgggcctactctgcactcaacattgtggcaagccgagctacgtgtgggtcagttagagaagactttcgcactgtctgtttagtgcgagccatcatcctattcctagacgaagcctgatcgatatgtctggcaatagttacaacgaaagtagcaatgggcgtacctgcagcagtagaatttggacggcctatgggtaaggtatcaactatatttggtcggacaatatatgtccaactgaacggtaaatatcgcctccaccccttcctgagctcccaaatgaaacgtccgtagccttcaccttcgatctggctggtggggtaaaaataatggtggtttgcactttgggttctggagaaggtgtgtgctcgctgcttatctcccaatcttcaaagcttgaattggaaagaccatcactagatgaggacagactagcacaaagacgatgatgatccttgcacaaaagttggaaaagatcctggtcgattcgatgttcgcttccccaaaactcaccagagttcatctacaaaaggtaggacacaagatgagtgtttggctgggataacgaacacaaatagattggttataccgaccaggtccagtcaagaaatcaaaaatagaaattttgcatggtattgaggtttacaatctagaatttcaaaatcacgaattaagggttgattttcactaagccccgaatgggtaagtgaatgttaataccgtggaattaaaatcaaagcacattcataatcaagcaacatgggtaagcatagtcaagatctcacattcctaaacctaagttttctatggttttcctagaacaagttcaagaactatcaagtttttt

SEQ ID NO: 45634 - DNA, 2296 bp, Cannabis sativa
ttaatcccaaaattcagtttcaagaatcacgtaattagcattctatttactgattagcataaacagcacgaaatgagctttccgacaatataaagaacatccaaaacatagtcccgagtcaaaagttatggcgaaaacaaaatcagaaaaagcagacattccctctgccaaacccagtcgccgcgaccaataatcccataacggcgactaggttcagaacaccaaaaaatcccatttttaagacccaaaaatatcgaaactcaatcctattttcacctaagtcataaacaacaaaaattcatgctaaaccaaggtgtttccaggcattactacattagaaaagatgcacaaaacacccaacatatatcacacaaagctcagtataatacaataatcatcaaactttcaatcccaagacttcaaagctcaaacccataaattccaagcattttaccagaaattcaacaccaataactcactccaaaacctcccaaaacaataaagatgcaataagcataaacctaataacacaatcaaaccaaaatcaccactatctactccagttctaccaacatgtacacaccaacttaagaacacatttgatggcattccacaaatttttacttcagagttacagcaactaaattcaaaataaattggtagagaaagctacctgaaacttttccaaaattcgaagcaccacacttcacaaagtcaagcttgatccaagactaatttctcaaagattcaacaaattagagaggtgagtatagagagagagagagagagtctgttctagggctgaataacacaagaaaatgctttcaatttcagtccaaattccttttgttgaaaaataacacaaataggaaaatgacaaaatgcccctagggccataacacagcatatgcacaattcaagagcaagaatgtcatgttcatcacatacacactcaattatatttcaggttattcatttcattaaagaatgccgaaataaaatcccaaaaatgtattttggccccgaacccagttcagcccgaaatactcgattgtgactataccacgccaacttgtcagaaaacaccttaaaatggacaaattaagtatactatataataatatagttccataagcacgcaattaaattcaaattcatagttttacccttctcaagtcataattgtgaaaatactcctagctcaccaacgggttcttaacatgtcatttatcaattagtacacatataataaattatataataatataattccataataactacatatttaactagttagggttaatccatttcttaatcttagggtattgcagcggcagtacaaaggaatctattagaaccgagtatggatggtctccatgcccatcgcaaagtagtactcatccacaaaatgcctattttgctgactgcagggtctacagtaccctttagccacttattgtccaactgggagaagtaaaaataccccaaccatctctgcttgtgagttgacttcaggtcgaagagccaattggtgtcgtgcggggaccgctcaccccatcctttagtggcatagaggatgaacagggcggataagtacttgattcccttcagtgtgcactgagtcgggcagaggttgtaatagtccataattcttttggagtgtggatgcagagacaggatcgcaccttgcttggtatgggcacccgactaggcacaatatccctctctttgattagttgcccagttgtttggagaagggaaaaagcattcaacactgcccaagcatccatccttcttgaaactcttcaactaggcctgggttacaatggacggaggagacacccaccgagccctaaaagcaccttgcctcctttgaggaaccacatcggtgtacacctcagtgatgtaatcatcaccttcctccaggacgtcaccaacctcagacactagttcctcagcctcattgtagcctccgaagcgcaaaggctgtggaactccttcctccttagcctcagagggactaccaggacggaccttgccctgatcttttatttcctggacctcaacgtccccctcgttatcctcctcctcagtagcaagctgggcctattcagcgcttggcatcatggcatgtcgggccacatgagggttaactgcagcaatctttcacatagtttgttttgtgcgggccatcatcctatccctggacggtggttggtaggtaggctatccaaaaatcatgccagaagtggcaatacgaatgccaaaggcaccagagcttggacaacccacg

SEQ ID NO: 45635 - DNA, 2707 bp, Cannabis sativa
aatgtttcattaagtttctggttctgtattaattcttgtgtcattgtcattgttgtccttaaatttgttgttatggtgatcttgatcaggttttataatccgcgacatagttaataactgtcacgcttgctttccaagcattataatattaaagtcttgcaaactcctaaactccataccaccctcaaatttatgaacaaccatatgatcccaactcattcagcttatcccttttccttgaatcagtgtcgatttctaccaaaactttactttcaagctccgatcacatcccaactggaagaagaaaaatgctcatagcataaattagcaatttaaagactgggccacagttttaaaaagaaattcttaccaccacaagataaatatttattatcccaacaactttgattttttttttgcccattttattcttcaagaagccaaatattgtagacttaatttgcccgactatattaggcaaccccaaataagtaccatccaaacctgcttccaccatttccaacacataacaaatctataatatcaccccttagtttgtattgctgctaaaaaaagtagatggtttttgaagattaattgaccttctaccctattatcttcatcaattgaggcatgacaatacaataattatcattagtaaaatatcatatgtgaaatctcaggcaccgtttatgcaacatgacaaccatgaataagcctatcatctcatatctacaaagtaaagcaaagaaaccttcctcacagactagaaacaaataaagggacgacgagtttattgtcttatctcctaagtaggagatatcgactccattcttataccactatgcatgatatgataacaaagtgaatcgacacatctcatcaccaacttcacccaacactccataaaggccatccttagcaacatagctcttaaaaaagaccactccacacagtcatacgcattattcatgtctagtttaagtgccatgcaacccatcttgcctgtagtttttcttttcaaatagtgtattactttaaaattaaccatgatattatcaaaaaatttaaagaccaagaataatcgcgctttgagaatctaaaatgataaaatttagcacctttataagtgatttgcttacaccttagacgccactttgtggaccatattacaaagagtgataagtctctaactccttcatgttaacaggactcttcttctttagaactaatactcaattagtgtcattgaaaccattaggaaaataacccgaataaaaaaaactaactgacaatatgctaaaaattttggtaaaaactatggacccataccattaggcactagagacttatcacagtgcttttgaaataagatctccatcacctcaacctcttcaatcagagttaataattccttatttcggaccatagaaactgatagtacaaccccctccaacacccaactataataagaatttgaggccttgaacaaatcatcaaaataatgaatcatatcattttctaaaccccctcccaatccacccaaacaccatcacttcgttgaagcctttgaatagtattatttctcttacgctcactagcttatgcatggaaatacttactattcttgtcaccaaaattaagtcaagacggtttggatcgttgcttccaaaaaacttcatgttgaggcaaaacttcgaataaatcatcttaatgttccttgtatttctaaagagactcggtatccctcccttccttatatctcaaaagctaactttcataatgagcaattctcttttagaagtttccagtaaactcctctccccatttagataaagcaactattgtggacattattccacatagaatcaatagtagagtattgagccatatataagaacaagggctactccacttatcatcaattgattttaagattgaaccccatgattctcaatatggtatcagagccatatcccttgcagccaagtgattctatccgatccgcacctatacagatagtgaccatgtccactctgatatgattcaagattggtgagcacaaaaaatagccaccatcttgagggagaatattgtagacattgtctcacatggaataaatagtagagtattgagccatatataataacatgggtactccacttatcaccaattagttttaagatggaatcccatgattctcaataacaaccccacatgcagtatttttctcatgaatctgctcccctccatatactcctaacaactacgaacaatcttttgatacatgagctcacgtagccaagcattttcaaaacaaaaaacctcagtcttgaccctttcctccccaattgacaccagaaaaatggggcaatgatccaatgatgagaacccaatattataaagcttcgccagtgggaaggcttgaagccaaccatgggtaaccaaagctttatctaacctcttttctatccaaaaattggaactacaccacttctcttatgtaaattgatgccagctcaaaatctagtaacccctaattaggggtgtttattggatccatctaatggatttggacccaaccaatccaatccaattatttattggatattaaattttgtcatccgatcaaattgagtcatccaattcgatctgattcaatgaatgtattggactggatcggttccaaccatttgatgcattgact

SEQ ID NO: 45636 - DNA, 2968 bp, Cannabis sativa
  modified_base (2862)..(2863): a, c, t, g, unknown or other
tatgtgtcaaattattaattatcataatttaattacccacacttttgatataattatatagtatctaacgaagaattttataaaagcacacacgtggcgtccgtgttggacagggcgttacatctaggatcaactcagaccctaaccccagcctcagacctcagacctcagacccggacccatatcttgcccatggacctggaccggaacctaaacacgtagccatacccaaattcggatctagactcgaccaagacctatatgtattatttaagtatatattcttactcaggttgtatatattatttaagtattatttaagtatatattcttactcagattgtgactttatatgaaaaaataaaatagtttattatgaaataaattctaacatctatatatgtattttttttttgtaattgatatttatctatgtacattttattctattattttatttctgatatcatctgtattaatctctccagctaggatttgtgatgtccaaggagcgttcgtgaggtgaatctaactttgatggagtctacattcacaatgctgactagacatattagaatttcatctgcacacttttcatatctgatcagacaaaatttcgccatttaaagaatttttgtaaagaaactaattaataatttttctttatattcataccttttgatctcagttttggggtgtcaattatccctataaataacacctaaaccaacaacaaaagagtgaactcttccactccttaatttttttatatttatagaagagagtatttaaaaattgtacatgatagtttttctgctattccttagtaagttcgtgttctttgtgattaattttgtgtgaagcaaattctcaaaaagaagaacataaagaataacctataggagaagattcatctaagtcttgcatcgggagaaagcaagcaccgctatctttgcgagaatatttctacaaacattgcatcgataggaaggaagcattcattaagtaatttgaagagagttcaactgttggtgttttaaggagattcattcagcaaatataagtacatcaagcttgcggcaaaattattaaagggggtctaagttttgtttaactcaattactttgtacttattgaaatttggctaatgaatcttatctctatgtgtggccctgtagaatagtagtaatctgcaatgattgttgagaccatatataaaatattgtttatcattttaatttctacaattttactttttacactattattttgacctatcaggttcagtttttttatggagaagatttctattcttcaaataattttataacagttctgcattgattaaattattagttattttcacttggtaattttaaaaaagggattttcaaaaaaaaaaaaaatcataatcactatttttttcaaaacacttaggttatgtttggttagtaggaatgaaatattggaataataataagaatgagaataaaaatagaaatagaatataataaaatttaatatacataaaaaagaattattaaacattaactcatcttgcattaactcaaccctctagactagaaaaattagggctaagctccctaacctcatcaatacttttgctctgtactcctttcgtctactttagtttgttaagtgtcgaagttgactaccacaatgtacacaagtgtacacgtcgtgaaatttcattggtccacctaatattaataattttgatgaataaggtgaaaattcattgcacaaactcttatttacatcctataagcaataaaaaatggcctcaataatttctatacaatttatctacaaaaaatcaaaccattctctatctttgtttttttagtttttttggcattacaaccatcaatttagttttcacattcttcttcagctgctgcagaagctcggttggttgctgagtcttttcattccatatcagattgttcctgcttctccatatcagatataccagtgcagtgatgcatactgccttgacccctttcctgaatcggttttgccttgccttgtgtatgatctttatcgaattccccaatgtatctgccttagtgtgccatttgagccattccttcagcagttgcaaacattgctgggaaaactggcacttaaaaaacagacgatcgatgttttcttctgcaatattgcagcaggggcaggtgtttgaatctgtcactttgaacttgtacaattagtctttagtctttaacctgttcaacatggctaaccaggttaggaaactatgttttgggatatttagtcgtgaccacacttcattactccatgtcactctttcatgatcagttaccaagcttctataaccggctgctactttgaattctgctcttgtaaactcctctatctgtagcttttcctttactatgtcccttatatccaccatttttttccagtaccagctactggtttgtgggactttatattcccaccagttatgatgtttgatgtatacgcaatgcacccatttcacccagagattgtccttcttgtttgccactgcccaaacatgcctaaacattgttgcagtattccattgagcaacattcagcaagcctaagcctccttcttttttcgatttacataaactttcccatgcaactgaaccatcccctatcattacactctttcctgtccatatgaaactcctgcacactccttctatctctttaatcactttcttagggagaatcatgatttgactccaatacatatgtattgtaaggagaaccgagttaaccaatactagtctgcccgcaaaggacaagtttctagttgaccatactctaattctctttgtcattttcnnagcaaggctgatacaatcccctgctgcaattttccttgcacagatgggcaccccaagatagttgaaaggctcctcctgcctagaaaaaccagtcatatccagaac

SEQ ID NO: 45637 - DNA, 1571 bp, Cannabis sativa
aagtatgtaataaaagatttctctttaaacttgattgattctgcaaaagaaaaaagaaaataaattcattggtaagaaccatttgcttcccttttgcagggacaatgctgttgtgctggttcaagaacttatgtccatgaaaatgtgtatgaagagtttgtagagaaagcgaaggcgcgtgcaatgaaacgtgttgttggtgatccattcaaggcaggcattgaacaaggccctcaggtaaatcagtggcttttagctctatgatatcactcatttgaacagtttaggaagccccaattggattttgattttggtttctgaactaatgttcaatttgttagaaatttataaaacatcaggaatccattcagatgatttagagaagcagatcatcagatgaaccaaaagcatacaattgtgatgagaaaatatgtattaataaagttaagaagggagcaagaaaaccctttgggccttctcatcaaagatttcagttatctagattaactcacacttctgcttttactagactccattagagctataaatcactaactatatgagaaacgataaaaaactattcatcaactcataaaattacaatgttataagcccaaaataaaattttaaggtattatgttgtgttaatgattaatgctctattaatgtttcagattgacccagaacaatttaacaagatcctgaattacataagatctggaaaagaaagtggagctaagttggaaactggaggagacaaaattggctcaaagggttactatattcagcccacagttttctcagatgttaaggtattattatatttaccttttccataaccaaattagccattttttgacacttgaaagtatgattatgatcaatctaacattgctatcccttattttgtcaaggatgacatgttgatagcaaaggatgagatatttgggccagttcaatccatcttgaaattcaagtgagataattctctgccctttataacaccataaaagttttctcattctattaaaacttgtaacatttttgagtgattgcagggaccttgatgaggtgattaaaagggctaataacagtcagtatggtcttgctgctggagtctttacaaagaacatggacactgctaacaccttgactcgagcattgcgagttggcactgtttggatcaattgctttgatgtgtttgatgctgcaattccttttggtggatacaaaatgagtggaattggaagagaaaagggtatttacagtctaaataattacttgcaagtaaagtctgttgtcacacctttgaaaagcccagcttggctttagtttgatcataatataggcattgtcaaaataataaggcttgacacatcatgatgtaactacaactttgagcttgtgagatgttttttcttatataaatgttttcttttttaaattataaaaatcccatttagtgaacttttgtaccaacttgcaaagattaacgaggtctcccatattataataatgagagtataatatattaatacgaattatttattcaaattaaatcactattcatt

SEQ ID NO: 45638 - DNA, 1122 bp, Cannabis sativa
gtagtagtgatttatttatatggcaaaaaatgtgaattagcaacttttattgctttctctattttttttttctttccatattttttttatttatttctcttttatgaaacaataaattatataatgatagaatagaacctaattatatagtgatataattaccaaaaaaaattaaataaaataattaattataaataatgataaattaataaatttataaacaatttttttataataattaataataatacacacataaaaatgttatattttaaattatgttactcatgcaatatatatttatatacaaacattataaaagtttgaaaacccagctaattgtgatttaatttcctagtttactaagataaattaaataaagaagacaacaacacatgatgtatgttatgatatacattactaaattcaaaatgtaactcattatctttagatcggtctaccaagcaattcaagggcaagttgataatgatttattgttgaactatacatattctatacatgtatgtaattatccaaacaaatgtatcaagtcaaaacgtataggtttgataatagctttatctatatgctattaatttgctcgctattatagaacctaataattggcaagagtcccgtgattatatttatccaaacacagcccatttttaatattttttttagttttcttttatatattttgctttatatgtgaatgtatatactagttgagcttaatcaattgaatattctaactagtcttcactcaattacgtacccaatgaatctaatacatgaaaacaacaatgttattatagaaatataagcagttgtattttgttgacataataatatatgacattattatacacttattaaaacaggaataagtaccgtgtacccaatttattctttaatttttctgttgtatgctatccgttgactttgaaattataatattgtgaaattatatttatagtttcacttttattttcaaataataacatagccatagtgattatacttgtattatataattatatattataataaaaaattacaaccggtcagccaaccctatccaatccattcgataagttagatgtggaaaagatttgtatt

SEQ ID NO: 45639 - DNA, 3989 bp, Cannabis sativa
tgtgactaaaagtcacatttagtcacaaaaaaattgtgtgactaaagttattactaaaatttgcagttttttgtagttcttcttaaaaagtatcgggcttagctatatctaattcatccttattataaatttggcaagaattaaataataacaacgtttttcatccagtgtagtagaagtagcctcaccattcatgtgaagttctgaaattgatcaacatacatgcaaagacccatagcccccacatccattgtgagactattcgggttacaaaaagacattcctaacacactactatctattagatattagaaaagcagaaaagaaaaaaacacaattcctaattacactaattatttactattagatgtcagtaaaaaaatattcttaataattaatatatgtaatatttttgtgcaaaagttattatttataagaagtagtactattgggtaatgcttgatttttctttgttttttttttttttttgagtaatttttagatgctaagagaaagtaactttaagcaagatattgggcaagtgaaagtggatgaggatgttgaggacatcaaatatgaaatagctgatgcagccatgagaaggtccattaagttttggtcagctcttcagtcaccacatgggcattggcctgctcaaaatgctgggataatgttctacatccctccactagtaagtttatataaatctcaacattatatattaattaattgtatctatctttgaaatcacgaagcattatcatttccacaatttcgcaaattttagcttgcatgtgagagtttcaatttaatttgattttttttttcaatttttttttatttatatatggttgttgattcaatgtcttatgtttgttcataatttgatttactttaaaaatcaaagtgtaactaatattttcttattgtagtttatattgaagatattattatggtcattttttcgatgattaaaaatacattaattttcaatttaggttaaaaacaatacaaatttgttgattgatttagagaaccattttttcaaaattttgaactagttatatattaatgtaattcgattgatgataatttattgatattgcattataatttttaatttgtaaaatgatacatttttctaaatttaaaaattcttatgtatattgtaaaaaatttatttagttggataggttttctaaattaccataggtattttaatgtaatgcttgactattataagatatatattttttttcttttttgatacaaatcaaatatcattgaattgttattatttttttttttgagtgtagtcatgatatcacaatttattaataatgtattgaattgttattaattatcacaacttttgatcattgtcaaaaaaaattcaaccttatataaactaatatatgtactaaattttcctcacacatctaggatattattaaaataaacaaatatgtcatgagttacaaactaattcaaaattttaaaaatttgcttggtatcataaagagaaatgagaaaagcaggaaaaaaaaaaaaaaaagatgacactgatggaaaaaagtatggtggtaatttcatgaattgaatgttatttttcttcaaattagaacagaatcgtgtaaatatgtaaaggaaacatatatctatacattgagcatttgaaaatatcaaaagttcataaaagagatatttcgttttctaattttttcctaagtagatcattctctaacatgaaaatatatattgtatacatatataggtgttttgcacatatattacaggtcatatggacacagtattcaacgaacatcataaaagagaaatgctgtggtacatgtattgtcatcaaaacaaagacggaggatggggactgcatattgaaggtccaagcacgatgatgtgcacagttctaaactatcttgccatgcgcattcttggagaaggacatgatggtggtcttgataatgcatgcttccgagctcgaaaatggattcttaaccatggtggagcaactggatctgcttcttggggaaagatttggatgtctgtaagttcttctacatatcattgattaattagttggtacctaacactatttcacatggttggcctatatccctagtaaaaaaattaccaataacatattaaattaaaaatatatatatacataatttaataaacattatgaaataaatgtgaattgcagttttcaacaattttgtgatagttttttattttgtttgtaacatgattacgaacatgaaaattttaattggcaacaaatttgtatatttcagttgaaaattaaaagtaattattgttacaaaacatattttttttagagcaaaataaactatttattattttacgactatgtgcacggttcacctctacatttttacaaaattttccatatattttgtaaaataattttgcgatcacgttaaataagctatatatgttggattacaaaattcgatttcctatataactcagtataaaatatatatatatatatataatggtgcaatttagtacttaattgtacaattaatatatattggttagtattgaatgtcataatatgccggccacagaacaatgcactttgtatatatataagcaatttcactgctagcattaagtcacttgactttattaatttagttatcattttgtagatacttggtgtatatagctgggacggatgcaatccaatgccaccagagttttggttctacccttctatttttcatccatgtaatgttcctatatgtttctctcaaacatttagttattttgtgcttaagtacgtatatgtatttatgtatgataaaataaaaattatatttatgacaattaatgcagcaaaaatgttttgctattgccgaatgacatacttgccaatgtcgtatctttatgggataaagtacgttggcccaatcacaccgttgattcgagaactcagagaagagatctacaatgagccttaccaacaaatcagatggagcaagatgaggcatctttgcgtccaggtgatgatatatataaataattattatatttgatcaatactattttgatatggattaaaaactacttataagtgcctataaatatatttatagatgagatcccttgtaacaatattaatgagtttataatggaatttgatggggttctatttcaaaattaattggttaaaataagagtaaccatttatcttatatattctattatctttttcacacattaacaatgtgagataatgtgagactctctaacaaccctacaaaaacacaggctgataactactacccacatggtagaatacaacgtctcttgtgggatagtgtctactacgttgctgagactcttattagtacttggccttttacgaagataagagaacagtcacttcataaagcaatggaacatatccattacgaagatgaaaatagtcgatatattacaattggatgtgttgagaaggtaaataatcttacctaactagtacatgagtacaaatatagctaatatttattattactaactttatatattcatgatgttaaccttactatatatgcagcccttaatgatgctggcttgttgggcagaagatccaaatggagaatatttcaagaaacatattcctagaattgcagattatttatgggttgcggaagatggaatcaacatgcaagttagtaatccagcatatataaagtttatttaacatgatcccaatattattcatttgttcttaattaatttttttgatatactaatttgttgtatttacaattgttataaaattacatgaaagtgcagagttttggtagtcaagtatgggattgtagtctctctgtacaagcattacttgctgcaaatattagtgaagagattgggcaagtactgaagaaagcacatgagttcttgaagcaatcacaagtcagggttgaccctcctga

SEQ ID NO: 45640 - DNA, 727 bp, Cannabis sativa
tcttccgggattcatgaaagtaacagtccacctaaagagagcaagctacaatttttaatgtcataactacatagccaaagaaatgaaggtggaggaaatggactcaatgtttggtagaaaagaaacgaaaagttcatccaattttagttgtataatatcaggtcgaacaaaagatttgaagtccatattcttgtccttttcccccaaaattttcttacaagagatttgagctatcctacccctaatccaccacttctccatcctatcatagaatctacacactgaaaaactagagcaatataatactaaacttggactcagttgaatgcatacatactatcctcctaaacaccctaattataaatgtgaagatgcaaaaacaaagcaagtcctgtcatttattaaaaattcagcaataaacgtaaactgcaatgtaattctgttttctactttttaaagcaagttcaataagtaaggggacaaagtgcaactattctagatcactgttaaatcattcatttcacaccgaaattttttaagcaagttttttcacccttgaaatgttttaagggaagaaatttagtgaaatggaagtttaatgtacaatattcatcctcatcaatgatctaacaaaatatatataatcatcctagacttttgatactctcattcgtcatgatagcataaaacatggctctttggtaatgatgtatatgatagctgacct

SEQ ID NO: 45641 - DNA, 4378 bp, Cannabis sativa
  modified_base (1992)..(2000): a, c, t, g, unknown or other
  modified_base (3308)..(3319): a, c, t, g, unknown or other
  modified_base (3662)..(3662): a, c, t, g, unknown or other
cttcagacactggttctccatcatcattatagccactaaatggcagcacctgagctaccccttcttcctcattgccttcggcatcggaaggcgttgtaggatgaacctcgccctggtcctctacttcttggacttcaacgtccccgacagtatcttcctcattagtggcaggacgggtctattctgccctagccagagtggctaggcatgcaatgtacgagtcggtcaatgaagatttcctcacagtctatttggttcatgccatcatcctatgcttgggcaaaattttactagaggtgtgcctagcaattgtcacaacaaacttggcaatgggtttgcctgcagcagcagggcttggacggcccttgggcaaagtgtcgaccacgttcggatgaactctatacgtctagttagcaggaaggtaacgcatccaacctttcttgagtttccggatgaaatgaccgtattcttcatcttgaattcggtcgggataaaaatgatgtcgcacctctggcactggggaaggtgtatgtatgctacttacttcccgatctttgaagataaaattggaaagattgccactagatgaagatgggctagcacggagacaagggtgatcctcgtataaagttgaagcaaatcttggtcaatatgatgtttgcctccctgaaactcagcaaggttcatctaaaaaatgtaggagacaagaaagtgagagttggtcggagtaacaatgcaaaatagattgtatatactgaccaggttcgactgagaaatcaaaagaaatgttttcacccaaaaatagaatttttgatccttgaagttcgaaactttaaattggaatctgattttcactaaaaccctatggacgagtggaaatgaacgttgtaaggttaaactcgaagcgcaatcagataatcagatgttatggttaaacataaatgagattttcaagtcctaaacctaggtattctatggttaacctagaacaatccagaaatcaggcatgaatttcattacaaatatgtaaaagaaagagattaagaacttactcactaatttgaagctttattgctctgctcgaatggaattgtcgaaggtttttctatgaatcttctcaaagaatttgggaggaaatttagctaaatatattttgctctggtgtttaagagttgaaatggctaaaacgattgcaagagatctttaatcctagttataagcaatctaaaaagagaattaatcctttgaaaattcaaaattttcaaatttctcccaaacgcatacgttacacactcattgcagggagtgtaaccgtcaagcacgtgcaagtatcaaacgttgactcgagttacatccgtcaattagcattaaatggacagaaactgaagagacccctagtcacagtattcattatccgatatcaacgacaagcgtgacccatctagacaagactctagactgagtgaaatccacgtgcgatcaggaaggtcccacgcagacttgggggaaaatgttatcctgtttcttgcaccatgatgtggcgataggaatggttgacacgtatcccatattttagataggaaaatgtccctagcaacccataaatgactacttaacatctgtaacattcagatatccgagcaagatggttgaagacatgtctgagcaagatgtagatgtgcttatgccgagcggagcataagagatgtcaattctagagatcaatctcattgtgtccaaatgcaaaggcaatctctataattacaggattgagtcaaagaataatggcaacacattctagtttcttatttcttgtgttgtaattatggaattaatgcagtttcctattttcctcattataagcaaaaggaaaactatccctcatgtatgaaatccctataaatagttgcctagcctcactatgaaggagatcgagagaatttcttcaaaagtacattcaagagagaaaagagtgatctaagagagaaagtnnnnnnnnnatcaattgtaagagctttcaagaggaagaacactttgttccttctctcaagtcaatacaaataaaacgggagtaagctattaccatacttacgaggccgaacctctttaaaatctagtgttcactttcttttactgtttttgctttcttttacttatcttatttagtcgctttatttttgactcactgttgttggctagaagcgaagtgaacatcatgcatgtttagtttttattttattatatgtaaaggtgacatgtaattttgtgaatatggtatatataatttttttttaataatatataatattttattttattttttattgtaggtatatatattttgtgttgtctatagtatatcatttctttaagatgatatttaatttctattttattatatataaattttttggtatgtatacatattttaatagtgatatacataatttggctagcatgatatatatattttttgagtattaatttagtattgttataattttatagtggtatataattttattgttacagtatattaattattagtaatacaatatatcaaatattgttgtatatatttaatggtctaatatattgattcatttttgttataatatgataatatgcaatactaaaaaattatataacttcatttaattattatatatatatttttaaataaataatatatagtaaatgtatttttataatttttattagagggtgggtttggtaacaccattttaataagttttttgttttttaattattagaaaagtaaaaatattttctaaaaacatgttctatataatgttttcactttttaattttttaattgagaatcacaattttaaaaattctgaaaacaaagaaaaagttactttcacaattttttaaacgatatttttttcttaatcaatactttagactgtgatcccaacctgaaccttgagacccaaactctcgccctagttcaagtctcagactcaaactacaaccccagtcctagtcctagacccaaacacggacttggacctgacttaaataaaatcaaaaataaaaataaaaataacaattatagaacacacttttgttttttatttttaaaattaaaaaataaaagtgattatagaacaatttttgttctgtaaaaataaaattttaaaaacacaaattttacttttatttttgtgattaaaaaattaaaaaaacaaaaatattaccaaataccccataatttattatatttaactattttcttaatttttttaaaaaaaaatatttactaacttaggtggcgtttggtnnnnnnnnnnnnatcagttttctatttttaaaatttgaaaagtgaaaatattttttaaaaacattttctataaaatagttttcactttttaattttttaattgagaatctaaattttaaaaataaaaaaaaaatcaatttcaatattttttttaaacagtttgttttttcctaattaatattttggactccgaccaaacccggacccaaattccccaacgccctggccccgaacctggcctttcacccaaactcgaattcgactccggagctagactcgacttaaataaaattataaaataaaaaataaaaataaactttatagaacacacatttattttttgtttttaaaattnaaaaacaaaagtagttacaaaatgtatttttatttttcaaaaacaattctttttaaaaaaattattttcatttagtgtttaaaaaattaaaaaacaaaaatattacgaaacaagaatttaatttacaaatttaagaccattttacttctcagctttctttctctttatattttattctctcttttttcaactttattttttattattactctttttttctatcttttagtaataggatatgtacacaaggaacaatcttttatagacattgagctttatccctttatttatgttcccatcatctttgacacttcgcaaagctacctgcctggattgggacccactttctagacttgttctcttttgctaatatattttttttttaaaaaaaaaaacaagaaaaatatattttataaatactacacgatgattacgtggagtaatgatgtgtacaaaatgctcaccatcagcttttccacgccacctaactggctactcctcagttgtcacatggatttttctaattttctcaattcttctcctttattttttgaatgaaacaatcaatatccctcttttattaaattatcactttctattaatccattttcaagtctatttctctctatacacatatctctatgtgtctatatatacttacatgagaattttccataccaagtctcgttgagccctaaatttaaaagttgctcttt

SEQ ID NO: 45642 - DNA, 1600 bp, Cannabis sativa
  modified_base (30)..(31): a, c, t, g, unknown or other
tactccactcattgccaattggttttgagnnggaaccccatgattctcaacaacaatatacatgttaatctccctctttagccatttttcaataattaaccaaaaaaaaaaaaactatatttcatcatagaagagtgtgcctcttcggcttcaacataaatatgcctctggttcagtttctagcgcttataatcatctattttatagatttcttggttaaagagctgctgtagtgaaattgaatgaaaaggatgtcgcagcagaggtgttcttggaagaagaagccatcgacaaacattcatcatcgtcggccgagattttggttcagaacacagacatgctaaggctattgtagctaccaagacaatgttggaggcaagaatgtgattaccatttgggggtgatagacgtgaatctaaaacatcttttatcataatgatgggagtattagaagacaataatgttcttgaaagtatcaaagaaataatctctgttggatgtcttcccatgattgtttctaacgccaccactccaaaactatatacatcacccttttcactcagagtcgtggtgtaggcatattctgaacccggaaaaaaatatgttaatggtcaagattaaagtaaatggtattaattaatgaacaatacaataaaaatagtaaagaaacttaatcacaagagatatatatggcaaaagaaattatagtattaaaggaaaaataagaaacaaaacaaaaatgaatacgtaaattatataatttttagaccatataattattatcacacattttggactttatttttttgataagcaggcattttagactcataaaaaaatcttattattcacataattacattattgttataaaatattatatttggatatccaaaacaccaactcaaatatatcaattaattcttgattgtatttaccattactatattaatttagttagttaattttcttttcatattttgtaaaaataagagttcatgccattaaaataatttagttaaaagttcttttacttttttttttctctttcttcatcttgtttttcttttttcttctcaaatttatattattcataatgattttaattcaattatagggttgtgacttttttttttctttcacaaatggtgttgtgactttttgttctttctaaacaaaaaaaaaattattttttttcatttattggaaaaagattatgtaaaatacgttagttaatataattctaatgaacacacaattttacactaattttataccattttatcataaaaatctaatgatcaacaatagagtaaaatattaataattaattgaaaatgatataaaaatataaaaaatcttaatggacaaagatatatttagcaaaaaaaaaaaaatatagtatcaaaggggaaaaaaggcaaagcaaaaaatgtagggattttttcaattatatacttaaaatataaattatttacaaaaatgccttattaaatctcaattacaataataccttgccacgtcattaaaaaataccttaattttaaaatattatgcctgaaacgaaattaatctcaaattccattttttttattatttt

SEQ ID NO: 45643 - DNA, 3088 bp, Cannabis sativa
ttttaaaaaaaaaaaagaaatttcaatttaaattatacctgtaaaatttatgtgacaagagcatcatctacagatagttagtcacgactcacgactgagcctaaaaaatattattcaaaaattataaatattgttttgaaatttgaataacaaaaagaattgggattagggaagaagaggaagaagacgaagggaccacacaaactccaaacccttaatatgagtgtcacagtagaagaagcgtccactcagagaagacccagaaagaaacacaggattatggaaccaaaacaagaattatgtgaaatcgttgatgttgatcattatcaactttcctctcaatcgattttggacaagggtaccaacaactccaaccccatttcagtcgagcagtacaatgaggatcgagaccttcaactcgctatcatggcttctcgtctaagaactcctaataccaccactaaggccaaacaagtcgtagacctttctcgacaaagcttctattttttcgacgttgaaaacgacgatgacgacgctgacattcaattgctctggttcaacacacccaagacgactcggaagaaaccctttgcgggtccttccgtgactgaaaacgggcagtcttcaaattcaaaggacgttgacccatctttcgtttgcgagatatgcgcggaacctaagtctgtaaatgagtcgtttaatatcaaaggatgtagccattcttactgttcggagtgtatggccaggtacgttggttcaaagcttcaagataacattacgagaattggttgccctgtttctggttgtaatgggtcattggagcccgagtactgtcgttccatacttccccctgatgtgtttgagaggtggggcatggccttgtgtgaggctctgattcttgggactgaaaagttttactgtcctttcaaggattgctcggtcatgttgatcaatgatgggaaagaggtgataaccaacgcggagtgcccaagttgctatagaatgttttgtgctcagtgtaaggttgcttggcacgatgggattgagtgtggggagtttcagaagttgaataaggatgagagagagaaggaagatataatgttgaagaagctggctcagagtaagctctggaaaaggtgtccaacctgcaaatactatgttgaaagagcatctggttgcttgttcatacaatgcaggtcagtttatttttttcccttgcaagtttctttcatggtttgattgactgtacattgttttttcacttgaaatgttcattctttatccatggttcttgttcataccatacatagaaaatgacatgtcttattcttgggttttgcttgcaattgaagcttcttatagtactgcattaactattcaaacaaatatatagaaagagaccagaaatcgtttgtaggtagaattatgtacatgtaatagacaaaagtctccaaagctgttttcaggtggtcctacctgcaaagtccaaaaagacattgagtgaagaaagccttgttatctgaagtagcagttacttttctaaggaatgtttcatgattttgagacaaatgatacacatgttgcttgaattatttgttttacttatcgtgtttgttacctagctaacaagttggaatatattaataatagagagcactttatccttcaccaccataagcagcctctcatactagaaccaggtctaatctaaaataaagaaaagatttgtttattattataattatcaattggactaaaccaatatctttagtcaactagtaattctgttggttgtttttgagaatttggtattagcaacctgaggattctgtttggaaaattatatgctttttgttacctgaaatttaattgttctagatttatgaatttgaggaaggactgctattgtaatgggcccaattttttcaattttgatatgttaaagactcatcttactatttacacaaggactaagaaaattaacctctacatttagtagaagaattttatgatgataataaaattccatcagaatttaatctattatagaatattttatcttgtatgattttgttgattgcattgcaggtgtggcactgcattctgttacaactgcgggaacattttcacaaataagagcaaccactattgtagtaaatgtaatcactgatgttctctgtggttgttatttaccactacaatagtacaatactattctaagaattatgtattaggaagttcaaaatgtaaataatcattcgagtagttatgattgtatgtttcacagttctcatgtgaaactggagatctaaatcattagattatacaaatttattcctagctgcactcaatacatgttgggtttagtatatgatgaactcaagacaggtttattaacttattattgatgcctgtactttttagagtcggaactcggtatgtattgttgaagctgactattttttcagtagttctatttttggtttagcatttgttttgttgagtttgatgtttgaacaacgttaatataatgttcttagtgttaattataatgttagatggaatgatacatataatcataaagttgcctttgttgtaaattttaacacttcatttagacttgaagataggttacttgttttaaatagtgtgctacaaaaattatgtaatccatgttttgggcgtagggatagaataactacacccacactcttaatttacactcttttattacacattgttataatgtgttaaattttagcaaaaatctgcactaaataattttttctaaaatagtttactactttaaaaataaggttcaaaaataattgcttacatatttcatacttaagaattatgttttggtagtcagtaaatcaatctctgagtgacatcacttatactttattactttttgtgatcaattattcataataaaaaaaaaacgtaagtagtgttagaagtatttatgaattggtttgcttcagatttttaattttttaaaactaaataagtattaaagttttttaaaaattcaaaaccaaaccagattaattaaatgattaaactaaaccaatccacttaaaaa

SEQ ID NO: 45644 - DNA, 2523 bp, Cannabis sativa
gtaccaaacgagccctaagagaaggaaaaatgaggctttccaaaagcttaaagataatatgatgaaaagattggaagggtggaagctcaaatcattatccttagcgggaagtctcactttgattaaatcggtagctgcctccttgcctgtgcactctatgtctacttccatggttccaatttcaatttgtcgtgatttagatgctctcatgaggaaattctggtggattggaaatgctacaaggaaagattcatggtgttgagaccttgagattttatttgtcaacaaaaggcacatggggtctgggtctgaggaaatttgaagatgtaaacaaagccctactttcgaaattggcttagagcttggcaaggaaggataataagccatgggtttcttgtttactcattaagtattgtaggtatgaaaatttttggtcagtggagcacaaagctagggattcttatacttggaagggcattctggattctcgtgaagttatcttgaaaggtgcttttacgttggctgctgatagaaggactattgatgtgtggcaccaatcgtggattccctggctgaacttcgatgattttaaagctttgatggaaagcttgatattgaatcattttgcaatgcaatcagttgctgatatttcctctaattctgtttggaacaaggaggtaatagtgcagatttttggaaactccttagccgctcgtatcatgcaaattcctaggatccctatggagtttgacaatcaactggtttggaagcatagcaggaatggttgttttttggttaaaggtgcctatctttgtgatcaatagattagattttcccctacgaagaatgtgtggaagttgatttggcatccggatatacatccttgattttccattatgatctggcgtgttttcaatgaagctcttcctaccaaatctagattgccttttcttctagaaaagaattgtcttctttgtgaaaacatggtgaaaaattgcccgcacctctttcgtgattgcatttttcgctaaggccgtttggttttctggtctgatcccttgtagaattgatttaattcctagcaattcagtgatgcagttatttaaagcctttattatggctcttccaagcttcaagctggtgcatcacttattttgggtgtgtggttttggcgatttggaaacggagaaaccttttgtggttaaaaggaggtattttaaatgttgttgatttttgtaggaaaatgaatactctcttttctgagttttatgagttgcaggattttagcaagcgaactttaacggctaagttaaatgaagttggtactttgcttagtaggcatggcatggcgattgtcatctgcactgatgctttctggttaaatggagttgctggtttggctgttgtcaagactaattttgaagatagctcttgggctcatatttcttctaatactacaacttattttgctttggaggcagcagttgcggcagtgcatttggcactctcttgggccctagaaaactcttggaacaatattcatattttccgtgattccctaattttggttactagtttttctaagttagtgtgtcctccatgttgttttaggagttttagatttaattaagaagtttaatgtttgtaagttttcctttgttcgtcggaacttgaatccctttgcagatggtttagctacaagagctagaatctctagcctggatgctggtttgtgtatcggggagggagtctcccctgtgtctctcatcttttgttgttaatgaacttatgttttttcacaaaagaatctcagatacttcattgtgtaatttcggtccattacctaagtttaaaataagtattttccatatacattttttttgttctttatggtattgtatcaagtcgctagatatcgtaagattagatctccaattctcaatggaatgtatacctaaaattttacttcacattttttaataatgagagaagagtggagttattatggtagcaaagccctcactcaactggtaatattaattttgtgtacatttttaaattattataataatacaatctgcacttataattaagttataatttatgctttgctaaaaattgagactaacttatatggtgctcaacaccaggttgacaacttgacatgctaccctcaaattttcattataacttattcatttttaatttatgctgcttcttaatttttgttttttcaaacattgattcccatactgatacgtttgcttaaaaggtctactattcaaataaaagtttaaggccgagaatggagtgaatatagtaattggtaatagaagaatggtattatgatgagaccaaaattctctctaggagctcacttcttggaaatttatagagacttgctctgcattaccctacacatgcgttttttcattgtcaacgtaatggattcctcaggaattagtaatcttttcgaagactctatacagatgtaatgaccgctctagtaatgtggattagtaa

SEQ ID NO: 45645 - DNA, 1773 bp, Cannabis sativa
aaactatcttcactgatcagatcctcttcttgactaatcaaaattccactttgaagtttcaagatccatcttcgatcaatcctaactctgataccacttgttggagattcaagactgaatctcacacaccaggtagtttacaccattaaccagaacactcctcaaagcacacgaaccaaactacaatgccaattgaacatacttaaagaacttaagataaaaatgaataaaaactttatttgttataataatttttaactatatatattatattaaggggaagacgaattttattggtgggaggagattgatgattggatcaatagcaccaatatacacatacacttagaggtcttgaggataataagttgggtcaaacttgttgatcgtggttttgggtgttgggtgagatcgatttggtttaagatttttttaattattttttaaaatttttttgcttcactctataacaaaagcaaaaacacaattagcatcagtgcggtttttggttcggttcataaccgaagcgaaaaaaaaattaatatttgtatttacggttataacatcggttacaccaatcaaaataaattctttatatatcacttaaaaattaaagaaaaaaaattattttttaataatgtaagtttaataaaaaatatataaggttacgtgaaaaaaacccacaagtttgcaactattatgggttgaacatagtattatggggaaagagatagaactagtctttattatgagctcacgggccttctcaaatctatctcttccgaagtcaaagaagaatttaagagttatggtgtggttgaagttgaatacaagtactttaacccttctatatatgtcactggccaaaaaaataacatcatagcggttgagctgtggtagctagaagaacacaaaacaatggaaggtcatgcatagagagtttggagtagtttggaatatggaaaatctaccaaatgggtccatcacattaaggtttcaagctacaccaatttaagctatacttattaggttcattctacaaataatatacccaaactttggaaagctcaagtaaaacttattgtgtttaatgcatattaaaatcactcttctatgttagattaatgcatattaaaatcatataagaatgcatataaaattgtgtttaattagttttgtgtgtggctagctcttttcttttatagtttaaaaataaataatggttggcttagtttgtattttggtacaataaataaagagataagtcattaatttgcacctttattatgttgtccataaaaatttaatgtatatgttacgatattacaatacaaaatgtacattgcatatgaaatggtttgtattatagtttatattatcaagtttattaatttagattgtattagggtcactacaagaaatgtcacttttacaagcacagttcgctactgcgttggtaaaaaaactgtactggcgaaaaggtcaaagttttatcatccacatttgcagtggctaaaatctaacttttactatcacatttacacgctgggaaaagttatttttgccagcactttttattttgtgctggcaaaagttctaataccaatgttgatttgccaacacatcagaagtaaatttttattttaccagcgcaatatcaaacttctgccagtacaaaaatgtactggtaaaagtgacatttcttatagtggggtaaagtctgggcaaaagtaaaagtcgacgttcgagttaagattgagattggtcgtccaa

SEQ ID NO: 45646 - DNA, 2138 bp, Cannabis sativa
ccatattgagaaatgcttgttatatctttaggttttgttgctcaaacattgtaagtttctaaattagataatattgcagagtggtttcaatctcccttttcaatttcataccattatgaattcaatttatacagataaacttggtctagatcctcacttgacatgacacagttatttctttttgtatttcaagaatgtccatttctgtttcgattccactctagccattgttatgagcatttgtatcggtgtgtagagttatgttgttctttccttatatttcggtaactatctgcagggtggcttcattaggcaagaattgttctatcttttgaaagatgaaaaagatgtgcattttcaattcgggagtgttcaaaaagacgggattcacaaggctacacaaggaatgcactcgtcgaaattctgtctcaacatagcaggggacaccccatcatcaaatcgcctctttgatgccattgccagccactgtgtccctgtcatcattagcgacgatattgaactaccctacgaggatgtcctagactactcagagttttgcatctttgtccgtacaagtgatgctcttaaagagaaatttctcattaaccttgtcaagagtatagggaaggaggaatggactcgaatgtggaataaaatgaaagaggttgaaagtttttacgagtttcagtatccatcgaaggaaggtgatgctgtacaaatgatttggcaagctgttgctcgaaaagtacctgctattaaaatgaaaatacacaagtctagacgattttctcgttctcttgatcgaaaggacaccgagtttagacacataccttctccgaacaacttctggtaagattgagaatatcagaagtaagatttttctggttttttcttccttttgtgctcttttttttagttagagctctttgacacaagccacacaacttttttttgttcacttcacattttttttgttctgacattgtcacaatgttattgtaaagaaagggaaaaacataataacatgaaagaataacaatcctttactgttttgttttcttaattattgttttgtaatctgtttcacatttcttaaatagaaaagattttctttatcaaaccaatgcaacttttttcatgtagcttttaacaaggagactccttttgtgttcttaagttagttttttcggttatagatgccatgccaatttactagcaggttggtacaaaagcataggagaaagtatcaaaggaagcgtcctcgcctgtttaaaatccaacatcggttgaccccaagaaaacggatcccaataagtcgtgtcattaggcaactccatcgacgacatggtctcataggtcttgatcgggggcttcaacgacctataaagaacagggtggctctcaaactgtaggatctcggtttatgagcataccgattgatctcgcttattgttagctaacacttggaatggaaagaaatgaatccatcaaaacaccttagagacctaaacatatccttagagtgaaaggaaagaatggactaagctttttctcccaattgagaaagaacaacacatcccttctactaggctagttgattatcatgtttgtatttttataaggtatgtacaaaaatgaagcaataaattaaaattaatagttcaaaggcaaagaagaaagaaaacataattcactcacatgtgacattaatgtaaaaatcatcacaagaatatgagaaatttgtgagaaacataaatcgctcagacataaattatctttaattaaggagccttataaaagcaacataaaaatatgcaaataatataacacaaatataaaagcaaagtgtaaacaatacattataatgttgtgaaaacaacacgaaaaataattgtttgtattttttagaaaataaagttttaaatttgtagaaaatatatataaaaaaatatatggatgcatatttttgtaatttttctatcagttttggatatttatgaaaaatatctaaattactttgggtttaacaaagttgggaacttgctcaaaaaaccgaaagccaacacctaaaatactaaggactcgtttggaacgtcgtatggattatatatcatatttttatataatactatgttaaa

SEQ ID NO: 45647 - DNA, 1238 bp, Cannabis sativa
gcaatctcaccctcctcatttttagccattaaaagtctagagagaacatccgctgctataatgaaaagagctggagatagggggtctccttggcacagcacacaagtcggcgagataactccttgaacaacacctttgaggagaagccccattctcttaacttcaatacacttcttcaccaatctgataaagacttcgtcaaacttcatatttccaagcacttccccaataaaaaaaattccaactcatcttatttatcatacgctttctccatgtctaattttatcatcatgaaaccttttttaccccgtttttccccattgagtggactatctcctttgcaatagcagtgttttgcgctatcagacaacctttaacgaaagttgtttgggctggggagataatacaaggcagtaggattctcaatcggagagctaagatttttgagatgcatttataggcgacattacatagagcaatcggcctataatcattaacacaacttgggcactccttctttggtattaacacaatgttagtgatatttatacactgtggaagttcaaaatttctaaagaagtgagtgaccatatcgaatacatctcttttgactgtggcccaaggctgtaggtggaaacctgtggacattccatcaggtgcaggagctctttcttgtcccatagattgaacacacatctcaatttcctttttcgttgggaaagctttcaagtgttcattgtcttggactgaaatacgacattcctctaggcatcttagtgcagggagagcagtcgtttttttgtctatgtaagtgttgttgaatctttcaatgaacaaattggtaatgctattaggattcctctcccaattaccatcatccattcacacctgttgaatgtagtttattagtagtagccatgaagaactttgtgcatctatccccctgctgcagccacttaacacttgacttttgtcttcatgagatatcttccctggcgaggacttcattcaaattgtctctaggttttactaaatcctccccattcacattatctctactttcaagttgctgaagtgatgatctagcctcactcacttggtgcccaatgaatttgaaatggactttgttccacttcgataggtgttcttttgtctttttgagctttcggtgaaagttaatcatcgggtgatgatgaagcttttccttccatgcatttttgacaacccaatggcattta

SEQ ID NO: 45648 - DNA, 1850 bp, Cannabis sativa
  modified_base (626)..(626): a, c, t, g, unknown or other
atgatttgatacatgccaaaatttaagggcaaaaatcctaattagcctaataataataataagggatatttgcggcgaaatctctttaacatttgtaattatatacatatgattttaataaaaaaatgacggtaaaaacgattttgttgcaatcatactatttttcaatcatcaaatgttaaatcaaaaacacatggcgatatattatagactacgtattaaataagctaaagaaataagtcgccacatgtttccgagcgctgacacttaacaaacttaattgacacttaacagctaaaaaaatatacgactgcaacaaaatcctaagataagatagtactgccgctactttttttttgagtgtgccgctactttttttaattatgatcatatgtgtaataattacaaagtaagaagatttcaccgtaaatatccctaatcataataataatgataataattgttgactcaaaaatttagagtagacttctaagtcacacctgctcgctagattgacaagaatgaataagtagataagtatttaatagagagacgtggcgaatttttagtagttcaccccttacatcgcgatagtaatggggttacgtctacttcgagtttttatntctcacgagatggtaattacagcaatagactaagtgtcagaagctccaaattctagacagatagaatctagagagagaagctctaacccttgtgggtaattttctcaatgtgaaaatgagctaatggagctatccttttataggtgaaggagacccacaaaaatagtaaaaaaaatacaaataagttgttttccaccattgatgatgatctaacggtgaaaataagcttcaggagatgatagccaattttgagtgcccgacaggtcccgctgctagttacccgaagcttatttttgtaactcccttagcatgaattttgatgataatagcttaaattgtgactagagtgtgagacatgacatgatagagcatttaaatagcttcaaaacacaagttaaatcgcgtcaaacggataaaaaaggagtgagttatggttgttttactgaaggcagtctaggtcccaatggctacgttgacattcagcgcccaggttgacatttgacatcaacctggagactggataagtgaagaaacgtccaagggatgtcctttaagattcctaagtgatagtttgacatcacctagtctatttataggttcaggtgaaattagtcaccggttctcggagatgttgctgtcttgtggaaattggagactcgaaactctccattctgggtgtgctagaaatgagaaataaaaagttgtgaatttgattcatatgacttcatagatcattgtaattgtgaaaaattagacagacagttgaaacgacatcatattcgaataagcagaacccaacgtactaggccatttgttgacttgggcgctgggccttttcacctgagctcccaggatattttgtttttgatacttccaaggcttttgaacttaaggacaaaatctccccccccccctgatttttgaacatacaaaattcaatggtcgcatcgaatttggtatttgagcaattgagggcaacgtcccaggttgattgtcaacctgggccctgggcccaaccttaggtcatcctgagcgatgagccctgtttttagggactcaagtttgtggttttctccccgagattaatttaatctttgttattttttatgatggaaaaatacccggaacactttttgttgaacttgatcgaaaacaacctaggttgacaatatgtcaacctgggcgctgtgcccagccccatgtgtcaacctgggcgctgggtcc

SEQ ID NO: 45649 - DNA, 2199 bp, Cannabis sativa
  modified_base (1598)..(1598): a, c, t, g, unknown or other
  modified_base (1889)..(1903): a, c, t, g, unknown or other
atatatatatatatattatagtgatgagtctttttatgtattggtagtgatataattgcagcttttaatgcattaaaccataatatctcacacacactcacattatattgtcagagcttttaaaaattaagtctctctcccaaaacatatctcgatctatatatgcatgtgcagccctgtttataaaccatatatgcatgtcagagatatttataaataaatatatttatatacatgcatatatatatatttaaatatataataagattaatatatataagtttggatttgtttttttgctcccttcctcaagttttattaataatattatgaatatataaactcaaatgaagttccatttcatagttaatatagtgtgtatatatatagatatgtttacgtacgtataggtttctattttcttaggtggatatatatatatataatatattattatatagtatataagtatgttatacccatactgaagcagtgaagcactatatatatattactaaattaataattaattattatagttaggacgtacgtatatatatacgtaataatattaaaatttggtgtatatatatgtgtatattatatataataagcttatgaagaatttggtgttaattgcaggtcgacagttgatgaactcaggagaccagtttagaaaagtggtaatgactcatgaagcagaggttaattaatttctattaggacaaataaaaattacaattttcaaatataaattattagttatttgagattaagtattagaaaaattataagttaataattaataagatatatagcaacatgcatatttcagtgattctctaaaatatatatatatatatataggtttgtttgattatgaattgttgtaatcatgtataggaggatgatgatgagatgttaatgatgaagaagataagattggttcatgagagggttctgaggtctaacactagagactatggcagatatgatccagctccagctcttgttaagcctcctttcaagctcattcccaactaattaaacaaacatatatatatcatcatatatatgtgaccagtttgtagaatctaaataaatgatgtcatatatataatatccatataaaagtgtaatatgtataattaactaaaatatgtgttatatatatctaaatatatatatatgcttataagttttgaaccctaatataatagtgtatcatgaattaatgttatataatagctagttttttttttttttttgctttcattctctttttttttcttattatagctagtatagatgttaaaactatttatatatatatatataattgctatatatataattgctattcgcattatataaagggaaatttacatgatatactaacttttatcattttttgcaaaaatactgttaggcggtattttttatttttttactgtattttttataagtttcatactgcagtatactatgttaagttttcactggtgttttacaggtgttttttagttgttctacagttattttgagttgttctgttgttgttttgagttgttctgtattgtgttttactggtgttttanaaaaatacagtatttttgaaaaattttctgtgtgacagtatttttgtaaaaattaactcaaattctaatatttttataagttttcctatataaatcaagagtgctcatgattagtattgaaaatactttatgaataattttatttaattaaactaataaagatatgatactttatagtattgtcactacaaaaaatatatatatattgataaatttttcttcacaatataaattttttttgactaaatataatttttagttacaataaaattacttgtgactaaaatatannnnnnnnnnnnnnnttgtcactaatttagttttagccacaacaaatattgcgactaaaatcacatttagttaacatattgtgatatttgtgactaatatttttagccaaaatataaaaattattatgtataattagtctcaatttttccatttttaatcacaataaaagtaagattttttgtcattggtattatctcggtacttttccatttttaaggccttttagcgtcgattttggtgaaatttactaccgacgttaattcattcgaacgacactgtatggttgaaaactgaaagtcctaattactac

SEQ ID NO: 45650 - DNA, 2483 bp, Cannabis sativa
gtcaacaatcaactcaagaacatatttttgctaaaccgtgagcagtttgggtaacatttctctttacataaaaaataacaatgccagggaaagagaatagtaaacaacagatattaaagattaaatcaaaaaaactagataagtctaaagattcataatttcaaaatgttgagacatgaagggcatctatttccacatgagtaatttgtagtgaaagttgagagatccaattaagtgcatagaagagagcttttacctccatttcatctgatttgaagcagccttgaacaggtttcaacataagcgcaatgagttggccattatggttcctaacaatggcaccaactcccaaaacctttgaaagaggagttatcgttgcatcaacatttagtttcagtccatgcaaatcgggcggcttccaagggatcccttcagttggtagattaatattggtcgaagaagtagtaggttcaataacaaggttgggatggtttttatctttttgataattctccatgtagttcctagcataagaagctagagcataaccatcacgctttgtttcactatgaattattttatttcggtgagtccaaatcacccacataacgcatataaccatttctaattcttgttggctgagtaatgttgaaagatgaaaaaaataatcaccactaaccatacaatgtgccttcccgaaatcaattgaaaagttgaattgtctccatacagctttagcatgtctataatggaacaatgcatggcctatcgactcctccgcttgtgaacataaagaacaagctgcaaaactgagtttttttctttaaaaagagcaacagccaccggagaaagttatgtattatacgccatgcaaaagtcttaatatttggtggcaatttcagattccgaaaaaatttccaccactttttatgggagcttgagaatgactctttctcatcatcttctaagtcagtagctaggtgtaattctgattttactgtgtaaactccagctgtagtatggtttcatataagtcgatctgaacccaggaaaaaaataagaggtattgaaagaattcggtcaatgccaatttccttaaagtgagcttttaacaaggatgtattccattctcttgtctctgttatgtagtatgaaataggaagagaggatggtcctaaataggagataggccgaaattaactatggccaggtatccatggttccaacccaggattagtatgtaacccattccccactttatattgaagccctttgagaagtaactgacgaccccaacaaatttcttgccaagttagagatggagaatgaccaatgattgatgccaaaaaagatgtatttgaaaagtacctgtgttgtagtaaatgactgagaagggaattgggcatttcaaagatacgccatgcttatttagccaaaaacgcttgattaaaatgcacaaaagaatttttgtttgaaccctactaaaaattagccatcatagactcaagttggctacagaattttttaggcattttgaagcaactcattgcatacgtaggtatggattggaccactgctttctaaagaacctccttcccacctatagaaaagagtttttccttccaagcattaagcaatttctaaatttgttcctttatagagttgaacatttattttttatctcttccagagtaagcagggagcctaaaatatctttcgtgataatcacttataggcatgttcaaggtttgatggaaaaattgctgagttgcggctgttgtgtttggcgagaaagacataaccaatttttgggtgttaaggagctgaccagaagctcagttgtaagtatcaagaacatgaggtatagctaaggttggtgtgttggtggcatggcaaaacaagaggctatcatctacaaataataaatgtcagattggtggggcatgccgtgtgagacgaagaccttcgagattaccaattgagtcctcatgattcaacaagcgagataagccttcaaaacatatcaaaaataaataggggacaaaggatccccctgttgaagtcctctccttagtatggcgttcccaactatttcactatttaaagaaaaagagaaacttgttgaagaaaggcatttcatgatgagagacatccaacgttcatcataacccatcttacccatcacagcttcaatatagctccactcgatacgattgaaagccttactcatatctaacttgagtgtagattaaccctttctttccttgagttttatgtttgagatggtggactaactcaaaagctatcaagatgttatctgtgattatacagttagatagaaatgcactttgagtttttgagataagaaaaggaagaacatctttgaacctaaaaaccaacactttcaagatgagtttgtaaatgatgatgcacaaagtaatcatcctctagtcactctgtaacgtccccgcttcaagcctcca

SEQ ID NO: 45651 - DNA, 1947 bp, Cannabis sativa
taaaataatttccaacatatactactttgagaaaaaaggtaggaccacagaggactcatctccttgagtctggctgcaagtgccattacccttgcattctcgctaagacttttggtcatagcatctgcctctaagaaccattggatgcactccttgaggagcttgccttcctgttacttgacatccaccaaatcattgggtttcatctggcattggccagatggagtgaattggctgccaaaagcagccactagatctttacatgagtcgaatgatccagtggagagcttaaggtaccactgctgagccaagcctgttagtgtagcagggaagattctatacctgacatcatttctcacacccagtagatcagtctgcacttcaaagtagtggatgtcagataacgaatcttctttcctagtgtattggtgctcggaagggttcttgaactttagagggataggaagagctttgattcgttcaaagagttatgaccgctgctctctgtcaagttcgaaatctgataacttaggagtcgtgatccttttcactaaggctttcgaggtgtcgaattcttcccgattgaccccatgggtggtgttctgcatcctaattggagcttttgttccccagtaggatctcctttagaagttcctctttcattgaccttttcttggtcaagatgtcacacaggtctcttgtcttcctagttgatcatgtactccaatcgacttgggtcttgttgttgtctcctgaccacagggtcgtgaaggtaacactggtgaggtctctagaatgaacttcggatcatcttgggatgatcttttgtgggagtgttcattcggagcattgtagtggttatttccctcaaagtagtgttcaactggatcacaagtctaaagagaattgaactggttgctcaagttcaactcctctccatgtactcaagggaattactcatactgttgtccatcggggccatgggaaaagtagtgacacaattcccctttcatctcagaagtattttcgaggatgaagcgattcattggttcttactcaccggatctcatagcctctagttttaaagtagtgtctcctactacctccttcagtttgagtggcaggtccctttccccttgcagggtcttggggcctagtgtcatgaaagtgttgagaaagacttatggaggagtcctgttggttctctcagtgttacaaggtcattcaacattaggtggagggcccattggtcggtgcccatgagcttgagtcctttcagactcttgctcgattgtactttccctctagaatgtctcaacgcctagtgtttgcttagtgtctgctcgattactaggtgtggtagtgggatttcgagcattaagggtttctccttgagtactagttcccacatgactagtgggttgacggggagtctctctaacaaccttgaaaagaccccggcggggagtagttccacgaccaaagcaataagcttctctaatctgttgagagaggttagctttccagtgttcttgctcaacttgttggctttcaatggtcctctagttttccacataccactgttgaaactgttcgtgttgattagtgagagagagaatctcacagctattgttgcaagtcagccacagttttgttgagttgggagactcgaggatcgacctccttagggtcatcaatctccacgtgaggctccccaagtgtgatctggtcattggtgccagtcccgggagcatttggtggccttggaggatgagttgtggagctagttttgaggtctgctcttggcacctagggcgtaagagtagctccagttccaattccatcaattggcgtgcccctagctgattagccagaagttgggattcctctgtcaacacttgtagattgtgttgcaaccatcttattagtaactttcttaagttgtgg

SEQ ID NO: 45652 - DNA, 1551 bp, Cannabis sativa
cccttttgccaacacatcataggtaaattctattttaccagtgtaataccaacttttgcctgcacaaaaatgtattggcaaaagtgatatttcttgtagtggcatatggcattggcaatgaaaatggtatttaatttatcgtactataatttgttaattaagatatataaattatgaaatgaatggaaggtagctttaagtgaaagcatgcgtgcgttataaagctaattagaaatgtactatacatattgcatgcggatataattagagatgccatcctttataatatatatcttatatttctacatattctattctattatgaatatagggaacctacctatgtatagatatttatatataacattgttagaatttgaggtagttaacaatgagaggagtagtctattcatcttatatatagtattttatttccacatattacagtatctccaatggaaaataatatttataattgtcaaaatgcgcacatcatcctaaaatattaatttttattctctctcatctacatatataaaatttgtcatattttcttagaaaaaaaaaaaaaagaatttctaaaaggcactagtgatgcctagcacccactttggtgtcatactgttattggtgtaattaagtatcagatcttatataatttaagaaaatagtttttaaggaatatcgctaatcaatcataagacatcacttatagaaggtgctaggcactattagagtccaatatcaacactctaaaaaaattacttcaatggctgacaactctaaaagctgtgctccatggtcgcacatgtgaccattgtctattttgaacttcacgtaaaattagttttaaaaattagaccacattacgtatgtgtgggaagaccactctaatgggaacgtgagactatttctaataattaccaaagcatttctttcttcttctttttgtttgttcttttttcattttaagggtttggaaagaaaagaagcatatttggtgtattagcacgcggctagctatatagctttggaaatgtgaatcttttatctctttgcttttgctttattgggttgttttgttctttgtaataaaatgatgctttcaccctactacgtacctcctcatgatcttcttctttttccaaccccaaatattatgcaaaatatatgatgcatgccaatattgtattgtgttgttatgatttccatgttttgtcactttttaggctaaaaggcttcttcttcttcttcttcttatgtattattattaggaggagtgataattaaaatctgttattataattttttagtcaatttttacgtccgaaattacatgttagaatatttttttatagcgatattcgttatagttataatgtcatacctgtaaatttttaaaaaatttcgaataatttaaagtactgaaaacagttcttgatattccaatttaccacacgtattcaaaaaaatttaaatttatttttcggcactataaactgtttgaaatttttaaaaatctttactaagatgatgttgcaactaggacga

SEQ ID NO: 45653 - DNA, 5916 bp, Cannabis sativa
  modified_base (5479)..(5480): a, c, t, g, unknown or other
gggtttggaaccctactgcctgatagagaattagttatctccaaaaggtgggttaggtctatgtcaatcagaattgaggatagagaattgagtgctaatttagttcaattaggcttagtgaattttgaaatcatatttgggaatggatttcttgtccaagtactaaggtagtattgattgtaaacagaagatggtgatcttccaacccgagggcgaggaaccatttatatttatgggatcagttcagggatcccgaattctagtgatcttggtattgaaagctagagattcgttacaagatggatgcttagggtttctggcagtgatattggataccacatggtctgagtcaatttggctagagaatatcagggtgcttcaagaatttatagatgtttttcctgatgaacttctgggtttaccaccgcaacaagaaatagattttgttgtcgatttagcacctggagcagagccagtttctaaggcaccgtacagaatagctctggcaaagcttaaagaattgaagatacagcttcaggggttgcttgacctagggttttctcgacctagtgtttcactctagggagctcccgtgttattttttaagaagaaagatgtatccctacatttgtacattgactactgagaattaaataaactcacgatcaagaataaatatcttttacctaggatcgataacctgtttgatcaacttcaggggaagatagtcttctttaagattgatcttcaatcgggttattatcagttgagaatctaagaggagaaaattcctactactgctttccacactaggtatgggtactatgaatttctagttatgtcttttggactaatcgacgctttagaaacttttatggaactgatgaatagggtattcaaggatttcctcgatatatgtgttatagtatttatggacgacatccttgtgcactctcaatcagaaagagagtatgagcaacatctctggatggttctgccacgattatgagaacataaattgtatgccaagttcaaaaagtgtgagttttggctatctcagttgtcttttcttggacacattgtcagtaaggatgggatcaaggtcgatatagggaagattgaatctaacaaggattggccgagactgaagatagttatggaagtaaaaaatttctaggtttggttggttattttcgtcgattgttgagggtttttttaagatctcaacacccttaatcgaactcactaaaaaaaagaatcagtggtttttgtggacagataagtgtgaaataagctttcaggagttgaaacaaagattgatcacaactccggtgatagccctaccctctgataaagaaaagttcatggtgtactgtgatgcatccagacagcgtctgaggtgtgttttgatgcatgctgatcgggtcatcacttatgccttttgttagttaaaggagtatgaacagtgatacccaactcacgatctagaacttgccgcagtggtttttgctttgaaaatttggtagcattatctttacggagagaagtgtgaaatttatatagaccacgagagcctcaaatatttctttacccataaagatttgaatatgaggcagagatgttggttggagttagttaaagattacgactgtgaaattctttatcatcctgtgaaggccaatgtggtggcagatgcccttagtaggaagggtcctaggcaagtgactagtatgatcaagatttcacctcacctagtagatgatttggtcagattaggtattgagttttttgtaggaaaacttaatagtttgacattgcaatctgatctgttagatagaattaaagctgctcatttaaccgatccaaaactggtgaagatccaagaagagattttaactggttaagctaaagattttatacagtgtcgggtaatgagatgttgttgtttagagctagagtttgtgttccaaatagtgttgaacttaaaaaagaaattctcaaggaagctcataccactccttattcactgcatcctggcactaccaaaatatatcaggatttaaaacccttctactggtggtgcaggatgaagaaagatgtggtagaatttgtatcccggtgtttaactgttagtagattaaggctgaacatcagagacctgcagggttgttgcaaccactaacacttcctaagtgaaagtggaaagatgtcaccatggattttgtggttgggttacctaaaaccacggggatgtatgattctatttggattgtggtagatcaatttactaagtctgcacattttctaccagtgaaaacaatctatacaatggatcagtatgtagagttatacgtgaaagaaatagtgaggttgcatggggctccgaaatccattatataggatagggctccgaggttcatctcaaaattttagcagagtctctagtgggctatgggtaccaagttgaaattcagtacaaattattatcctcagactaatggacagtctgaaaggacaatgcagatatgttacgtgcctatttgttagattttaaaggctcttggagtaagtatctaccactgatagagatctcatataacaacagttattagagtactatagggatggatccctatgaaatgttgtatggtagaaagtgcagatcttcaattcactgggatgagactagagaaagaaaatacttaggtccagagtcagtgcaacggaccaatatggctatagaaaagatcaagaccaaggtgcttgcctcacagagtaggcgaaagagttatgcatatctaaagcatagaaacgcaaaattttaggtacaaaatcatgtattcctacgagtgtctccaatggtggggatcaaatgttttggtagaagggacaagttatgccctagatttgcagggccttttgggattctcgacaaggttggactagtagcatattgtctaaccttacctccagcactttcagaagtctataacgtgattcatgtttctatattacggaaatatatttcagatcctactcatgtgctgagttatgaaaacttagaacttcagtcagatttatcattcgaagagcagtcagtttagattttagacagaaaagataaagtccttcgaaacaaaaccatagctttggtcaaagtgctctggagaaacagtagggtggaggaagtcacctgggagttggagtccgacataggggctcaatatccatagttgttcaagttagattttggggatgaaatccttttaacgggggataattgtaaagaccgcttaattttaatatgataaattagcaaataattagggcttaattatgaaattggatttctatttatgatttatgaatttatggagatgtatttgaattctaggtgtgttatttacgttatacatgaaatttcatgttttcatgttttatgtcggcaatattggaacacgatgtttggccaatagaatcacattttcttatgatttagtattttagtaatagcagagcaacctagatagacattgggaatgtcgaaattatttgagattgtggaattgaccaaactacccttaggcagcatagaggcttttagtataagtagggacaaaatagtctttttgccatgtgttgttatttgtcctttagtgatatactattagatctattaagcagaaggttatttgaggtgtttattagataaatattagattttatttgaagtattcaaagttagaaattaggaagaaaaatcacatttcttcttcttctccttttctctctcgagcacttgggaaccaacagcttttggaggatttctttagttgaatttagggttttctagctagtctttagtgattcaaatcaaggtaaaattctctagcctctctcttagtaatttcttaagttttagtgaatcaattatgcatgattttagagttagggttttgtgttgtttaatggtgtttgattttgtgttctggtattatgttgaggttatttaagctctattgtgttggatttgttagttgttgtggtgattgagtaaggtttgagtttatgaactcaagttttgctctcaaatggtggtttttgctacattggttgttggttgattttattgcatagattctattcattatggtgtaactaggtactctggaaggtttggtagcatttagaatcgtattgaatggtttaaaaggatttttgtgtttcatgcactgaattgatcggccggtttagtgggacctgtaggaattggaattctgattggtccctaagaaacccctctaaactggtctttcgattggtgaatcggtttgccggttgggcagtttaggaaaccctagtttttcctatttttgcgatatttatggtattgtcatgttatccattgatagggaaacttttagtttcaattttaagtccctaaaaagtgatttagcgtgtcactcaccagttttacgaatattgtgatttaagggcctataaatcgtcaagtagctgttccactcaggttgaccggtacacgtgaatttgaaaacgaggtaagattagtataatggtttcatatatgtatacatgtttagcgtacatgttagttgccgtcaaaatagcatatcagggtatcaatgaggtatacatagagttgcaccgaggtaccaataaatatatgttaggaaaatcagtggccatcagattagcatatcaaggtatcagtgaagtgtacatagagttgcacagagatgccaatatatatatatgctaggcctccagatagtatgaattaactgttaccacatcagtaggactagagtactgagtatagactggattcgtagttagtcatactctgtcgagaacgttcctgacctagttatcaaattgtaattaggtgtatgggcgcctagttacggtctaaatatatatatgtatttatatttatgattatactttttttaccgagtttgtcgactcacagttattacatgtatgtgcaggtaaaagctagaactgaaccattgtgagtctaaagctaaggatgaagattgtacatatcaagacggttagacctggagcattcagggtcttcgggacgatgttggctcactttgctagtcgcaagacgacaacttttgaagttaaaatattctgtaacgtttagaacgggatctcggattatgtaaattattatgtttaattattaaagtaaatttatttaataaatttttaattattcacattttacaataaaccctttgattagcaaaggtgtgcacagtatttagaaaacaccgtaacacgtctaatctagtagggtgttacaatttttgtattagagccgccaggttgttctttgaagatcgtcaagatatgtacacaatcattatcagagataagcttgactcatggctcggtaagtttttgcgcattttattagttttatttgttatgcatgattagaaannatgatagaaagcatgttagtagattgataactaaataggagcatactaacttcccatgtaagcggtagttagatttcaattacgatcgctacctgatcgagctaaatcatgaatgcacgagtttgtcctatagaatggaagcctggcaaaaatcatgcaatttggttaagatagatgatactggtggcagatggagagaatgggatcccccctgttcccagggctaagttaggagccggggaagaatctatagaggtaattacaaaaatccaccgtagggttcgttagaattggagcaaaggttcataaaatatggaagttagaattcaatatatagaggaggagattaggaaattaaagcagtatggacttcttattctaccttcatctcaagtactggttgtgttgattacagagttgccagcagaaaaattta

SEQ ID NO: 45654 - DNA, 3515 bp, Cannabis sativa
tttttttaaaagttgatgatatatataagataagtattaatcaagagaaagaaaaataaaccctgatcactctttttctcactcttctctcgagctagccaaaaccaagcaagaagggaccaatttctttgattctcctctatccaaatctatccctcaacccattagtagcaactagagataagccacttgaagagaaagcttgaggtaagagtttagtttattttctttcttggaaagcttaggttctaaggttgaatttcggttctattattactgggatatggattagcatttggttttgtttctgggaagttttgggactggtttcgaggctcctttgaaggttttaatgttgtagagaggtgatagccaagttttagtttttaagctcaaagcttgagctctcatggcaacttttgtgtttaaggatgattttgatttctatcatgtagaaaatgttatattgatgtcatagaactgttctgtgaagtttagaaaaaattggttaagttttgagactttgaaaacttgaaatttttgagtccctgcggttataaactagaattccagatggtacagccctgtaccaaccaaaatttcgtttggcagtaatcaagaaatatcgatttttgtattttggtcataacttttcactcaggtgtctattttagcgttctatgtaccgttttgaagcttgtgaagagctctacagtgtgaagcataaattagagctgaaatatgtattttattttagggttttcttaccacgaggtttggtagaataccctagattattttatgcgagtattatgcagtgtaatggaataaacactaactaatttattgttgttgtgacatagggtcaggattgttgggtgtttctccacttgggttggctgacatgcatgaatttggattaaaggtaagaaaaatatatttgtaccacatagcatgtcaagttacgattattatcgttatgactcaattatgatcaaggcaatggaacagtgatttccgttcagtgattgaaatcacgacgtcaagtgaaattttttttaggtttcctacttgttgattgtcttattagacgatcacagaaatagatcgataccaggttagggcatcgagttgccttattaggcaatgtaatatatggatgttaggttagggcaccgacttgccttattaggcaatgagatatatgaataacggagaaatgatatttgagttttctgtttgacaacgacagtaacatttgaatatcagttttcagtatgagggttattttattaaacaacgataaagacatttgtatgtcaagtgaggcctcaaaattgttttgctagaaaagtagtgataattgttactttatgaaggaacaactatatttattattattggactggtaattatggataactgtatttctttatattgacattcattgtgtttgaatatgtatgctgacccagatttaagtatacaagtaatatacgattgtttgattctgatgatgtgaatttacttgttgatatttttgtgatgaattatatgattgttattgtttttcttactgagtctttgtgactcacaaattctttgtggtgcaggtaagggcaaggaatgactaggacagccatgagatgacaatcttctccggtaaatgtacatatcgacttatccagcttgtatggtcaagttgttaagagttgttttgggttgtacctgatgtatattttgacttactgttatatatagccctttttgtaaaacttttgtaacaagggattctcgaaataaatatttttagcgatgttattttgttcattgttgtgatttaattttagtgagtttttaatattatcatagatttaatcaaatagttaatctattaatactaaactatgttctaaaagtatacacgtggcatccttaggagttagggcgttacaaagcccctctttgaccatctcttcgactcgccacaagaaggttcctcaattgttgttgcctccgtcaaggttcgttaaggtaacaccgatgatgctttggacttatccttagattgttgcggtttgggcaattgctagaaatgaaaaaggagaagcatttgcatttgcctcttggttctttgaaggaggctttttgccataaatggttgaagctttggctcttagatttgcttgcaattaatgccttttacttggtttttcaaattttatttttgagtctgattgtcttagtttggtatctaaatttaataattatgttttgttgtagtcttaggattggttttgaatgattttggttcatctttcaaactatttaaatatgtaaaaatgatacaaatttgttaatatgacggctcacactttagctaagtatgctttgtcgactactgttaataaagtttggtggcccgaccatcctatttgtattcagtcttttattttatataatgcaactaatgaatgaatacaagcttgtcccctccccttggtgtagagttttttttcttccaaggtagagttttcttgggacctttttatttgaaaaaaataataaaattaataggagtaacatattttttacatatctaaaatgtaaaattacttatttaacctctataattagtgcctagccaatatataagaggagtgttaccgtcaacctcctattaaaatctcttagtcaatcttcatacccgaaaacatatgtggaatactttttatttatttatttttttcatggcagtgttcgttatacttacaacatcacccctataaattttttaaaaatttcgaatagtttacagtgccaaaaatacgtttgaagttttctaaacacacgtggtaaactggaatatcaggaactctgttatcgacattgtaagctattcagaatttttcaaagatttacagaaatgatactgtaactataacgaataccgttgtgaaaaaaattttaaaaaaatattttgacatatgattttaggtatggaaactgactaaaaaattataatagaaaattataattagcactcaatatataatacaagaatagcttttatatttttctattaaattataatttggaggtaaaatgaatcaaattgatactgaattgacgtcaaacgatttttgaatttgatgactaaaatagataagtcatcacggttaaaaacttcaatttgttaacaaattaattaaaaattggtattttcttgacagaaaaatggtattgtattgaacattctttgtccttaggtcatcaaattattatttaaatttgtattaatcaatacccaaaagaacaaagatgatgttcttgttgctgtaaagtttttcctttttttgtgaaaggtgcaataaagtcttactctgagtactttctgctgaacataaataacacagaagaagacagactgaatttatatggcagttttttctttattttattaattaattaatattgctatttatttaggaaaatttacataatatactaacttt

SEQ ID NO: 45655 - DNA, 1446 bp, Cannabis sativa
tggtaataaataaaagatttggacatccacataattattaatatttataacaattatcatatagttaattatatattgtaataaagcgaggaacaagctagttattttacaatatcactaattttttcgtatgatttttttgtgttgattttccaataaaatgaacacaattaactttggcattgattttaaaatgaagcaaattttttgtgtcaaattgttgctaggtgattaattctaaaaagttgaaatagtaaaaaagaaaattatctcctttactattttttttttaaatttacggtatgtgttgctttctatgtgggttgctgtgtgaattttagttgcgatttaagttgttctattaattgttatgaggatttttatagtgaaattctttaaaaatacaaaaaaaaaaaaaaacaactattttgaaatgtaaaaaatgaaaaaaactcctagtaaaaatatgttgtctcactcatatttttttttttatttatttgtactgcaggttcttaaactttatatattttggtaagttggtccttaaattttattttttgacaaattgatccacaaattatataaattttaacaagttagttctcaaacttttactttcttaaaaacataaagtcatcacccttaaatgatggtattttatttatttatttatttttgtatgtattttaaatattattatattaatatattatcgaactatatatttttatttatatgtattttttttcaaatataccaaagtaaaaagaagaaaagaacaattgaaaaagtttatagaataatattagtattttttttataaactaccaaagtagattatattttaaattttatttttaacttattctccacaacgaactcatgaaattttaccaacgttgatgcaaaatttaaataatcaataaatttatatacaattaaaaaattattaaaaatataatactacatattcgttaatcaataataaataatatactataaaagctaaagtataaaaacgtgaggaggctaaaatatttaaataatatactagcaattatatgagtctactagtatttatactattttttttattaataatatatatgaatgtagtgaaatttaaatattttaaaaaattaaatattataattatatatattgtatgaatacttaaaaaataaagataaaatattaatataattatttttatcaaaatattaaaattaaaagaatgaaattatttcaatttaacacaaaaattaaattaaagtatgtaaaattgataaaaatgtcaatatctaactgtgacgacttaatgttgctaaaaaataaaagtttggggactaatttattacaaaataaagtttggagaccaacttggcaaaacttttatggttttggaaccaatttgttaaaaaataaagtttggagactaacttg

SEQ ID NO: 45656 - DNA, 2560 bp, Cannabis sativa
agttggaatagagagaggttttaaagatgattaaattgtttatgggacagatgtaggtgttgtttgagttgtagatggtaggttgctttctggtgttgtagatgtaggttcagtgtgggttgtagatggtgaggttcttgctagtgttgcagatatctgaaatgcaaacaggaacagattcagtcatgggagggtctgaaataaaacctgtcaaaccagcaagaagttgaaaaaaatttattgtaatcatttgctgaagtagtaccaataaaagggaaaatatgttcatgaaattgaacatctctaatgaagaaaactcaattagtgtttagatcaagaagtttataggcttttatgcctattggatatccaataaagattcaagaggcagacttgggagaaaaatttgatctagacacattaagaattgaagcataggccaagcaaccaaaggcttttaagtggtcatatttaggcatcttcttgtataaaatttcatatgggaatttctattttaagttgggagtaggagttctattaattaagttatgttggcagttagcaacacaatcactccaatatggtaaaggaatgtgtgattggaatacaagggctctagcaacattaagaagatgttgatgcttcctttcaactacagaattttgttgtggcctatgaacacatgaatgatcgtgaatgatacttagatttttgaacaagataggaaattgaagttctttagcattatcagatttgatgcctataatagtagtattaaattgagtcttaacaagctgaataaattgagaaatgacagtttgtgcatcagatttttgcttgataaaatgaacccatgtgaacctagatttatcatccactatagtgatgaaatacttgtacccttcaacagataaagtgtgaaaaagaccccatatgtcaacatgaatgaggtcaaaacattgtgcaacaatgttatgattagatataaatggcaatcttttttgtttagcataatgacaaatggaacaatagaaattttcactggaatagttgctaaattgcaatgttttattcaaaatatgaagtttaatacaagaggggtggccaagtctataatgccacacagtttcatcaataattttggaataaaaaaaagaacaaatagtggtacaaatggtacttttaggtagacttaggtagtacgagttgccatctcttttacccatcccaatctgccgttactacataatgtcctaaatagtacaatgatcaggataagaaaaaggaaggaacaagaagaaaatttagtaagtgttgtcacagataatatgtaagtttcaaaagcaggtacacacaatacatcttccaaaataatattgtgagataaatgaatggtaccaatgcaagtaacagctgcactcggccatcaggtagcttaacaaaagaacaggatgtgttggttttaacattaacaaataatgaaatgttagggcacacatgatgtgtagctcctgtatcaataatctatttttgacaatgaataaaatttgccttaccagaaaagtgagacacaattggttgttcagcactggtgggattctgatcttgatttttctgagataacactgtcattagcttttgacattgcacagtaagacttgagataagatcttgatcattctctccaccttggtcagattgattactctagttttgctgagatccagagattttagcagcagtctttctattagattgttgtccagaattttgagttgggaacttgccatggaacttgtgtcctggtggatacccatgaattttgtagcacttagacatagtatgtccaagaatcccacaatatgaacatgccactttggatctattgaaatttgcatttccagcaaattgatcattcgaaggatttgatgtaggagaattaggatctttatttacctccagattactggcacaaacttctctctacctttcttcttgaataacaaaagcataaactttgttaatagctagaagtggttcttgcatcaagatttgggatctaacattgttttaagattcattcaaacctactaagaactcaagaactttgtcttcctcttaatattcttgtattgttttcatcgcaccacattggcaaggaggtagtggtctgtactcttgaatgagatcccataaagattttcttcaagtaaaataggtggtgacatccaaggctccttgatttaacagctgcatgaccttttagcttgaaaaatccttggtgcattcctctatcgaaatctttcttgaagatcatcccaaatatcagctgtaatctccatgtacattatactatcatagatttctggtgaaattgagtgcaacatccaagaaacagtcaagctattgtatcgatgccaagcatcataatcctcatgatcttcatcaggttcttgcagcttatgattgacaaattgcattgtattcctggcaagtaatgcaactgtcataacacgcttccaaggatgatagttatcgcttctagtaagaactttaggaa

SEQ ID NO: 45657 - DNA, 1964 bp, Cannabis sativa
aaaaaacaaaaaacaaaacaaaaagtgcccataattatacttttatattttattggcttgaatatttgattacaaatataatatattttgaaaagaaattgattattactaattaacttaaatgtaaagataagaatctaacttttgtctagggttttttctttaggttttgcttttgccgcttggtgtcttcattctccctcttcggccatggttcaccaactcttttttgggtttggtgtgaggccatagtcgggagaatggtttgatcgacctttgagactgggttcaatggttgctattaccatatgggttgtttttttgtttctactatgtctgctggttagcaatatctctttggttgggtcgtgttaattctcgagtgttgggtcacgtgttttgccagatgagagacttttcttttttggtggtccatttcagatatagttttgaattagtggtttcgatgggtctttggtaggaccttattatggctcgtatctaggttttcgggatctctcaagctgtggtcaatgacgtttagggtgtggtcggtgagactagggtcattggtgtggtcccaatggtgattagtgttattgattttttctctcaattttgtcttgtctttttttatgtaagagtcttggtgttttatttatttatgataactacatccctgtttgatctccagtctattttggatttggatgaacatgttattctaagatttttactggtgtcttttaacaccttattttatgattctttgatatttattgttgggaattttgaacatggtttgtcatgattttctccattattctagttggaataattggggtattttacctaattttattgaaagatctttagttgtttgccattgatgataagtgtgatctgtcacttgttcatttaaggtgaaaatttagtattctttgcattgttttgatacttcacaattggtgacttttgggtcatttagttggagatagtgtaaggtttattgtcctagttattgcaaatggcttgattagcctatattttgttgatgtcgctccatgagcaatatctacatgtaatagactatgtctgatttacgaaatttaattaccttttaaaaaaaattaatatataactttattatattaattttaaaaataatatttagagtccacatttttttaaagggcttaagattaccttattaattataacactactaaagaataggtattcctgtcgattcaaacgacaattttcttcgaggaccaacaataataaaattgagtgactattataaataaaaactactattagccattggcattataaatcgaactctaacttaattataacctttccttcgatcttttattcttaacaattttggttccaatcatatacttgtttaaacaaaacactacatcaacatttcaaaattggtgtaaaaattaagaaaaaatgctaaaaaagactaacatatctaacactttttatatggtattatagtcaaaataaatttgaatattcttcatatttataatatataaagtcaatataataaagttttaataatagaaaagaaaatcttattaaagcttcaacatcataatatacatatatacaattcatcaaataattatattacattgtctctaaaaaataatgtatatattacatatatttatttttatatgaaaaaagaatataaaccatattgaaaaaattggtaattttataatatatagtgcagtgtagtttaaactgcaattattaaatttaaaaccgcaaatcgtagtgtattgtgtaatttagcaaaagtacaaaccacaattacactgtaaaagattttaaaacgtattttgtatacagtgtagtgcagtgcaaacaatttattctgtgtgggtagtttaatgaacaccacacacacacatatatatatatatataggacttaaa

SEQ ID NO: 45658 - DNA, 1905 bp, Cannabis sativa
ttttaaagttcttgttgatcaaacctttctgacgagaaaggaggatcaaactattatgaataactttttgattaaaaacctgtctgacaagaaaggaaattcaaaagttatatatgagatataactcataattcacatgtgaagctgaatactaacgactcatattgtataggaaagtattaaacgagacatcaaagtgtcttgaaaaaagtacttaagcctagtgtatgaatagacgatctaattattcatataagcaatcaaaaatatacaaagtgataaatcattaaaattatattcaagtttgcttgaaatagattataactattattgtgaggcaaaattgataactgctcgcaaattaaaagcatggaagataataaactgctcgcgcatatagtagactactaactacttacatattattagagaaaaatatgagcaatggaaatgcctaaagtattttgcattttatcaaaatataattatttaaattgagaataaaacgcaagtaaacaaatatatattaaaatttaagcataaacgtacgaagcattaaataaagataaaagccaagttggccatccaacctggaatatttgtctttacaaaaaaaaaaaaaagaagtgccacaaggggcaaaccattgtcttggccctagggccattttcctaaacataatgaaaatagataaaaaccaagcctacatagtaggagacttggacggattttcttcttatgctgcctcagcctcttcctcctccttcttggtattctcccagtaagcaagaatttccccttcagactcttccaagaaacttgtatccatgtttggatttgccatccaagctctataatgggtacggaggccaatgttattgcatcttgtgtcaccttggtagcattaagttcctctttaagcttcttacattccttggtcttgtcccttgcctccttttcggcagcttcaagcttggcctcgaggttctttttaaccttctcagcatccttggtgaggcgggtgttatccaacttgggatcgtgccattgtttggacacaacctcgtgcaaacctatcaatttttgatcctcgccttccaggtacttcagcttgtccatgccacggtgttgggcgacaaatgcgaggaaagtttgctaaaggacaaatagtgaatgtgttagaaaatttgaaaataattaaaaggaaaaataagacgagaaaggaaacagagtttaccaagaggccatgagcaacactcttctcgagcatgttctgcaaatgcccattacagatcagatcccattcatggggaaggaaggatttgaagtgacgctattaggaaacaccaaatttcgtagtgaattttgagctaggactgttggcatcgataggaagagtctcgagggcttggctcgaagaggcaaaagctgggttcacatttggagcaggctcgttggtacttgcagagaccgggggaggaattggattctgagtttcaatctcaaggacctcaaggttagctgtaatgccctaacaattaggcacgttacccaagctaattaagaaaccctaatcccctaatctgggattactagagaaataaacgtgagaaatttaaactttaatctaaacagaatgaaaattaaacttgtaataatttcaagctttaaaatcaaaagttacatatttcgggatcccaaaatcttttacaaaatattacaagtcttttcactagccgacctaagcggcaaaatcagagttacaaaagcacaacactggtagaccccaacctgcttggtctagtgtggcccgaacatgtacttacatcacccagctctcccactcatggctgatcagagacagatttaccctttcttgcacagtagagcacccgtgagccaagc

SEQ ID NO: 45659 - DNA, 5186 bp, Cannabis sativa
  modified_base (1329)..(1331): a, c, t, g, unknown or other
attacaacatctcaacccttaattcaaaaatcacgtactcaagtgaagaaaactcatcttattttcttttattcaatccaaatgaaacaaccagtagaaattattcaattcaaacttcaacacacttcaaaacaaatctaaaaacacaacccctaaattgaatacaaacatacagctcgaaatccttaaagaaaatcaacctttcttacttaaaccctaagtaattcaagaataaagtttcaagatcttaccttaatgtctaaacaagcttctaccccttccaatctgatccaagagctgaagaataagaaatagaaatccttggtttgtagctccttagggtttcgtgttagaagaagaataaaagtgaaggtatgtgacttgcctatttttgttttacacctaatagtttaataaataaataaaaacaattaaacttatttccaataatccatttcaacctaattaacactaaagataaaacttttatcaccactcaaatgaccataatacccctcctaatacctttaacttaaaataaaagcctaggggtattttagtaattctatctaatccgccaaaccaacaacctgaaactctaaactagtccggtataaaatctaattcaattcatcttttattgtcgtgacatttctgacctcctcgacaagttccacagttgccaggcctgagaataatttattcaaattatggtatctacgatacccacatattccaatataatctctgtaattaataaattacgctttatttattcttatctccctaataaactcataattagtttaagtaggattctagtcctactctaatacccacttaatcacatatttaatagaatatgtccaatttaaatatcaacatattttttgggatagtacaactatcccctcgttatagaaatttcgtcctcaaaatttattcaaataactcggtatacagcttccacaactgcgactttaactctcaaatcgacttccaatgttgttgttgttctttcacagcactataactagcgatatcgtctttgtttcacaaaactttctcttttctgttaaaaaaagtctgtttgaaattcaatattctcttaactccgtatatggattgcttctacctcttatttctgaaactttgaagtatattgttttaaactctagataaaatagggagtatggctagctaataggctacccgacctaccctttccaaaaactcaaacggacagattaacctgggcttaactcccttttcttaccaatttctgaattatccctttcattggaaccacctgaagaaagataaaattcnnnacttggaatttaatatctctacactttagatcagcatagctcttccatccattatataagcaatatacaaacttgaatctttaaactggctcgataccacattagcaatactcttataactgttattacatgaaaactcatttagaaccttccactcagtattcttatcggactgatacaccaatctagtttatataataaaatttccttcaacaaaattaaaagtcatttgtcaatctggttccaaatctttccttctacttctaaagttgggagtcactctactgggccattatatttcttcccactaaattgatctacaatataatattaacaagttctccaatcacgatctcaatccttgttctggttacatttccagtaacatttagtaagatcttttcgttttacaagctttttctagacctctttggttaaaagtactcactactaatttactccccaaagtggtagaaaatcacactgttaaaatttcaatcaactgtaaatgtcaccactgcctcctatctaacttcttccaaaacaaacagtatttaaggcttttttgttccgtatagacttctcattttcaccatagagataacgtgcccaactttcagtgcaaaataattactgccgattcaatatcatgactgaaataccattgctcatactccttcaatggtctaggcagttaggcgacaactctcctaaactatgttagaatacaatctaatccttgtttagaagtgtcaccctatatcacaaatttctcctcattgagcgacaatgttaatattggtacaatagttaacctttgtttcaatgctttgacctaactccactaagagtctaaacatccctcaacaaatattctgtagcattctgttaattcccgaaagcttctaacctcagttgtaaacttgggttgaagtcaactctaaactgctttaatccttattgaacctatcatgatactatctatatccatttcatgctctaagaaaccaacttaaagtcggtaaatttgcatttcctgcaattagcatgaagtttaagctcctaaaatattacaataccattgaaaaatacctctcaaatgccttctttgatttgaaagaaatcaaaacatcaataatgataacattcgcgaagtcatcaggtatgaaaagcttctttagaaatacccttctctcgaatcttcaactagtaaaaaccatatcgaagactgatctcaaagaagacagtcctaccctaaaattaatcatcataacttctatccttgacaaaagtatacttactcttcaccatgaatatatttaatttccaatgatcaatatatacttataaagtttcatcctcctccttcacaaataaaattgacgtactccaagatgggatacccagtccaacaaatttcaagccaacatccagcatcctctgtaacaaaaccttcaaccatctcaaataccattcgatacgaagtttaagatataaactcttccccaaatactagatccgtttcaaaatcaatctcccactttaatagtaatccccagtaattcccctagaaagacattcagaaattctcagaccactggagtgcattctggtcccataggtattcttcatatcacctacctcactagttaagaaactaacatttccatcccacagcaaatctcttaccttaaatgttgaaattaatggagttcagaatccgagaaccttgcccacgaacacgaatgggtcctcaccttctggttcaagagttaccatctttctttcacaatcgataattgcattaaacttcacaaatcaatcaattcctaatgtatcctaaaaatccactaattttagctcaactaatataaccaagcattcccttttcctcataactcaggaagggatttaactacctactggagaataactagttctccagtaaacagtaaactaccggaaccacttgataacacatcattaactttatacaaactttccaatcacctttcttgaaatataggaatatgttcaccagaattaattaaagctatcaacaaagtatggtcaatagaagtttaacttatcacggtagaaagacgagcaccaatctcagtctaagtcaaacaaacacccaaacaagaactaaaatgccatcacccctctatttcgattgctgcaacggcaagcagcttctttctaaatggcctactatgccacattaaaagcaggcccaagtttagcatttaccctaatgacatctcttacatctcagtccttacacccttggcaaaagaggttagatcaactacctaagcttcgaactggacatcccttagttgctaaacaactatatccatattccgagcgatatactcttcccgccttcaactagattaggctccctagcaaccttaatagcagcttcctcaaaatagaactttgcctatcagtctagtttagtgtcattctccatcaccacgctacctcagattaatcatgtaagttttgctaccttgccactaagttaatctcttactttatagcatacatttattctcaatctctagtggaagattcatacccacactactaactttgagcctggtaagctcacaattatccttactagattgcccccatgtacattcttccagtacactcgcgaccatttctttccatcattaaaatctttcacaccagaattaatgctaataagcattaccacatatacataaacacatttaacaattttatcataacttatcatccttctctaacaacttacacatttcaataagtagacaactcaatcaaccaataaataatccactaataaattaccaatcaatacttactaagctatgaatcgaacaactcttcgcagccaatgtacatatcgagccagtcttcaggatctttaaactttggtcgctctaataccatgttgcaatgccttgaccctcagggatgccacgtgtgtgtgcttttacaaattatctctaactaatgtattagtttatgaatagtgtgatttaattaaaaactttttgaataaattagaataaaacttctttataaggaaccattaaagtatggggatccctatttataaaaatttctatatatcaaattacaaaccgttattataaaagcaaagttacatattcatcataaaagaaaagaagttgatcctgcttcccggaagccaagacaccacgactaatatgtacattgctgggagacctcagtttcatggtcgaacgcaacttaactttcttacctgcaccatgaagcattcgtgagtcacaatgactcagcaagaaaagttattaactcaaaagcattataaacgcagatatgcatatcttaatatacaaatatatatattcatgactcacatgtatccatcatgcataaatatatagtattaacatttacatattcccacatactacgcaatatgagaaaaatcacaacaccatacagtcaacaatttcattgttatattaaatgaatatttaatcaatgcataaccacatattttcaggctttataaagtaccctaatcttacatttctataacacgtattcttacatctcgtgaggcactgaaactctgcaaaaaaaaaaagagactaatttcataagtagtataaaattcattcaatcacattataacaaagatgtatccgattacagctcatctcataataacatgcctaatccatttcacatcatcgtaatcacacaatctcgatatttcataaagtactcttaccactcgttaaccatgagctacatatgtcactatcgttgcctgatacaacaaatgataagtaagaatctatc

SEQ ID NO: 45660 - DNA, 1282 bp, Cannabis sativa
aaactcacaggaaaggatcttcaaccatgggagattatctgcgacagaagaaatgctgggccgactctcttgcccttgcaagggacccgtaccctgaatctcatcttatatctaacgttttgtctggtttgggtgtagagtatttaactatcattgtttagattgaatccaaacctaagacaacttggcaagagttacaagatttgctccttagcttcgacagtaagatcgagagaatgcaaagccttgaaggacccaaaaccgtgcctccaccagtagctcctcaagctaacatggcaactaaaccaaatactcaaggaagaggcagaggtttctactcccagaaccaaaaaagcagcaacaatggtggaagaggagctggtagtcgtggcaggtctaggggaagaggacgtttcagcaacaactctagaccaacatggcaagtttgtggcaaatttggtcactcagcccccgttttctacaaccgatacgatgaaaacttcatgggaagcgatcctcacactcagaatcagcaaaaacaaggtcataatgccttcattgccacaccggagatgctggatagcgatgcatggtttgctgatagtggagccagcaaccatgtcacatccgaaacctcctccatgagccagaaaagtgaatatggtggtaaggaaactctcaccgttggtgatggcagtaagctcactatctctcatattggtactggtcatttaagaactaactctggtcattttcttatgctaaagcaaatgttacatgtacctaaaatagctaagaacttgattagtgtatctaaactcgctacagataacaatgttctgattgagttttactctgatttttgcttggtgaaggacaaaataacaaagaaagtcttgctccacggggtgcttaaagacggcctgtaccagatccaacctcctcaatcccacccagccatttccctttctcactccaatccaaccaagataaacaaatctgctagagtgtccttaagtcctactatttttaatgtcaatgtaatttgacctgtggttgatgagtctttaatttccaaactagatgtatggcataggagactaggccatccatctactcgcattttacatcatgttttagagtcaaaaaatgtacaagttcccaaaaatggagtgagaaatttttgtaatgcttgtcaatatggaaactcgcactctcttccttttagattatcccaaagtcgtgccaaagttgtccttgatcttgttcacaccgacctatg

SEQ ID NO: 45661 - DNA, 1111 bp, Cannabis sativa
aacacaacgtttctagatcatcggctgaagcagaatatagagccatgtcaaatacaacatgtgaagttgtatggctgctgtcattgttgaaagaactaaacattgagcatcatggactagccattcttcattgtgacaacaaggctgcccaacaaattgctgccaatccagtgtttcacgagagaacaaaacacatcgaaatagattgtcatcttgtgagagagaaagttcaagaaggcatcatcaaaacggctcatgtttcaagcaaagaacagattgcagacatttgcactaaagctctgcttcttgctcagtttgctgtattgaaagataagatgaatctttgcaacatttacactccaccttaagggggagtattaaagattgtctaaggtgttgtgtatgttgttagagttagttagtgagctgtccaaagttgttagaattctgttgtatttttcttctctgttctttctcgtgtatataaacactgttaagctcctcattattgagctaatgagaattcattcatttcactctattctctggttcattttctgttaagatcaacgaagtacgtaaagaatgagtcttctaattaattgagtatatgtcatgatttaaattaaactttattaagtatatatgactaattaaatctattgtgaaacttttgaattgactaaaatatatattattgtataacactttattatatttaaattgtaatattttatatacaatcaatgtaatagtagggaaaattaatttttctttccaccagtacactatcttggcacgctctttagaccgccaagattgacaaatatcatggggtcggggatgccgatataggtgtcaaaaaatgctaaatttgaagaaaaatatacctagctatctcggttgagattgcatcatcattaatagcatgctttgctcgcctccaataacgaagggtcgattatgccgagatcatagactcaccaccaatcttggcattgaaatttacagcgggccagacttgtcgaaatagattaataacgggagatcgaacctgttgagatagactttttttgtagtgattaagaaaaagaagataggttagtctaag

SEQ ID NO: 45662 - DNA, 2120 bp, Cannabis sativa
caagcccattttaaaagtagcccaatacaaataataaaaaaataacactttattaaaaaataaaataatactattgacaatattttattttattttgttgaaaataaaaatttgaaaggatacatttatcagttatttttattagttttgatttaatatttattgaagccctcccaaagccaaatttctagcttcctcactgcaaatgactattaatatataattaattatttgtttacttattttacatcttgtagattggagtataattgtaaatagtaggctaaatataacttaaatttatgttaaatttaacacaaattttatgtttctcattagaaatggtctaacatgataacatgatacttaacattcaacgaaaatctaaaagtttaatttaagtattaatattgtcaaaaaagaaaaaattagacattaaattcaaatattctcacagaaaattacacattttataaggaaacttgaaaaaatgatcgattagaaatatactttatgaaaagacttagaaaaaagacagattacttaactatacacgtcaattttgctagctagggtcggaaataatgatcatttacaaaaataaaataagataataatgtcaaaataaaaccccagtacattttttgattttgagagagaagtactttaagattctttgatccactactacaaacgagcttgttatcatgatatgagcagaacgtctggttcctgcatattacaatcattattattactcaaaaattacatttatatataatcctacctcataaaatttgtagtatttttattttttaatttttattaatgaaattattgtagtattaattcactatatttattaccttgatccacaaaaggtgagagtataatcggcaccagagcaagtaacaacactagtaggatcatcataggcaaagctataagccatgggacaaaactccttaaaaatcctcgaataattcgtagcaacacaactcacaggattactatacattccacggcaacaatactcgtccctctcgaacacgtcacacgcgcttcggcaagcaacaactttgcccgtggcttcatccctaagctccgccgggcagctctgcctcaaatcgccttcgcacccgacactgctacaattcccagtgccgttgctgggcttaacaactataggcaagttaaagccatccacaaggctcacgtcgtaataatccatcgtttcgtttagattaaattcggctattgaggctggtggtgtacttgggcctgtgcagttcagcagggttccgcagctgcctgtttggcatttcccgttgccgtctttgtcgaaattgcagcctgttcgggcccaaattcgcccgctccattgcggcggggcggtgtagactgttgattggcctggttttagtggtggtattcctccaccggtgaagttgttactgtttgtcattgctggccatattacttccttgcagtaatttactatggtgaatattctcttactttcggatggttttggccctggttataaattaagtacttattaacgagtattgcatgattaaaattaagatcatttttttttattaaagtttggtctccgtagagaaacaaacccaaattaaattaagatcatttttgaataaaggaatatgtacatataattattaataataaaaaggggagagacattacctgaggttgtaataattaataagcagaggatgagaggtctgaagacaagtaatgatatgggacttaaagccattgattgttatggagttactatagtactttaaaatttggatgactgaagatcagtgacttcgttatacttatttatatatatatatatattatatatattatgtagttatgtgtaaatttatattatgtgtgtgatgaagaaagtgtaaagagaaagaaagaatacgtgagagagggagtgaatctcccgagaaggacagtctagaaaaatagaaaaattgttccttagcttagtttacaaagcaaaataaatttaaaaaatcataggattctttgcctcgccaaatggttatactttgttatttttgccattgattttctgtttttttttttttttt

SEQ ID NO: 45663 - DNA, 1949 bp, Cannabis sativa
  modified_base (1663)..(1684): a, c, t, g, unknown or other
  modified_base (1896)..(1909): a, c, t, g, unknown or other
tctattagaaagactaagtactaactaataaaagatcattataaataagaaaagaaaatgaatgctttcaaatgtgtattaaatgaggcccttagaaacatgatcttaccttttatccttcaggacagcaattatacctgctgcttcagcaggtgaaacatgtgccggagactgtgtcctgtcagcactaggcctttgtgaactgaagctgctagaggatgtggtccttggtgtttcagggcgagatgaactcggtgagctaacagatggaggataccaggactgtgtagaactgtcttgttgatggggttggggctgaggctgttgctcctgtgatcccctgcaaatgcacatatgacactaattaaacagctacagcttagaaaataaacgagtcctacttgttgctacatcttgtagaacctttgccattaattaaatcattttaaaaaataagagaccggcacagcaaactgactgaccttaaaaaacaaacctgccactaatctattttaaactgtataagtgatcattagtcatcacttaaggaaatccaagtattttttaaataacatacgtatacatctctatattttggtcagaaaagttggagtgaaatttggaggctagaggaaatggaaccgccttttctaaggacttagcctccaaatggatcaaaacactgtaatttcttgactacacaagaagaacactacctgaactatgatgcaattagaattgatgtttagggccggaatgacagaggcacccatctacagatactacaagttttcagagccaccatgtttacaagccttatatttgctgaattcaaggtctcttttatcagctttaatagcaggatatataatttttgacctcattcataaattaaatcacggtacacctcaactcaagtacacgggtcataaaaaactcacaaccatattaatcacaggactacagagagtttctatagtaagaacagaataagaaccataatgttttatggaactaatgagtaaatgattagacaatgaattcaatacaatacaatccaactacaaataattgatcaacagactaaatctctgtgaattggaaaaacacccaatttgtttcgcaaaaataagtgatcaggacgcgagtataatcgaaaatttagcgaaaaagaaaacgcttttgacaacccacccaattaatatagttggaaacaaaatcaaaccctaaaaaaacaaaaagagaaaagaacttaagcgtcaaaattgaactaataaaatggcgatggatcgtaagttttgggaaacgaattaaacattagccatgaaaagaaaaagaaagtaccagaatctgaacatggttggaggagctccggcgagttgactgagatggagaatcaaaagccaggaaagagataagaaagaaggaaggaaggaaggaaggaagagtatgaagtttaaattaaattaaagtatgaaattatgtattatttttcttgatatgaatgaaatatttgaatttaattcaatagcaaatgttttattttaacgcttttctatattcgtttacaaatgtacagcgcgtacgattaccaccgctgctccgtacgcgtaaaagggaccatggaaaaatatcactttttatgtttattattattattatnnnnnnnnnnnnnnnnnnnnnnattattattattagtagtagtaggcttttgcatgtaacaaatcatgtttcttgaatttttttttgtcgttaaaaattcttcttgaactattatgattgttagatttaaggacttttgtctatttttagtaaaaaaattctaacatggatgaaagttcagaggtcatgatttagtacagatcaaagtttgagaggtatgatttggtagatatnnnnnnnnnnnnnncatggtttagtacataaataattactgaaatagtaaaatt

SEQ ID NO: 45664 - DNA, 1705 bp, Cannabis sativa
tatatatttcacccacatatattgaaccttatttgaacccaagcaaacttaaacttcctaaacttacttatttagtatcttgtgttttcatgaaaaatatatttagtaccttatatttttaataatatttaattaatattttatatttttaaagtgtatatattttgtaccttaaaataaaatttaatcaatacaattttatcaatttaatcaaatagttctcagttttatgtaatcaaataattaaatttgaattcaaaattcataaaattttacacaatttgattgtattgataaaattttattaaaaaacattttgaattaagggtaccaaatatgtatgattttaaaatacatggtaccaaataagtattattaaaaatttaggatacccaacttgtatttagataaaacacatagtactaaatgtgtagacacctgataaaaatgtaatttatggctaagttaaatacatagtaccaaatgtgtagacaccctataaaaaaggtaatttatggctaagttagctttcgggtttggtatgatcaaccctttgtactcaaattttggaaataaaaccttccaaacttcaattaaattttagtcttcattttttcatccattttagtatgttaagtgttaaggtaaactgttagtgtgcacataaatatacatgtattaaattttcattgttcaacataatattaattatttaactattacaaaaaataattttttattcttgaaaaaacaaaaataattaataatttttagtaatatatattttagaaaataataatttttgttttcctttttctttctttctttcacattctatcatctcccccctcttcctttttcttcttctacatgagtagcaaccgaccaccaccaccagtgacagagattgggaatgaatggagcatcaacaacgaagagaccaagaatgaatggagcatcaacagtgagatcggggtcgatcctccattaacaccgacgaacaatggaagagagagaggaaaaaaacttttcattttttgtaatatttaaataattaatattaggtgtactaataaaatttgctacgtatatacttacgtacatattaccagttcacattagcacttaacaaaccaaagtgaattaaaaaaatagagaccaaaatagaattgaaatttgagggttttattcctaaaatttcaattcaagaattcatcgtacgaaatacaaaaaattagatagtttaatcgcaaattacttttaaaaaaaaaattaagatattgatgcaccatttttgagtcgaggggtgcacaaaaaattttcaattactgtttttttttttgtttagaacttgaatatgtttctgaaaatttaaaaagtgaaagtccgacgtgaaacttcttaattgggttagagttcttaaaaattaaattaagaaaataaatttgagtttttaggctaaaatcaatttgttttttttttctaaatattttttatgtttttaaatcattcaatccaaaaaaatttccaaatattgtaaaaaattcaaaattattaaatcaactgtaaccaatcatatttttaaaaataactttttacatacaaattttaaaatgttattttcaaatcattctttaatttcccatactttttttaaaaatcagaatgtcttttattattgttattattatttgtttgtgacaac

SEQ ID NO: 45665 - DNA, 840 bp, Cannabis sativa
gaaacctagtttttaggtcaggtccaatgcatgtccgatgtagggacgattgaggcccgatgtgtgtgtgttgtgatatgtgttagatgttgaagacaaaggcccattgctaggccgatgtggactagatgcccatgtgatatgggattaggcccgattaggctcgatatagggacgatggctgacccgattgttaattggattttcttttgctatttctttttatttttttatagattgcttatgggtccgttataggacaatgtggtgttcgatattatgtccgctggttattgcaaattttattttttagaatgtttgtaggtccgatagaggacaattatggggttgatagtgtggacaatggggctcggttgctatagcatttttatatttgatcatttgcatctgtccaatattggtccaatatatgtctgatattgttctgatattttactacaagatttttaacttatattttcttgtgtttttttccagaattcaagaccaccacgaccatgccttataattctagtctcagagcattacccaggttgtgtcacttggcgtggtagagttattactatccaagaattaaggcaaaatctgaggaattccatttatgggataaggtgaaggaattccctttcaaacaattcttcaagagaaaaccactaaacttttggggagcattgatccatcagttattcatgcacaagatcaaatctgagaagccagagaggtacacttttattttgcgaagaagaggtgcaaattcagtcgggtcaagtttgcgttggtgacggtgttgaacttgttacctggacctactgaacaaga

SEQ ID NO: 45666 - DNA, 2486 bp, Cannabis sativa
gagagagtctcattcgatctttgcaagagtgtggttccatctttattcttcaccccatcctcatcaatcttctcttcctcagaatttgaaaattccaccgtatcgatctccaagatcgctcccatagatctcatctttctcaccagtcttcgacgacggtcccctctatttttaaatcgctaccttcgttccattttttcgatctttgagtcttcccgccatagcaacagaattaatttgaaaaatatccaaaaccgtagcagagcactattccgtacttagtcttttttctttttgaaaattaactcccaaatgtttagaaattttatactataaaatatatatatgtctaaacaaactcaaccgggtattgatttaattaatataagatggtaacgtttttttaaaaaatattatccgtaaatgtaattaaatggttgaattcttgtagtgtcaactaagtctacacctttatcaagtagtatcctaacgagttctgtaccttgcaatgtttcaaacaacatccatgaattttgtaaagcgtaatttttgcggcagatacagattctctaagatattttctatgaatatctccataattgtagcataatgaaatccttatatttatgggatcggtcttgtacagccgagagtttctagggattcatcctttaatttcctaattatttctaattattttgagtaaaaatattcaataagtataccttataatagtggagtcattccattgtttagggattcaatttttaattttctaaagagccattaagctattaaaattattgtacacttttatcaggattgttgagaaactcactagggcaactccttgtaattttttagcaatttttcaaagtaatacaaaaaaaaaagggagtaggctattaccactatcatgggtcgaacctctctaattttttgtgttcttattgctcattattattaatttatttgtaaccaatcattcaattttatcacttgaaagactcagtgttgttagtgttaacacaaattttcgttaactaaataaaatcctatatcgtgagggatttgcacagaaaacaataacaataaaaaatagaatgaacacaaggcttttttacatggttttgcagttaaaattctgcatagcccatgagtctatcttattatatatttttcatacagttctatggctttttctctaatgaatttttcatccttttttcagtgtaccctgcccctatttatgattacataggagggcagttaattacaaatcggactaatatcttagaatattaatcctctaaaattgtgggatttaatcacgtcccaagtaaaataaatgtggttcttatttgaaaatcccatagttgtgattggtctgtttttactgggtcaacaaatacgtgtattaaatacgttgcaaaatatatcatgttgggatatctcgctgggaacatagcaacaataaccatagtagcgagctagagcttttctcatgtcttttcgaggttgataatgtaaatctcatcgcttctgcggttgaagacataacgctccatctgacaatcacattttttggtgacaagatgaacttcagcagtcaacatcatttgaatgtcagcttctatctaagagagctgactcgacggagcagtgaatctcatggaaagatgtctgaagctgattagtgaagataccgagagtatgccttaatataacgagatggatgcttcgctatctgttgtccaagttcattcaattgttatgcttagttggtataaggtacattacacgctaagtgttctaacagtcaacatgtcctatttacatctcttcatacatagcgaggttagtgtctcgttttgtatttctgatgttaaatagtttctcgtcaatgcgcgagacaatagtttgtatatccttatctcgcttaagactttacagtcaacaagttgtaaatatactctttcagctctgcatttaataagttattcccttttaatatcctttaatataattactattatatttgttgattcgtattctcccgaattgacacgtgtcctcctctgaagtgccagccgaattttgggtataacaattgccccttaaaaaattctttttaataaaaagtgctttttaaatgattacagaaggtatattttgtcataatcctttttgaaaaaatgcatgtcctttgatttttgcagttttgtggtttcaaggtgtattagcaattaatgaccatcttttcaacttctctttcaaattctaacgtaggatcaattatctctctgatctaactgagattaacttaggagtataaaatgggaaaaggaaccacctttgaattattctttctatttcagaaactctagaaattttttcaagcatctttgacaaaaaaccattcccagatttgctcgaaaccttgcatgccatttttatcattaacatttttcctataagatttgttt

SEQ ID NO: 45667 - DNA, 3632 bp, Cannabis sativa
cgagagagtgttacaacatagagttgaaagagagaactaaagttcttcaaacaatggtaatgataactgaggaagctgatgatgaacaatcccaactcaggccagtagaagaattggaagaagtgttactcgatccaaatcaccctaccaagattgtaaaaattgggaaagggtagggaaagagttaaagtagtaattaattcacttcttaatggaaaaccatgatcgatttacttggaaccatttaagcatggttgggattgacccaaatgtcattttccatcaccttaatatcgaccctcattatcctccaaaataacaaaaaagacgccttctcgattcaaaaaggcaatgagtattgaaagaagaggttgataagttataaccaatgattttgtgtaagaagaattttatccacaatgggtttcaaacctaatcctggtaccaaagccaaatggcaccttaagaacatgcagtgacttctctgactttaacaaggcgtgtccaaaagattgttttcactgccaagaatcgatcaacttgtcgatgccattgctagacatgaactcatgtcttttatggatgcatattctggatataaccagattaagatgcaagtcactaatcaagaacatacgagcttcataaaaaatttgggactctattgttataaagtcatgccatttagcataaaaaaatgtaggagccacctaccaatgccttgtgaatggaatgcttgagtaccagattggtcgtaacatggagttatatgtggaagatatgctagttaaattagttaaaatccatgatcacatggttgaccttgcaaagtgtttcttgagcctaaggaaatacaaaattaaactaaacccgaagaagtgttcgtttagggtttcttttggaaagtttcttggtttcatagtgaatgcgagaggaagtgaagctaacctaaaaaaataaaggttttgctcgatatgccttcaccaaagaaaccaaaagaggtttagtcattaatcgggaaaatggcagcactaaataggttcatcttaaaactcgcactaagtctaattcatgccttaagaaactcgcactaagtctaattcatgccttgagaaagctgagaccttaatttcaagtgcatccagtccatgtattgactaatcatccactaaggcaagtattgtaaaaacctgacgcctcaggtcgattgataaaatggtcaatagaatggagacagtttgacattacttatcacccaggagcagccatcaaagggaaatcagtgttagattttttaattgaaggaataaatacttacgaagaaatatagaaaatcccaaataaaaaaatctggaaattatttattgatggctcatcaaacgataatggctcgagggcaggcataatcctgatcttgacagaaaactttaagtttcattatgtcttaaggtttcaattcctagcttcaaacaacgaggctgaatttgaagtgcttttagtaggtttaagaatggaagaagtagtttatgctaaggcagtacattgccttagtgattcccaattgatagtgaatcatgtacttggagaatattaagaaaagggaatcagaatggccaatttggaaaaagttcaaaaaaaaaaacttggaaaaattcaattatttcaaaattgaacaaaattcaagagaaccaaattccaacgctgattcattggccaaatttgcgtcacaattcaacgacctcaacttagttctcattgaaatgttacatgaacccagtatttgcgaaatgggagaagcaggcatagaaatgattgatacaaattcaacttggatgacatcaatcatgaattatctattaaacaacaaacttctattagacaaaaatgaggcgagaaaactcatgtacaagatacccaaatacataattttcgaagaaaaactatatcgaagagggtactaaatgccattacttatgtgtgttactagcagaagctaggaatatcataaaagaaatccacgaaggctttttaggggaccacgtaggttggcagagtttttcaaagaaaataatttgtcaaggatattattggccaacaatcaataaagatgcacatgagcttgtaaagaaatgtgagaaatgccagagattctcgcacattccaaggattctgccaacatagctttgtatgatgacctcaccttacccattcaaaatttagggaatagatttaatcgagttattacccacagggtaaggaggagaaaagtatgaagttgtagcagtcaatgtcttcacaaaatggatcgaggttgggcccttagtcacgatctcctcaaaaaaagtcctagactttgttatcaaaaacataatgtactgatttggtattcccattaatatagtatctgataattggacgcaatttgatagtgacttattcattgagttctacgagaggaacacaatcattaagagtttttcatcagtcttacggcctcgagctaatggacaagtagaagtagtcaacaagacccttaaggatactataaagaagaaactcgattcactaaaatgaaggtgggtagatgagttaccacatgtactttgggctcatcaaaccattgaaaaaatagcaacgggtcatactcctttctcactaggtttttgctcaaaagtaatgcttctagttaatgttaacatctcatcacattggcgagagttttataatcaagataagaaccaagaattactcaaataatccttggaattgctagatgaaatgagagatgaattttaagtgagaaatgttgcatatcaataaaggatcacaagacacttcaataaaagagtaaggtcaaggctctttaacattggagatttggtgttaagacgagtattcgtaaatacaatagatcctacatcgagagtatttaatccaaattgggaaggtccatatatatgtaattgaagatgttatagcaccaagggtttataaattagcatggtcgaatggctccctggtaaaaaatacttggaactgcaaatatttgagaccatattattaataattggcttgtttatagttttcgattacttcaaaattatgtaaatttaagatgtatattaatggaatttcagtttctttatttgtctcaagtaatcataaaattttctttaaaattacttaggagcatataattatataataactaaacattctaataactataataatatagatgtctaaaaaaataaggcttaaaaattctgaaaaataaattttttgcaaagataaagcattcggtcaaagctggtccaaaactatagaaaatcaaaattttatatcttctttaagcaagaatgatatagcacttattgtaaaaaaaataagattaagaaaataatctcgcaaacaagccaatacagcatgaattaatagagactcacatacgtagcagatattataaacgaaactcaacaatgagttttgataaataatatataagctaaagcgcgaatagacgactaactactcgcacataattgattaaaaatatttaaaataattaaagaaatggttgtttaaaatatttaagttcactctttacttgatggattaatgagtaataaatt

SEQ ID NO: 45668 - DNA, 853 bp, Cannabis sativa
atacttgttagtaaatctaaatccaagtaaaatattcccaaccacctggcacgtagtctatatcacaggctacccaactggtgcaggccctagtagaggaggaggcaaagatgacccaacaacatttacgccagaagaggtttgcgccaccttggccatcagtcgacctgtacgctcatcagaaggccccctagtaagacctctcaacttgaaagacatatctacaaaaagaaatgtagcaaagtaagaaagcaagtcataaacattcaatgcaagataagaatgtaagagatgatgttatcaactatcaaataccatcgtcctcaaaagaggaactgtcgaaatcctctacaaaagccttgcccttccctctagatgtaggtaaggggcgagcaggtgccccaaaagtctgacctctaggccttattcagagagaagcatcaacaattggacccccactggccaagcgtcagtaaagggccctctctttcctctttagattttgtgctatgcgagacaaaggcacgtcgtcatccaagtcaggaacttgtccatctccaggacaagccccctccgcagctgggcctcccgtaactgtagaagtagaagggtataaaccatacctctggaagttcgccaaactagtcaacctgagtatgtttcttttctccaccgagagagataggatatggtttgccctatccctcattcacaatgtggggatagagcatttgaagagcatcacccactaaaactcgtagtgtccaatcctacgaatgccataagcaatgaagtacttcttggcgtaccaaccaacttttgacatggctgtgctattggtgtcacccaacca

SEQ ID NO: 45669 - DNA, 2235 bp, Cannabis sativa
tgagaagactcatgtcaaaaaaaaaatatttgagaagactataaattacttgagtaaacatgctattgcatagaatttggtaatagaaattaaattatgttagaccttaatagatagatacaattaaaataaaaaattctaacttttaatcatcgttaatttacatattaattacttgctatcttgtttgtactctttctttattgttttctaattttaattttctcataaattcgatatagccaaataaaagtaaaagcttaattttaaagtacttaactacaatcattgtgggatcgacctcactctttgagattctattacttgttaacgatacgtatacttacgtgttgaaaataccacaataaatttttggggccgctgtcagggattgttagttaatatcaataaaaattaaattttcttctaatttaatttttttttcttttcaattttagtactaagtctgtttattgcaaaatgtctcttttctcagatacaatgagtttatgctacgtcaaggagcaactgtcagattacctattgaccccgagattaaaaagacttgcagacagaaaagaaggagaaaaagattagaaagagatgtaataggggttgaacaagaaggagctatggatgacaacaccaacgtcgaaaacaatgataataatagaggtgttgtagaagaccaagctaatggtcactatcaaaatgatcgtagcctgagggactacttgttgcctaacttgacagggaccagatcctgtataaggccacctaccgttgatgctaacaattttgagatcaagtcggtcatactgtagatggtccaatccacaatccagttttgggggctgccaacagaagaccgaaacatgtatctcgctaactttaaagagctttctcagacatttaaggtgaatggagttagtgatgacgccatcagactgaggttgttcccattctcattaagggatcaagccaagagttggttggtatctttgccacccaattctatcaacactttggaggaattggcactgaaattcctttccaagtgctttcctcctactaagattgccaagctgagcagtgaaataaataacttcatccaacaagataatgaatctctttatgaaacttgggagaggttcaaggacttaatcataaagttccctaatcatggaattgaaatgtggatgcaagttcacaacttccacaatgaattagttggccttacccgaacaaccatatatgtcacagctggtggggcttttatgagaaaaactgtgaatgaggcttattaactacttgcaaagatgaccatcaacaaccaaaattggtcaacagaaaaaagccaatcgaaaaaagttgcaggtatgcatgaagttgatgccataatgaagttgacagtccaggtggaggccttaacaaagttggtgactgcttaggtaaaggaagctcaagttacttgtgagttatgtgggggacctcacacttatgacactttcccggtggatgtgaacagtttgccaatggagaaaagtcaagacattaagactaccagaacaacaactattgttacaaccaagggggtcgtcggtagaattttcaagggcaatttctaaattagtagcaataagggttttacctacagagaaatcagtctcaatagagccaacatcagaatcaacaatagcaaggctctagtggagggtctaatcttcagacagatatgctacttcaattcatgacagagattaaatcttctattaaggtcttggaaactcatatggggcagttagctactcaaaatactaacaggaatcaaggtaacttgtctagcactactaaagctaatctaaaagagaactgtaaggcaattaccttgagaagtggtaagcactatgacgggccaagccatgacaaatcagaggatgaagatcaggatcaataagaaccagcaccaacataagagaaataaaagactactgaaggtctccaacaaaaagaaacttaacctcctattagcattgatcataacataaaaattccctatcctctaaggttgcataatgaataacatgataagcagttcaacaaattccttaaagtatttaaaaagcttcatatcaacattccctttgtggaggccttggaacaaatgccaagctaggtccaattcatgaggatattctatccaagaagaggaagatggaagaatttgagatagta

SEQ ID NO: 45670 - DNA, 2258 bp, Cannabis sativa
tatatataatataatttgcttttgttataaataaatgggggttattatcggattggttattttacctataataaggatagtagtttatagctagtctttcatttaatttaatagtgcaaattaattcttaaaaactacaccataattaatatatttttttttaataattaattttgaattttttttttttttgagtaaaataatcgcttcattaaaaactatcatccaaaactaaagatgaaacaaaaacaggaagattattcaaataactacgattgcccccataatgagaagattgcgccaacatatgtaaactattattaataataaccttacaataagaaatcacacagccatatggagaaaccatgtgtttgttattcttcaaatcttcaaccacggtaagactatcaaattttagaatcatattagaccattcatgattcataatccaacttaacgcttctttaattcacagagcttcaactacatgtggttcatgaataccatcttagctaccacactttgcttctaaacccacaccattagaatcacgagccacacaaccatagccaaacttcctactctcaacaaacacagctccatcaacattaactttgattttaaaatcagtcaattttgtccaatgctcaaccgcaacctggggaaactcaaggttggtaactatgaacattatttgagcattactccactctttaaagtttagtttagctaatagaaccacatctatagtactcggcagtttttcattccacaccagctgattccgatgatgccaaatcgaccaatcaggtcatggctgccttaatagcttcacctaaactccatctacttaacccttcttcaaaccaacccgaaaacaacatagcagcagcacctactattgcaacccaagtacttctccaacagttttgagtaaagaggcatctaaccagtatgttaagaattgtttcaagtgcacctttacaaacaggacaacaaggatcaatattcacatgtctccccattaacagaaagcaagttgggagattattagatcatgctctccatagaaagtttagcacttttaggggtaatttcaagtttcacaattgcctccaaaagcctaagttatcactgccgcaccagttacctttcaacttttgaagcatattacatgttgttttgagagagaatatgacaaatctctccttataccaaaaccacgaaccttgaacattttcactaatcgaaacgtgccatatcaactccatatctcttatagtaagaacatctgcaatcacctctttgtcccaagccaaaccatcagtagtcatgagcgaacttatatgtttatcaatcaaggtaggatgattagattcaatgtagggattggccttatcaagaagccacgggtctctaagaatactaacattagttacattactgatacttctcctcactcctctcttcaccacatcttgtgcttcgatgacgctcctccaaatgtagcttggattattacccaaagttgcattaagaaaacaaccattggaaaaataccgagccttaaaaatttgaccaaccaaacttgatttgttgagcaaaatttgccaccgttgcttggccaaaagagctaagttgaaatcatgaaggtcacgaaaccccaagctaccattctctttcttccttgtcatcttctcccaactcatccaatggataccatctttattagtagtctgccaccaaaatttactagtgatacgctcaatttcatggcaagtactaattggtagtaagaacacattcatagtataagtagggagcgattgcacaacaaatttaatgagaacctctttacctacttttgaaagatcgttgttatcccaagaatgaatcctcttctgaactttgtcttttaagaagcctaaagcttcatgtttattcctcccacactaggtaaccgcaaatcctcactactttcatcaacttcaacaagccccatacgactacaaatatctctacaaatttgggccgaagtattcgtgctaaagaaaacacaagatttagagaagttcaccaaattgccagaggctttagcaaaaattttaagaagacggagaacaattgtaacctccctatcattggctttacaatacaagtagctatcatccgcaaataacatatgagaaattattggtgctgcattagcaacacgacaaccatgaatccatttcctctcttcaaatttttgactc

SEQ ID NO: 45671 - DNA, 1317 bp, Cannabis sativa
tagttatagaagctataaattttatatatatgattaacgctcacactcaattgcactatcgagtttcatatataaatttgtcatgtgtaaattttgtacactgtaacttgtcttacttggcacttaagagagtcttgtggacggaagtgtaaagagcaaaacagaatatgagtttgatagattttgttgttaagaaatcaattatatgattaagtatcacaaattgtatagttcaagtgattttaccgccaacatccctaaaaaataactagctttctaaagattaaatgtataaagcaaaataactttccctcttatcaaatagaagagtggttgtacattgataaatatattcaaaattatgaaagtcaactatatattatttttaccttcatattcattatgattctaattaatgtgttcattatgattctaattaatgtgttcaatagtacaactaactagaataataaaaattggttcctcctagtttagttgtatacaaaaatctttacaaaacttatttaatttgatgagagagtaacttttaaaataacatttgctaaatacatttaaaaaattaagcaatgcatactgataattaagtacatacatgactaatgaaatgacaattaaatgattatttagagaagtatcaagtctccaaccagctcaagagttcttgtcccaagtttcaacccatgactaggtcagtcgtctccttcgtgaacaatgttattaagtttgattctactctttgggaccttttgtcacacaagtaatcaacgactttgttataatccggtaccttgatttttttaaacaatgttgttaagttaatacaaaaataactttattaatattactcaatataaatttcaatcacacacatactattaatttatttactaaaattctataatgaaattaagatttagtagttattatgacacaacgctcaaccttggaaatggtaagatttatgttggagttgtcggtagaaatcaccttagtgaaattttcaactcctcaacttctttaagggggtgcctatctaatattttctcgaggaattatcttatatgttattttttaactttttttctaaaaaaattacaatttgagttagtttgataatttctatgtgtgttgctatgtaaattttggttgtttcgttggttgttatgtgaattttcgtaaaagtacaaaaaaaaaactactttaaaatgtaagaataaaaaaaaaacctttttttttatttctcaaactacatgtaataatattatatatgttataaatattaataattatgtggat

SEQ ID NO: 45672 - DNA, 2009 bp, Cannabis sativa
cacaattgatgagagaaggagtacatgatgtcaacttaggtgcccaacactaacgtggacccaagttgaaacctgggatgtgcacgtgacatccttagcttcatggttcaccactaggacctgttcacttaaaaaattacgaaagatggtacctaaaaatgtctttgttggatctcagtgtacctactactatggcacagacacaatttttaatgcccaagtcaactacctttagtcccgatagttggccctatagttgtttccttcttgccaagtgtcaaaagtgtcgttcatgttatcgagtcaaagggtaaacacacattatttttaagtttattcttatatttttcttaatttactaactttttttgttgagtgtattttgtgaagcttgtttactcccacgactattgtataacttattgggcaatataaataaataggtatatgtcattccttgtactagttggaaaaagtattttattcaataaaaaaatatatacttctatatacatatgaaaaagtgatattatgcctaacttaataattttacgtacacttcttccaaaaaaaaaaaaatatcacaagttcgaattcaccctctccatatataaaaaaaaaaacaaaacaaaacaaaaaagtgttatgtataattatatcacatgtcaaaaaaaattatatcaaatattataataataaatacattttcatatctccaaatttttccaaagtagtcttgccagctgtgttgattttctttctttcttttttaaatgtaatgaataatattatcaatagataacaatgatggacaatatatatctctatatgtgagatataataatataatatagcatgtttaataaaaaaaaaagtatgttctttgaagaaaacatggaaagtactacaaagtgtaagtggtgtttagtattttttaatactaaggactactgatattcaataataatactaaaaaaaataaaataataagaaaatgaatattgttattagacactagtagtaactagcactttcttgatatatcgtgttgcgattggctgctgatactttctaaaagttattatattaaattatgtgggacccgatagttagttgaaccgataacgatactgaggatgctaggcagaacccgatatttagttgaaccatattaatacatatgaggatacttaacacttttctaaaaaaatgaatgaataaaatggttacacacgttcacgaatcttcttctatttgtaattgggagagcccacatctagtagtgtagtacgttcataatcatgaccatagaatctacttattctttttcttttttaataaagtgataattaacataaatgaaatcgtatcacttttataataatcatgattaacaatatatgaacaatcacatcaattctttctctctctcccttcattttttttttctttaaaaaataaaattataaattaatcgacccaaaatctctatacttgattagtttttttttttaaaaaaaaaaaagaatatacccttttttggtttggtccattgccaatttgccatgccctttattaaccatgtaaaaaggcaaaagaaatgttaaagaagatgtattgcttttcccttttataaaagatgtatcacttttatcaatttttcttttgtcagacttacatcgatattgtttcactttttttttttttttttttgaaagaaaatctcatggagaacaaagaccaaaaccacaagactacaaagaaggcaaagagccattccaaacgaactcactatcaagtccaataccccatttagcaacattatgcgccaagacattaaaactcctactaacatggaccactttgaggtttgggcagggagataacaagttcctaatacaatttactaaatcatctatgtaaagtccttttttggcaagttaggtgacaaaataattttttcatttatggtaagattgttgggcattcatattcgaattcttacctta

SEQ ID NO: 45673 - DNA, 1942 bp, Cannabis sativa
atttggaatagaaggaataatgctttatttattgatcatcatactaataaaattgatgtggggattttgttattagcttaatgtaggattacaaggaagctcagcaattaaatgcagacccaagaacacagaaaaccaggaataggcatggatcccctcgaaacaccaccctcaccatgccctttcccctggaagttttagcttaagtgtggatgctgctttcgattatgaagcttataaaataggtcttggagcaactattaaaaactgccacaaccaagtaattgcagacttctccattccaaaactagatgcttcaacacccctctttgctgaagctcaaaccctctaggaaggcctcaactggtgtgttgtaattgatcttcaacatagtttgattatgtctaattgctctccactagtaaccaatgttagaagcaaatggaaggataactctgctctttcaatccttgtggagttgatccgtgagtccttatcctatttccctaatgcctccctgcagcatatccctagaactgataatagagaagctcaccaaaatgctagggatgcacttcagcgtgataaggacttcacttggagagtatgatttatctctatctttgtgtaactgcagcctgtgtttttcttctcttctcttgttgcagtgcattaaaaaaattattttacaagctacaacaaaacaacaacattacaaagctaatacattcaactttatagactcaatcacttttctttcactactacacaggctagttttcttacatagatcaattctatctttaacaatttgacaaatcaagttgctagaaaacttgacatatttagtctcaaagtaacaaagattcatgttataccagataaaatacaccgctactgcaatagtcaatacaatcaatttccacatgaaactagtgataggtttagaaaaccactcttcccaatttgcattgattaaaggttagtaaaactcaccaaactagttcaatcaaaacctgagagtaaacacactcaaagaaaaggtgattatgaatctcctcgttggaaacaaataggacaacaagaggaaatcaggggcgtagatttcattagctagtctctagttagaagataaacattgaaggcttgcaataaaataaaacagttctttggaaaaatttgttttctccaattagccttgtcgttgtcaatcttttcacgatgcagaagtaaattgtaaatttttttaccataaacattccactaatccaagcctcagtcaccatgcttttgtctatagtacttctcaacttagtaagctttttgacgtactaacttaagtccaccttgggagggaactcccaaaaatcattctccttgagataaatggcgttgatccacttaacccaaagattatcttgcttcaaagtgagagcccaaatatactttttcaaaagagctgtattccatttaccttccttacaaaagcctaggcgtccaaatatctgaggcaaacacacatgctcctatgaagaaagataaactttgtttcttgtttctttcacaccccacaagaagttcctgcataatttatgaatctcgacaataactttgtgttctatcatcttattctatataagatggtcctactgcctctgttgtcttaacacaaccaatgaggttaatacaacttagtgtttttcgacaaaaagtcacagtaccttgtcgtagtgggagggttttgaggaactcaccctatgatgacttggaagacacttgtgattaaaaaatccattgttagtttaaacaagtaatggatagtcaaaataaggaattaagaagcaaagccaagagaactatgataaaatccattcatatagagtaaccaaaaagttttctattacaaggacaagaaaggaaattttaaaaattaagtctattc

SEQ ID NO: 45674 - DNA, 1262 bp, Cannabis sativa
aagtcttaaaagatttttgcaaaagtaacctagtagtggaagatgtaacttgatatttgagtcttcgtgtgtcattatgcttaatgaagtaatttggtacctgcaaatttaaatttcggtcatatatgttgagccttaatagattttcggcaagaagtaacttaattgttaaatttttacttttcatttttaccaatgaagtaacttgatacatgcaattttgaatttggtcaaatatgttgagcctcttatagattagtggaaaaagtaatttaaaaagtgtttggaaagccaccctgtaattgaatttgagtgtagttcgaggttgttatttgtgtttctggatgtgtatactccaagcccaataacatgcccaaatgaaatattgggtcggactcataggcagttagtccttttagataagtagaagacttgtccaggtgagaaacctatccagcatggcatacgtctggaagatattagacaacacatccgagagaagtaaacaatgagcatctagatgtccagctcaaaagtattctcattaattatgagatcccgagatataaaaaattaactcctaacgatctcatccgaatatcatatcatcctaaatatagaaagagagtaattagtaatcaagcatttaatgtgtctttaattctccgcgaagataagacacgatttttagcaactgtcaaaatgatgtggtatccacattagcatacaccaagcgcctcatggaccaagcttcattagataagcccaagtcaatatgttacttgtaatgatcccatcagtgggaaaatattaacgaataagaaccctaaacactataaatataagaaaaatccttcatgcaaaggggttagaaacttattcctcaactgctcaagcaaagtttagagtttagacattcttataaaccgtaatgcttttctaactttagagtaataatattaactcgtggactaagactcattaacgctcaaaccacgtaaaaatccttgttgttattttttttatatatttgattaatttctttagcttttatatataatacatcgatttttgaaaatctcagtaattatgggtaattattaaatttagcgtgtttgtctgactgtgtaattacacggtaaccatgtagttggagataatatggaggtcatgagttctaatcccaataaaatcatatttactttagtatttttattttactttttgaacctctaccaataatacttatatttaatgtctta

SEQ ID NO: 45675 - DNA, 1085 bp, Cannabis sativa
aattgaagagcttgagcaattgtagtaggaatggatgacacactaaacaccttaggtttatgaatgccagctttggccctagttgtcataatgtgactattttgaactatggggacagtagtgacaccaggttgttactatggatgagtaggaggaagtggagtaggggatttggttgagttatcagtagctgaaactgatgttgcagtggtattgacagggataacatgctcaaaatcaaggggtatggtgggtatgatagatggactgtgttgatgagttggtgagttgggaacagagactggaaatgttgatggaataggagaaagggtgttatgtgaggaggcagagttggtgccattgctcaggtcatggacactagaagctggtgtaagaacagatgagatttgtgcagggatgtgccattcttggggagaaatagtttttggttcactatgggctttgctgtatgggaattgatgttcatcaaagatgacatctctagatatgtacatcctaccattagatgctagacatttgtaccccttgtggttcaaactatagcctaagaaggtgcaaggtttaaacctgaattgcatcttatgtttgttatatggtctggtgttagggaagcacttacaatcaaaggttttaaaccaagaataatcagattgtttgtgaaacagaatctcttaaggggttttgtgatttagagcaggggtaggtaatctattgtgcatgaacacaactatcataaaggcctcatcccaaaatttcagaggcatggaggattgagcaagcaaagtgagtccattctgaactatatgcctatgctttctctcagctaagccattctgttcatgagtggttggacatggatgcctatgtaataccccaagctgttgcagaaacttaggaaaggttctaaactccccaccccagtcagtttgcaccattttaatttgtgttcctagttgtaattcagcttcaactttgaacatttgaaacacctttagagttttagatttgtctttgagcatgtatatccatacaaacctagagtatacatccatgaaatgaatgta

SEQ ID NO: 45676 - DNA, 1786 bp, Cannabis sativa
aaaacccaacaccatggtctgatgtgattactaatttagatttatgagttcaggttcatgacttgcagtatagattcaaatctaaccatgtattacgtggggtatatatattagcttttttgtggaaacagattcgaaaaactttcaagggttgtgacatgattatttattgtgcatgtgctcttgatattactatccccttgaaacgatgcatgaagattaagcgtatgggggtgagttcttttaggtcaatttcaagtatgccactttttgtttcatttatggtattattggtcattctgaatggttttattcgaaactgtttgagtcatctcccgaggaagtttttaattcttatggttcatttatgccagctcaacctaaaataaagaaccacttgattagagcacgttggctaaggaatggtgcaaaagatgatgaggtgttttcttttaagcagtgacctaatcttggtaatttgtcaaaactactaataatttgcttgaggaagggtgtgaaggaggtagggcagtggtggtgagagtgggtcctcctgctattgtttcttagagagatgaggatcgaatggatgaggaatggtttgagatttcggtggttgaagattctaaattgaagcatgctaagggggtttttagcgtggactctaatatgtataagaatatggtttctagtgagactatagatgtggatatgggaggaagctgtattgattcaatggttctaaaaaaacaagttattggcggggtctataggtcagacccaccctgcatcatgactcatgagcgtccttagttggaactatcgtgggcttgacaaccggcaaaatatttaattccttaaagacgttgttcgttataagaggcctatttttatttttctttgcaaaacattatgcaagaaagataaaatggaatggattcatagacaactggagtttcaaggaatgttactggtggagctgagaggtaggagtgggagtgtagcaatattgtggcgtgagaaagatcagacgagcttaattggtttttgtcaaaaccatatttatgttatcacaaaggtcgatggtatggaggcttagaggtaaactaggctttatggtgagcacgataaagcacaatgtgggaagacttatgatattcttcggacttttgttcataattctagattgtcgtggtgtgtgattggagacttgataatatggtggatcaggtagataatcggggtggggtatcgtatcctaggtggctggtggataggtttaactaagctcttgaagatgtggggtgaccaacgacccttggtgctccatatatggtctatctttgaagatcaagtgactcatacgaacttgggtctacgtgaagagacacttttgggctaggcacgtgccatcaaagctagtccaagaatatctgcaacaactatcatttttttagatgtttattttgaaatgttattttatattttaaacttaactcaactaaagttaggaaaagaggtatgttgggttaagaaactttaaaccctacaatgtaaacttatataaaggtggtgaagtcacttgtaaagtggactccacattttgacaaactctcactctctcaaacatatgctcccatattctgaaaactcacttgaggattgaactaggggtgtacgtcggtcggtttggtcgggttatagcatatctttattaacctataaatatcgggttgcaaatatttaatcgtaacccgcccaattaaaaatttgagaaagttcaacc

SEQ ID NO: 45677 - DNA, 923 bp, Cannabis sativa
tactttttttttttttttgaaatgtttaaaattgttacttgataattcaaatatgtgacatttaaaaacaaaacaaaaaaaatgtcattttaataaattagcgtaactaaaaagaaggcataatccacgcaattgaaggcatgagattttacaccatgcaagaagagtaggtctcacgatctttattaagactttgttgaacaactgttaagatcatcttattttcaagtcattgaatctttaatataaaattaaatctcttttttaattttttgagttctttttaaggatatatatatatatattttaatatatgattatgaatttattagaaagaggggccaagttgatgttgattttaattaagttaatctctgatctcttaatacctagctagctagctaattagtacaaattattatcataatatgacttataattaactacaaagaagatagtgatgaatacttaagaagaaaacaaagcttattattattattatagataaagcaatgaatcaaaaatcaaaagaaaaatacaagtcaattcatattgctaccaaaacttaaggagaaaacaaagcttattattgtaaattaaaagaaaaaaaaaaggttaggacgtggaatagcttacctccttctaaatagtcaacctaacctaacttagtaaacaatcacaaaaatctcaaccattcattaccttacaatatgttacaacgaacttataactagtgtatttagtatgcatgtgatgacaagatttaactttaaaatcactaaaaaaaaatgaaatgggtctttatttatgtaatttgtaggggtattcatcaaaccgcacaaactgcctgtaccgtaccctactgcataaaaatactgtttaaaatcttttgtagtgtggttgcggtttgtatttttaccaaa

SEQ ID NO: 45678 - DNA, 1628 bp, Cannabis sativa
tttgctatgtgccaaatttacatacttttttgcacattattggagcacactttttgttaaatgaattatattttagcttttcaccacttatttatacttcaattggagatgttgttaccgaattgagttaacataatttttttttatattagaaaaactcatttgaaaagaaaaaatatcatacaaaaagaatagaagcctcaattctgaaaacaagagaataactatgactataactcttgataaatttaccaaaaataaagataatttatttgatattgtagataattgattgcggagtgactttttcgtttttgtatggttggtttagtatattggtcttttcttgtgtctatttctctttagtgggttggctcatatgggtacaacctctacctttgttacttcaaatgatcaaatctaatgcaactctctataaatcaaaatgacaattaacacctcaatggacgaacaaacaacaacaaaggccaattaatgttgtgaaaacagaggtatagcattaagaagagttaatcaatctcttatcaaaatgatataataattatctatatatatatatatatatataaacagaccttgtttaagtgccacatgaagatggctcctcctccaacggagccatgcctatgaatctgagaagcaaaaaggaagtgatttctcaagcagcacaagccatgaggaggagaagcacaagttggtatgtgaaggagttgttcccctgtgctcatgtccattatactcatccctgttgccgagctcttgttgctgcacactaccaaagcttcatcactattacccatacccataatttattctcttgtctcttaattttctgtaaagaaaagaatgtctttcgtttggtttttttgtagtgtggagagatatggagattattatattatactaataataaataaggaaaacatactagaaagaaacgacaacttatttaagagcgtttttgctttgcatgcaaaaacagaacacttgcaaggaatgaacgacacttggcacttggtattgtcagatgcgacaaagtttgttatggtattctggctcttttgatagtgttctccttcttctaatccaatggaaatatgccacgtcatcttatctttctagtgggtccgtaagattttctgtagtggtcggctatgattattaatgttactaaaggtagactttttatttttcttaattgtgatgtttacggtagaatttggagataagatgaataaggttcaattttaaaattaattgaggagtagtctattcatcttatatatcacattttatttgggaaatttgaatatctatgcattaattggaggataattttttccctaattgaatacatataaaaattgaaaatatgtgataattttatctaaaacccaatactattcctcccataactcaaccttatctctctctcttccccatctctctcttcgtctatctctctctcaaccgaccaaaccacaacccccaatccccctcaccaccgcccaaagcctcggctcctcactaccgcccaaaatgccggttcctcaccactgtccacaacaccgtaaacacgcaccgatggagactcaaagcaccatcca

SEQ ID NO: 45679 - DNA, 1403 bp, Cannabis sativa
caaaaagcaacataagaaacattgctaatagacatagcagtcataataatagccaaatagaatcggttcacaacatcctgaagcccctgattagaggagctaccacgaaatcccacttcctccaaagggatggagttagaaagatcaagtggattcttcctaaaagcaaacctagtaggaacacgaaaataatccttgtaacccataataggagggacaatagactcatcaaagattttaaggtatctaatgcaattgttataagtacgatccatcataccacaaaaatgacaaaagtttaagagaccctcgtacttaatttccaaccatttggtcctaaaatttttcctgaaatgcacattcatgcttctgcgaagaggcttagtgatatcaagcaggacaatgatacaaagataaggacaaaaagactcatacaaggagagagtataaatctcaatgagatcaccaatctgatcagtcacaaactgagctaactgaggggatttgtaaccaaaaagaatataatgcacttgcacctagaaagggatacacctaagttggtctaaggtaagagtatctaacccctcagattagtaaataacataaggcatcgatcaaaatagtatggttggtcctcaagaaccctacgattattctcatcacacccaaatttagccaaaaacataacataatggtactaagagaaactgataggaaaatgaaaagtccaagccttctgcatagctttctcaatacaaatcggcttaagggtcttagaagtaaggactttaacaactaaaagaaaggatcaaaggatgccttgaacctaatgaaacatgatcaaagtcatgaacgaggttttcttcatcaataagtgttaggttgtgagtgacattaagatttaggctatccattttaggtagacacaacacaatccataaaaaggagcaaagcaaacaagtgcaaaaactacaacaaatccatacccttaaatagaaaataactaagggaagatatatgggctaaattaaccatcttgggaaggaaaagataccatatctatccaaactatcaaacttccataagtgatatctccttttgctaggcttcatcatcgccaaaatacctctaaaaatggaaacaacggccaaatgaaaggatgagaaatgagaacgaagaaaattttgagggacaataaatgcaatggtatgaaataatttaaaaaataaatgcatactctaagagaaattaagatgaaattaagaaaaataatgaaagaatttgttaatcatcacaaaagatgaggtatctgaaatagtctagaaaaacggaacaaacactagaaaaaccagagcactatattgaaagctatttttttagtttgtccacttgtttctgctaat

SEQ ID NO: 45680 - DNA, 1494 bp, Cannabis sativa
aatcaaatttccctttaaaatatattttttagaaaaaaaaaaaaaaggtttaaaacgtattctaaaaacgtttggtaatgcgcacgaattttgttcgttttttttatttttaaaatatttgggccaatcctataacaactttttaattttattttaacttattttttgtcttgtacaatggggtaaattttttattttttattttaaaaaaagagctaaatatataaacaatattagtttatattttggccaaaattaacacaaattattaaatacgagatggtctagtaaaagtgctacttttatcaatacatagaaaggatcttatatagataccaaacaaaaacaaaaaattaatgaatggaagaatacatgcatgaatgatgcttctatttattttaaattattcgaataaaattaatatatttatatataatatggatatgatcacacgtgtatgaatagatatgataaattcgtaccaagaaattaaatgttgattttattaattattgtaaatattgtatatgtattatattatagttatgtgctcacgttgtatataatacaattacaatttgaatttatatatatttatatatataggtggatttgaatgaagaagaagaagaaaaggtaagtggacctgtggtactatatagtgctattaataatataattatattgatgtgttatacaataatgtgagaaataaattgtattttgacttgtcaaagcaaaaaggttatttaaaacttttggtagataaaatttttttgatttttttttaagtattgagatggttaaatttaaaaatttttatcaaattttattcaattttattgattcagtaattatttatgtactaaattttgttatctaaattttaatatctaccaaatcaaattactcgaacaatttgatatgtatcaaattatattccatgaacattcattaatattagacgtttcttattaaaattagaataaagtccttaaatctaacaatatcaataatttagagaaatttttttaaccatcttaaatattcagagaaaataatttagtatatatatatatcaaaatttaaagaataaaaatcataattaggtaacataaaaaatatggtgaaaaaagaaaccttgtgttttatttagtgccaatgatgagtgtaaagacttttatcaaagaattaattatgaacatcctcaagttcaatatatatattaagaaaatcttgcaaatttaatcagagttcaagtaaaatttctgattattgttaacatgacaactctaaattatataaatcaaataatgatagaaaaacaagatatcatattatagtattataattattttctattttgggaagtgcaataaggactaattgataatgggaaatttgaaattccatgctttaaataccttataatttttcccctaaatgtataatcattaaaattggtcatatatgaccactttaatgattttccta

SEQ ID NO: 45681 - DNA, 946 bp, Cannabis sativa
  modified_base (591)..(592): a, c, t, g, unknown or other
atttatttattttttacaacgtattctatataggtttaattgaaagagtaccttagagaatagatcttgaagggcagattctcaagttaaaataacttagcatttatgtttgacaaagaaattcccttttaaaaaaataattaaaaggaggataagtaggtagagtagaagaaaacaaaaaaaatgcagattacaaaagaaacattaaaattagtttactatcattttcttgaacttcctttgacccatgtggttgtgtacatatataaatatacgttgaattcgtccttgtgtggttacttagtcaaacgtataagtcgtatctgtacagttttattttcctttatttcaacaatattatttattaacaagtatattaatacttttaagtattcgagaactcaaatactacacatgagtatttacgaacaagttatgtgttatttaattgtgagttgctagtttgattattaaataaaaagaaaaatatattagaacgcaagaccccattacaaatatatgcacttctatgttacttcttctttcatacaatcatactgctgcatccttaaatatatatttatatatatnnatatatatatatattttttgaaagcatgttaatatattataatatatataatgccatcaaggcatattgtataaatgtataagtctttacatttaaaactgactaaactaataattaatttaaactaatattttgttaatgaaattttaacatgtgaaaaggtccatctttcggaacttgtggcgaatttgctcggtgtagacacgattgtggatagtttatgacgatatatatatttgagaaataatgctaagaggcaccataagtgctaaataccataaaagataatatattattattgtcggatgagtgctcgttagtcgtttctaggccttatgacatggctttggtaag

SEQ ID NO: 45682 - DNA, 2622 bp, Cannabis sativa
ttattacaatatgtacttaggataataaccctagctctcgatttcattaaaataattacataataaataacctccctatcgcgctatactctatgtgttgtcttacctgatttccatcgtatgagaagaaattccaattcacaggtgattctgaccaagtgccggtattcctagttataattcttgggtttcacatagtagggttaatcccaaaaacacatttcataaaaaattcacatttatgactccaactctagaccaagtaacagatctctgatgagctttctgacgatatatagagcatccaaaacagagttcagagtgaaaagtcatgcccaaaacaaaatagactaaaatgaactgtcatcgcggggtcaccgcaaccagaccatatggtcgccgccgtgagatagggaaagggcaaacccctattttgagttcaatcctcgccccgacggctaggcctgaaaacctaaaaatgtaaatttttttcataacttcgaaaacacgtaattaataaaaccttacatctaaaatcagtttggtttacaaaacccaactaaaacataccaataaggctcaaaatcatacaattcatactatgaaatccaaagaacactaaataaagcctttatgctcaaaacttaccaattcatgatattgaatttcaaatttcaaagagaactaaaagaaatctcatactcaacttttcaattgacaatattaaacaaccagaatttaacttaaatttcttttggttaacaaggttaaacatcacaaaatctttaacttagcatgtcccattcataatctcgctcatccatggattaatcactcaaaatcaagtaaaaagtattgagacatggaacacattatgtacatctgctagcactgggggcatagccaacttgtacgccactttccctatcctctctaggatttcaaatggtccaatgaacatcaggctgagttttcctctcttactgaagatttttactcctttcatgggtgaaatacggaggaataccatatctccaacctaaaagtcaacattctatcgctttgaattaacatcactcttctgtctactctaagcactgagcatccgagctctaattttatcaattgcctcgttcattttctgaacaactttgggacccaaaaactttgcctcacctaactcatcccaatgaataagtgatctacactttctgctataaagcatttcataaggagcgatcccgatagttgactggtagctattattataagaaaactcgattaacagaggtactttacccaagatccttcaagtccaatgacatgcctgaagcatgtcttctaaaatcttaattatcctttcagattgtccatttgtctgaggatggaatgttgtgctaaatttcaaatgtgtacccatgcctcgatgtagactctcttaaaataatcgatgtgaacttcagatctctgccagatactatagaatttggaccaccatgaagacgtactatttctctaacatataactcagcatactaatcaatggagaagttcgttcgaacaggcaaaaagtgagctgactttgtatacacatcgactaatacccatacaaaatcatactgccccgtattcttaggtactccaaccacgaagtttatagtaacatcttcccatttccattctagtaggctcaatggctgtaacagtcccacaggcctctggtgctctaccttcacttattgacatgtcaaacattttgaagcatattccactatatcattcttcatacccgaccaccaatacatggtcttcaggtcctggtacatcttagtcatatcggggtgaacagagtaaggggtggtatgggactcatctagaatctcctttctaatatcagcatccatatgaacacatacacgattcgtaaactataacataccactttcatccacggtaaaaccttaagccttaccaactaaaactttatcctgaatcttaatcaaatttggatctccatgctaagcttttctaatagctgcttgacttctactttgtgacacatcttagaagtggcattgagaaaccacgtctgtacataaccccgtctaggattttgagcagctttcctcctcatttttcttgcttcattcttattttttggcaagattcctatttggaggtatgctgctatgggtgtcatctaggttggactatcatccagcatgtctatttcttctgaaataatgatgctcggttcttttaagaactatatgggcactaagtttgccttgtctctcaaggtgctgctggttagacgagcgagtgcatttgtaatatcttggaaaataatatggtatttaatggaacatactttataaaataggtaatcactccggtaatgaagtaagattatgatcttacttaggttaattagtgtaaatttaataaatggttaaataaagtgtaatttattaattatagatattttattgaactatgcgggtattataaataccataatttgaataaaacactttcgggcctggtggttgtggaacttgacggggaggtcagaaatgtcacgacaataaaagataaattgaattggattttataccggac

SEQ ID NO: 45683 - DNA, 1916 bp, Cannabis sativa
  modified_base (112)..(135): a, c, t, g, unknown or other
gaagggtagaacggtaaatttgtgtctatctagtgtagatcatctatagagaatctttgacttttcagattgcaacaatggataatcataatgtatctatatcgtggtacannnnnnnnnnnnnnnnnnnnnnnnagtgtattcaattccaaatctatattggcgtaaggcgaaattaataagttgagaatttatttggtgaattctagatctacttattgaatgctcagttatataggctcatggtcctctcattacactactgcaaaaataatatttaacaacacttaataaaaaagtgttgctaaattatttgtttttgtaattagtcacaattaaatttaaagtgttgctaaagaactaatattcttaaatatctttatttttaagtaaataataatgactgaaatagcaacactttcaaaaaagtgtattcattgatgatgaaaaaaaatttaaggcaacactttctacataaatgttactacataatctagatttaaactgatatttaattagtggagtgtaacttccttctaatcattcgtagttttgtagatgagttaccaagaatgaaaaaactgtcattttctcactcaaaaccaccattaatattaagaatttttccaagaagattgtgcagtctcttaacttaatacaacatattgggtattaattaatttacaaatcttagtgttttaaatatttacattctattacaaaagctctacgtacattaattattatatttcagtgattttttttccaagcatgcttcagcatcgaatatcttacaggattatactttcagctctaatattttgtaattttttaattttcttttgtgtcatgaaactaggtacttggaattcccacgagaattttttttaatgtatttgatttgattttatttcatcaataatctgtctttctctaagtatgtgtagtatattctttatttttcaatctgtgtgtctgtattggaacacacaatcaataaaataattataataaaaatatttgtatcacgtaaatgattgcaattagctttttttttttttcttgtttttgatatgatcatttgcaatcttgtttctatactgaagcacaagctaaaattcttaaaattattagtttatcctaattttatacatacgtacacaagattaaatgattgagatgtactctgttttttttttcctcttcaaatacaaaagccataaaatttcattaatatattgggatatattaccaaatacgtacatggttattatgcatttgatagtttgttcatatacatgtgtattgtacttatattgttattctaatgattgttttttttcattttcatttggtataaattttttcttgtagtatgagattcttccccaaagacaatacgggatggagcaattaattgttgtcagaagctgatgaacaaattgcgactacgagcttttagaaagaaaataataccttagctagaaacatatattaactcttatatttagttgttacaatgttttattttttatagacaatttcttatcaaataatgtaatgaatattatggatttgaattaaataagattatattttaatttgtcttgtttttgaaattattttatttacataataatggtaatatatatattttttttctttcaaatatttttataactgtaaatatatatagcaacgtttttttgtgaaaatgttatttgtctttattaagttattatctatggtaacacttttataagtgttgcattatagttatacttattagcaatattctaggagacaacactttttaaagtgttgcctttttaatttttataagttaaaaaaaagtgttactaaatgtaatttttctagtagagctagttcaaataatactgcttgcagactcagtt

SEQ ID NO: 45684 - DNA, 2976 bp, Cannabis sativa
gagagagagagagagagagtcgttttgggttggttagttggttttggtgtgtgtgtgtgtgtgggttttgggtttgtcatcattacatataaaaaatatttttcttttctggttttcatttttgcaaagcaacgacgcacaccagattatgcatgcagtgcacacccaacatcctgtgcgcgtccaggaaaccataatctcacgcgccttctgttaagatctcccttctttttttctctttttctttaatttcatttcttcagcttttttagttatattaacttattattattatattatatgggagggactggactaattaatcctcattcactaaagtttggctctgtaatatatgttggagatagaaatagttagttagttgttttgtgaaaataaatgaattaaaatccttatgcatgcaaagcctaattctatttgattaaactcaaagctttaaattgttttcaatattgtttactttaaattatctctcatagttccatcgttaagataaaggtcacattaaaatccttgatgaattaacttgaaaatatgtgcttgtagttcttccataaattttagggcattaaaatcattttttccttttttaatttaaggttttttttttctttctttatgtgttaaaaaaatgaatcttcaagactatagatatggtgggtttaaaatttagtactgtaattgctggcataaaattaagtccaaaaacgaaaaaaaaaaaaaaaagacttaataaggttagtacattagccatacgcacaagtacatggcaactcctatattctattatcctatattttatatctttacaacactctattttattctataaaataatatatgccattatttatgtttagagaagatatatattcactaaactttcttttttccttgataggaataaactgcaacacattattttcacacttaaaaatagcacatgcaaaatgcaattaatcatattatttagtggtaataatttgtttctcatacataataattgttgttaaaaacacaaaagtttccaaatttgctgtacggaccaacaaataatgtggttttctttaccttgggattcatgtgccaactttcacataaacgtatagagctaattaaaaatattgatattgataggcttttcgaagaaaaaaaaagaagacatgatataaataatataaagttatatattaaagtttagattggaggattcacttaggaaaaaataaaattatctatgatttaaaagttgactcaactttagttttaataagcaaatgatatcttgagtttaatctcttttctgttgatgcaatagaattttgcgttgggaatagtgttttgggtgggatttttatcaatatataggtaaaaaaacacatataataagtgcatgcaaatttttttatgtaaacacaattatattcaaataagtaaagatatggaaaatatattatacatttttattatgatttatagggagttatgatcttctaaaaaagaaaaaagaaaaatatttttaactaactaactaactatatatattgactttttttaaaaaaaaataaataaatgaaaattgatccagattttctttttggtgggacgggaagggattaaacaaacaatggacacatgcgttatctataaattacttttattttctttgtacaaaaatacttttcaaaattaaaattgaagaaatgatacaaaaatacaagtacttagagttacaataaataagtaatgtttttagtccttgatgaccaaataaagggtttgccactttttctatcttcttcctacaacaaaccaagtggaaaccaaatccaattattattatttgaaatggttatagtataggatacataatgctttattgaaaaagattttatttagagtcattttttttaatggtattattatttcattttatgtctatatttaattttattttcttatttattttttttataattatttgacaaaaatacttatatccactaaaaaataatttttttttatgaatatgatctcggagaagaaatatgtacaattttttttttttttcattgttctttgactttgtcattagaaaatttccgagtcttaacttcttattttttcaaaaataaaaaatattaaatctcttagttttgattatagtttaggttcttaataagcaacttttaagaatttttagaaaaaaaaaggaggaaaagagagaagtgaatgatagttttttttttaaaaaaaaaaaaataatagtgtttctaacaaataaatatatatataaaaaaataaataagaaaataatatttaatgaacatttacaattattgtgtataattttcatttacaatgtacgtgtttctacattctaataatatattcttagctctatggtaaggtatatatatacattttctttttctgataatgcattacaaatttacaataatatatactattagatgtattatgtatatatgatgacaggccttttatttgaaggaatatttttttttttgagagaaattatttaaagtaatatatatttacatctaataattaatatatatttctaataatatatttttagctctatagtaaacatagagatatggtaatattccttcaaataataataataacaatttcaccaaattaaatatgcatctaatagtatttagttgtagttaatgctgttgttttgtttggttatgtgcacgaacgattccctataaaataaaaaatggctgattttgttgtacggacaaaaagtgattacacatttcatgaggcacaatacggtcgccgttgtccaacgcgcttgtttttttgtttttttttttttttcctttaactgcataaactttctgttaattattattatttttttctataaatttatttatttttttattttattgaatactttttttttttttttaa

SEQ ID NO: 45685 - DNA, 4269 bp, Cannabis sativa
gcggctgagatggatgtgaaataataggagtaatagtcttccgtgccagtctagtgataaaaggccatggtcctgatttcgagaaatcttgtcgatagcaatcataacttgatcttggtaaaggagaacctgccatccagggcccatattcaagtgcaggttctatgccctcatccatcttctccatataaaccttgcaattatcaaaaacatgaccaatgataccgcattcgtaacaaaaatctggcaaccgttcgtaacgatagtcaatccaaagttcatcacgcatccatgggagagaaaccatttgacctctaaaaagtggttttgatacatccaagccaacccgaatccttaaaaaaggaccccacccctcattaagagaatcgttatgaacctctagaaattctccaatgagattgccaattatttttgctagagcctcggatttactaagaaaaggcaatctatagacttgaacccaaaatggagtagtagtgtaagaagatatcgaatccgaaagaagaacactcggaggacataagattaaatgctaattatggaaatgccaaggttctttagacaatacccttctcaaatcccctgcacaaccgaaaatgaccatgtatgagtcagagtcataatctgaaatgataacatcaaaacgtcccaaccaatgtttgtgtaagaagtttttgagttggttaggattgaaaccccgtttagagtaaacacgacagagaatacgagtgtttgtaaggccaagtggtggggcagaaacattatcaattgaaaccacaaccctttccctttcagtaagagcagtagaaacatcatggaggaaagattccatagtggaaagggtgatgaaagtaatagaaaggaaggaaatgaaaacccagaaaaaagatgaacaagatcaagaatttgaaagggacaggggcgggaacagttaagttcaaaagaaagaagaataaactgacaaaatatggttaaaaagaaaaataactactaactgccacagagcactcgtaaagggcagacaatgctcaaatagatcaaaattttaatcaatttcatggttgaaatttggtgttttgccaaaaaaaaaaaattaataatattatccattcccattaaacaaaaaattatttttataaaccaaagcagttatattttattaattaatattttaaagtcttgatttttctaattattttaaacttaataaataataattattaattaatttaataaatatatatttctataaagtgagttttaaaaatatatatctttttacataaattaaattggaatataaaattttagtaattgtatgtggttaaacttatataaaaaaattgaaaaaaaaaacaacaattgataaatctataagaaactcgttaaatttaaaattgttgtcattattatatctcacttgtcactatatttaattgtcattactgtatctcacttgtaatcatcactatcttgaaaaaaaaaatataacgattgataaatttatatataaaaacataggttattattggtttcgattgtagtgggtggtgtttatagtggctatgaatagtgatggtggtgaagaagaatgaatgaatgaataaaacaaaaatatgatatgttaggaaaaaagaaatcaatttttttttattttaatttttttaaattaattatttatgtggatccttaaaattgtgccacgtgtacactatattcacgtggacaatgcgtcatggcatttaacagtcaattttggataaaaattataaattgctaacgacataatgattttgagggttttaccgctaaaatttaagttttgggggttaattgctagagacgtgaaactacttgggctatgtcgcaattaactctaacaataattaaaatgttactatagaaaacttgcaataataatgttatagtgcgaattttttgcctaaaaatacgagtacaatctcacttgacacgtggatccaattcctagcgggaaaaagatggtgtgtcaataactgctctagtagagctatcctcacatgataagaacttgtgagaaggtgtgacttaggccaagtctagtcgcacactatgatcattataataaataaaagcaggatcaagttagcacaagtcacgtgtataacgattatatgtgatgaacaagtgtctttcttgtgcccgtgtaaagattgcgcctctacgagtgattggtccaaatgactaatgacgattcgttttgaaaccgtacagttcaatattgtcagtacatgaatgttcaatatacgattggtataattacaggagttctatctcataaataactctgaggttatagtcctgagactttatatgcgagtaacatcaaaggactcgcaagtttgcatgttgctcaagaaagtgaacggtcatttgcgactcctaaagtcgcatacattcgagtattaattaagaacggttaattttttttttttctcatttattctataaacgtttttttatcttaattaaatgtaattaatgttgtaacggtcctatctgaccagttatgtagtacaaaggatcacttgctttctatataaaggaatgttccaatttgaataggatcgaatcacaaactcttgcaaaagtagactaagcatattaagctctaactaaatcactataattccctatctcttttatatttttgctatttttatttgtatactcattatttatatttgagtattcgccattctaggtggacactcacagttctacaaaatagtgttcttgtttcccttgaatactcgcactaatgtggtattgactatttttcttcgataatatttagcgcaagaatccttttcagcaatattttgtgattttgaaggaagatcacaatagctacgaaccagaataacaacaaaaacatcaacgagaccatagtttttcccaaccatggtggaactcgggtgagaaccccattattgacaccatttttgaaggaattggacggactagcaccatcccccagaatttgttcttagaattagtcagagcctcaagagacacgataactcatatggcgactaatggtcatttcccaccaataacacctactcacacttgatgagggtatggtgcaattaacaaatgcacaatgtacaactatataagaacaaatgcgagtcctgccagctgaagtcgtaggaatgccacgtacctagaacattctcccactgcgtgaacctaccaatgtacgaaatactaataatgaagtacgtaatcatgctactagacatcatggtgaatgtgtttgcaagtattatgcaagagagcaattgaatgagcataatccatacgctcccgacttgaatcagccaccttgagttcccgcatgtggaaagcgacctgttgttctcgaggaagattagtgatgagatttaagattttgttcgccacgggatatttgcagaagtagaagggaagagaggtatcgcgaagaaaaagacaatgatcgtcgaatcctaaaagttgcattgatcgaaaaacccctgaggagtatgattttgagtcattttgatcttatagtcgcactcctagtgtgcataccagatcaatatcaatttttatgcatcttgaaggcagatgccacgtccaaggaggagatctacgagaccaactaaatgaggctttccttgtgtgatcacccgaagtagaaaattgcacaaacaacatacatcgacgggagccctatgattcccaagcaaaaaatcaagtcctccctctcgcaaaacaacctgaggtaataattaataatgttgttaatgctctagtcaatctagttaccacactagtcaatacacttggtgcatcagtcaacctagttattacacctgtcaatcttgtcaatgttcctatcaacaacatgaacattcctcccgatctcgcgataccaactaatatcacatctggaggagtagattaggaaagtttcctaagagctctgaggatggtcaaataataaaggaagctcttctataaactacatgagacgttttcattcaccgttgaagtgtgataagctcaaatccctaaggatttttgcctatccgagtcgctcaaatacaaaggtttgactagtcccatcgactatttagataaatttattactatcattgttgaatcgatttttattattgttattattaaaaataaaagtaataataatacataaaagaatgagtcagaatgaatcaaaag

SEQ ID NO: 45686 - DNA, 3032 bp, Cannabis sativa
tctcttctttattctttggatttgagtcaatctctctaggttcttgatcaatgttgagctgagaagctgaggagctatctatagatgtcttggtaagtcttttaacttcctaagttagttaatctgtaatttgttgtagctcccagttggttgagattctattactggtagatccataagggattagttagttaataattgatttaagacgttgagatttggttcttacttgaaacttatgacatgttggctttcatgggaatttaatttcaacagtataattgaccattctagtttattcctttgctatctctatttagatgcaagtggcaatgtcaaggaacaagaaataacatataattattgatacaatgtaatatcagagtttgatgtatataatgtaataaaaatatgtaatattcaagtttaatattaaattatgttaattactatacaccatatataccatatcgtaatatgttggacaccataatgacttttagagcgtattttgaaaactacctagtaattgaaattggagataattacacagtttgacgtatttatttggcttaattggaggtaattgggaagtctcaaaaactctctttaattcacatacccccataagattttttttttttttttgatgaatgataaaagttcattgaacaaatctcatttttacaacctataagcaccaaacaaggccttaaaaattatctatacaactttgtatttacaattcttgaaaccattctaaatctttttgctttacttttttggtaatacaaacaaaattctattttttacaacccatgtaacttgctttaccatttaagcagcatgatggctaattgaattccaaagaaagtcatttcttgcttttcatattacataaaccattgcagcaacatctgccattttcacactcttgcgaaatctggagtctttggactttcggatacatttcagcaatccatgtaatgtgtccgattgaacctgccaatgcaaccagatcttcaacaacttcaagcaattatcaagtgtaatttcacacttgaagaataagtgttctacactttcaggaaacttgttgcaaaatagacaattgggagagtcaatgattctaaatttatgaagtctttcctgagttttcaagcgattttgcacagccaaccaaatcaagaaactgtgcttaggagaattgagcctattccagacctcattgctccaaacaactctgccaaaattcgaagcaaactagctataaccgatgctgatttgataattggtagcagtaaactggcctggttgttgcacctgcttcaccttgttctttatttccaccattttcctccagtatcaactgctggttgtgggagcggtgtactcccaccattcttgttgtttgatgtacacacaatacacccatttaacccataggttatctttcttattagccacagcccaaacatgtttaaccatggctgcaatgttccatgtagctatgttcattatgccaaggccaccctctttcttaggggtacaaatcttctcccaagaaatgctttcagcccctgtcatcatatctttcccagtccacaggaaacttttacatatgttttcaatctctttcattattttctttggaattatcatcatttgactccagtaaatatgaattgagataagaactgaattcacaagaactaatctgccagcaaaagaaaggtttcgagttccccataccttgatttgagcagccattttttgagctaggctactgcaatccgaggcattaatcttccttgcacagataagaactccaaggtatttaaaaggatcactttgtctagtgaaaccaaacatatctaatactctttggatctctctatctgtcatgcccgagcaatattacaatattgatttctccttattaacattcaagcctgaagtaagagaaaagagcataaggccttgcattaaaaaatacacactcttgaaatctcctttgcaaaataaagaaatgtcatccgcaaagttaagatgattaagtctcattttagcacatctttcatggaaagcaaatttctctttttcccccctttatacccccataagaatttagtgtaattacatgctaaaaaataattttagttatttaattaatctaataattatttaatatgatttagtattttatttttattttagtttcttatatacataattttttttatcatatgtgtataatgctattttataatattatttagcctagttttattatactttttgtaaataaataaaaaaactactatacgaatatatgatatttaatttttttattttattaacatcatttttaaagttctcttttgaattaaatatttagtagacttattcatgatttagcataaatttattttattattaatttttaatttatatagaacaaatacttaaatttctaaggctgaaataccatgcaataaatgaaataactcaagatatataaaatgcaagataattgaatagtcgataaagaaaaattattttatatttttattacaaagtttttatgaaaaaattgattttattttatgaagagaattttatttattttaaatattattaatagataaaattattttaaatatatgttacaaaataataataataataattattatattaaatattacacaatattaatgtattatgtaattaattaccaagagtcttaccaaacatacaataaaaattcacatataattaccacttgatatccaaacatattttgtattttaaaatataataattatgtaattactagcatatagtaattacactgcatagtaattacaaagtcgcctccaaacacgtttggttagaggtaataaaataaaatagaatggaaaagaaataatttccattctattccttggttgcattttaaatggctatttacaaaaatatggaaaaatgaagatatgtcttgatatatatatggcatcaaaacttaatta

SEQ ID NO: 45687 - DNA, 1885 bp, Cannabis sativa
tcaacacatgtattaaaagtatatgctgaacacaacccgtttaatagtgtcaaaaaataaaattcaaatacgacctatgtaacctatttataaatggtagaatgagatatgatgatgataataatgactttgaataatataatgataactataagtaagatacagtgatgacaacgatctttaattaatgtagtcccaattttgtataaggattcttcaattttttttaatataatatttgaagatatatttttattttctttatttattaaataagaaattgtatgatgatttttttatttatttttatatttctgaatacaaaaaaattagtaaaacagttactcatattattaaaaaaaatatatatcaaaatttaaaatttgatatatatcattaaataaaatataactacacacaaagcgcgcattatttttttattgaaacataaagatgtttcgccacaaattactttaagattccactttgatcgactaagatcaacattggtaagattcataagttatatcaaccaaaacaatcaaaataaaagaattaatacttacatgttacattaacataaagaattgatatcataataaatgaattagaacttaagtattattgtcaataaattataactgcagatatccctaaacattaaaaaagagtaaatggtattttttcttttaatttttttttgaataatagtttttcttttaataaaatatctatgttaggtgatattttagtatttccaaaaacaactacacaataaatttaagttgcaaccaatactcaatcttcttgaaatatttacaaaaatatggacggaaggagggctaagtattttaaaaagccatattattcattggtaagcataattaattggttagatagacagagatttgtgaaaactcaaactcgagagaaaaataagagaaaaaaaacttaagaatatagaaaaattaattataaataagaggaaatattataaaaaaatttaaaatcattatttttttaaaattgaaatactaaattaaagaaaaaaataatttgaaaagaaaaatatataaagaaaactgaatgcaataatcagttaagtagtgtagaaatataatatacataacataaaaaattgataaaaattacataacaaaactaatacaacaactagttaaaggaataattgtataatgaaatatgaataacattagaaaaaataataaaataaagtaattattttcttcctttaggaggcaaaggaggtctttgtctatttgctcttgatttcttcgttttttcctttctcttgtttgattctcgttcttattggcagatggtgatgatccagattcattactttcttctatattgaccatttttttaacctgttaaaatcaaacaaataacaatacggtatatatttaaaatataaaaaatagtaatccaattatccaattcattaacacagttaatcacagaatctacttgtctatggattaatatttaagatattcaagttctttcaacatgtatattccacattcactgcagtataattaatcacaaaatatacttctctatgaaagaatatttaagatattcaaactcctctaatatgatcaattttaattgtttaatacaaccttaaaatacaaagtcgagcagcaaaggaaacttagagaaagcgagcgtcaagaaataaatagttaagtaccggactatcactgtcacacataaatacataaaataaattttaaaaacgtctcataattcacatccacaaattaataatttaataataataatataacataattaacaaaacttaaataaattaataacttaataaacataatataaattaaataagttatacatt

SEQ ID NO: 45688 - DNA, 1360 bp, Cannabis sativa
  modified_base (129)..(136): a, c, t, g, unknown or other
tgatataaaaataagagatttttttaattagatagaaaaattaagcataaaaactcaaaattttctaattttactcattcatgagtaatactcattaagaatacacccttttatatatatatatatatnnnnnnnnatatatatatatataaaataataccaatcaatcaaacaaaaacataaataggtacctttcattattcaaaaaacacaaggcaaataaaaaaaaaatagaaatacaaaaaccaaacaaacaagttcggaataacaaactaagacaatataagaaacaaagcataagtatacgtagtttacgtacacttcatgcagtctagccttggtacgtaaggtaatatagtttcttatttacgtaaccataaccatgcatgcatggtatacataatatagatatatatatatattatatctatatattgtataatatttaagaagttgatgatgagaagtgatcatcatcacgatcattactagaaaaggtatcgatattatttagtatccattttcgaacacaatatccagagcccatagcgttacaattatagggatagcaacactcgttcataatgttacattgtttaccaccaggcgtacaaccataactagccacacattttcgatcttctccgaacgcagaaccctcgcaatgcaatcctccacaacaaatcttgccttgtaccacgttacagtattcgccgggccttttacaattattagcgccattagtacctccatagcacccgaccaccgctaccaccattaccatcgttattactattccattaatattaaacttcttcattatttgcttcaaaatgtatatttttataaatgttcttgatttgcttgctctatttataggagaaaaatcaaaacctagttcattagtttcttattattgttcatgcatgagtcatgactctgatgaaattagtatattattaattaatgtgaagtatatattggatttgctgcatgcaagataatattttattaatcgatttgataagataataatgtttaatatttcaaaagatatttattgcggttagctaacggataatgtaaacaaattattgtgttttctttttcctgctttttatttttcctctatccaatactaattaatatatgctgacaaatcatacattatagttaaaatgaagttattaatagtttgtattgttattcacgtttctggtttagtaacgtgcgcatgtttcagcaaaatcaatcaaagcaaagcaagctcatttttaggcccaaccaagttaacctatcaaccactacaaaaaatcttacttttggtcacaacaaaacttgtgactaaaagtgaaaaaat

SEQ ID NO: 45689 - DNA, 3305 bp, Cannabis sativa
  modified_base (3139)..(3142): a, c, t, g, unknown or other
gtattatataacacttagttattgatacatctaaaaataaagcaagctagagagttaaccattaaaattattagtttactattaatttacccaatattaatagcaaaacacaaagatcctcacaattgttttaaagcaattaattaaactttcataaaataagagacataaagctcatactaaaattattacaatttttgtttgagaactttaaattatcattttatagatgccatattattacatatatatatatatatatattttttaagtctccacaaattaaattgaatgctttgttttattttgtttttagtgtataactttatgttaattcaattaaacatcaaatctatatactaaaaacataattattaataaaactaattaggattggtaattaattaaagatacttacctgcatactagaggcaaatcttgaggatttggaggatgaggagccataaaacaagcaaatgtatccctccaattcacacaaggagtaatatacaaatcaaagttgctattataaacaaatggttccgaaacatctcttgtataatactccttcttaatcccatcctcttgctcgtaaaaacaacgaacatcgtctttcattttctccaaaaccctaattgggattccatggttgatgatttgaaagaagccccataattccgaagcttctctaattttcttaatgacatcttttcttgttcgctcgccattaataatccctttaagatctataactggaatactgacttgggtgtcttcagaaactgatgatgattgatcaggtggatgatagaaaaaagttggaattttagcgattccagaatcaacaaggcctttaacaccggcttttgtgtcgtcaaaagctttgagctcgctttgtctgtcgtttttcgcctttggtgttgtttgagtagcgaattcatcacaattggtacttgttgttgttaccattttgaaaactatataggagaaagctaaaaactagaagtggttgatcaatgttgtcttgtactatatatttatatatagatatgcttgacgtttaaatgtgtcatattacatcactatattttaaagagtcccatatacaccaaataagaaaaaacaaaataacattaaatatttattagaaacatggttccttaatttcatcaatttttttatagatatttaattaattaacaaacattttaattttattccattaattatcttctaccttaatttataataaataaattaaattaaaaattgtatattttcttatactatacacacacaaaacttgtaattaactaaaaaatagtaatattatttaattataattttttaaaaaattatccctaatatacatgtataatgtagatatgatattatcatgattgatgaataaagtcaatacgtggaaaaaaaaaaaactagccttttagctaattgtggttcctatatttatagttgtttaattagaaaagttttaattaggtttggaccatggtgagtggtatatataagtcccccactaaaattaaataccaataaaatatttatgagtattattattaagtatcagtgacgtgtgacttttttaaaaatggcatcttaagatcaattataatgaacaaaatatgaacaaaatttgttagaagttattatattaaattatatgggactcgacttaattgcacaaataacaatataatacctataagagggtgctaaacatcagcgagcaatgccttttaaaaagtttttgttaaagggtgagaagttaaaaaacctaatgcaaataaaagcatatttagggaaaatttatactaaccttagatcaaaatcagccaaaatctaatattaatgaaaaatttatttggaaaagagtaaataatgaaagttttggtaacttgtaagttatattttttttatgccacacaaaaattaaataaataaataaacaaaaaaatgggaactatccctattacatgtttatctagatatggcattgacatgcatatagccaagacaataattgtggtttctagttgttttaataattagggtttgacttgttcaaactaaaaaaaaataaactaacaaaaatggatcaataattaaagagaaatgttaaaaggtacttatggtacttagcaggtataatatttgttattagtacaatttaatatcgagttttacttattttattttaataaaaattataaaaaaactctaactatttatagaatactaactcatagtggtgtggtcaaagctagggtcccttgttgtagataaggtaaagaacatctctaatggtgacacgctatgcaaaaatgctacttttagttacattttagtcacaacaaaaaaaattgtgactgataaatataactttttgaattagtctcaaaaataatcttggctaatcatgacatggttaacattaagtactcattccccttccaatattgctaatggaggcttaattcataacacaaaatcacaatattttcattatttgtttaagaaagaaaagtattgattgaaattttcttgaaatgattttttttatggaatagaaaaatgtgatggaattttatttaaagtcagtcaactcaaaattaagctatcaattattaattaatggacatgaattggattaagtgagacaaacaagttgtagtgtaagaatcaactcaagctgatctttaaactattttgaaaagtagtgttgcttgaacgtttcaaacacgttggagagccattgaagagtctatcattcattaatcgacaaggtagaacagataaatgctaaaaggcaactactggtgtcatatctctattttttatttttgaataaaatcggtatcttcattaactaattaaatcgttaagaacaatagaacgtgtttcagaggaacaatactccaactgaagcacacgacctggaaagaaacaagagtctctggctaaacaatgtgccagcttgtttgtcaatcgtttgacaaaacacaaatcaacattttctaaagataaaagcaacgcacgaacatcgtgtaccaaaagaccaaaagaagatgacatagagattttactttgaataacttgtatgcataccaagttgtctgannnnaaaatcacttgtccccaattgtgccgatcaatccaacttaaagcttctttgatgccaatcatctctacaacttcaggttgaatactccccgaatgaccccgattgaaagcctccacgacattgccatggcagtcgcgagccacacaaccccacccaaacctgc

SEQ ID NO: 45690 - DNA, 1200 bp, Cannabis sativa
  modified_base (160)..(163): a, c, t, g, unknown or other
atcgctagccaatcgcaacgcgacatatcgagaaggtgctaggcaccactggtgcctaataacaatgctcttaaaaataagagaaataaagggcacaattggtgcctagcaccctcctacgtgtcaatattattagtgcaattaagtatcgggtcccatnnnntttaatataataatttttatgaagtatcgctaaccaattacaaggcgacacatctaaataggtgctagacacccaatagcaacgctctaaaaataatatgtaacaaaattaagttgctgaaacggcaatctcttattggttataggtggaaaaagtcaacagtcaaacctcttagaaataaatatcattattaacagttggattgaaattgagagaatcagatttcatttcagatcaaccattttctctcactcttttgttttctctctcattaaggaaaagagccttaaatcaaaattcgaaaagcttaaacccttcttgtacggacgatctccattgaagaagataagattaagctatgccgagcaagtgcgaaatctgctgcgaattgctaatcgctatcttgcttcctccacttggggtttgtttcagacatggttgttgcagtgtaagtctttctttttcttttcttttccattgtttggttaccgagaaaattaatttgataattgatctaggtttcttcttttggggattatgtaggttgagttttgtatatgcttgctgttgaccattctcggttatgttcctggaattatctacgctctttatgcaattgtgttcatcgatcgcgatcagtactttgacgatgaccgccgtcctctttacgtggcttgatctgtattgtgatttctaaattacgtttattgaatctgttttttaatttgtgatgtagtaatttatggtgtttgttcatcgattctgtttatatacattaaacttggatctccttatctcatgtgatattatgcacgagttctgttttgaaataatgcccttttgcttgtaatgtagtttttcgagttgacttttcctattttctttttctaatggaaattgacatttttcttttcttagcttatggttttcataatctggatccttataagtaccattgaatacttgcttttcttttgatttgtgtatttaggtatatgattttgaagagggttagctttgttttttaaataatttat

SEQ ID NO: 45691 - DNA, 2386 bp, Cannabis sativa
ggattggatttgagctattgtgcaaattagattggatccaaaaaataaaatccgcacttagtgcaaattggatgcactataagtaaaatagtgtggattggattgaataaacaccccctaattgaaatcagtaatgatataataaaaagtttccattattgctaaacttatgttggtcatcaaaccagagcaaccactccaattaagttgtaatttcaaaaaattctttgaaaaagaataaagcaaaagagcatgagctattgaagaactaacaaactctgtttccagtatcacaactgaaatttgtataaattaagcttagcaataagtatctaaccttaacaaacattttctcaaacacttggtaggtgacaataatattaagtaagaaaaaacaaactaagatacataccaacaatgaagcatcatcctcttggaaaattagaagtgatgaaatcagattaatctcaaccaccaatcgatgcctgagccaccacggccatcgtcactctcagtctttctccgacagtttttcactctggaatttgtgaaatgaacagtggtccttaacatcttggaacaaaaaaaaaaactaatcttaacatcttggaacaaccttctcccatggccatgcaacaaaaaaagtcaacacagagtttacaacaattccatgttcaatataagaaactcttgtcaattggttagaaatagatgaaaggaaagaaacgaccaagcaattatttgatttaaagtttttggtccaattctgtttaattttattgatgggtgcttaaagtaaacgtaaatttgggatacaatttgataaatattaaatttttagggcaccaatatttaaagacatgtcaaaattgtaaacattggtaaaattaaaccgaatcgaaagaacctgaaaaagttttaaatgtcaaatttagaagaaaaaaaatcgtaattaaccaaaaattaattatgaattattaaggtatcaaaacaaacaaacccaataaaatgaattcaaaagcagtacaattctaactctcgtaagtactaaatacaaacaaaaattaagcacacatatatataaaacacgtacctagctaataataatatacaagtacaacacctcatacaatatcatccaaataacccagtccatcgatcatcatcaaactctggcacacaccaagattatatatattatattgataagctatgaacatgcatatctgttcaaactcatcatcatcaactatataaatataacaaaaacctaaaaaagaaaaaagagaaagtagtaccacataaaccacagcaattccaaagcacaaaatcccatttccactcagacaaagggcaccacttacagcagaagcatctttaagcaaagcagacaaagggcaattgaatttttcaaaagacaaatatcaaatactcattaatagaataatgaggacagatactatctacaagagacgacaagagttattgcaatataactcaatattgaatttggttgccatgacagagtttagagaggattagaggtataccattagtaaactaaggcagaaaaactccaaaaatacactaatgttgacacaaaatttcatatgttatgataattgtatctatacttttcataattaacccggtcaaaccagaaactacgtatttatgctcgggaatttcaaacccaaagtttcctgcgaataatggtatccattcaaaacacgaaaatcatcaaagaatgatcaaaagcttcaattcctaactaaaattcacagaaagtagctttaaacttgtaaaagagaacaaaagacattcaaatcaatcatcaatccaaaaatctgaaagtaaagttaaaaaaaagcctcctaaatctaattaggtgaatcttctctaattcaaaggctataaaataaattctttttataatagttaaaaaactcaaaaggaaagagctaagaaacataacccattgcagacagtcatctaatcttccaaattactataaagaatcctgaaagacatctagaattatggacccttctttcaaaaacaccagacctcaattctagctctaaactacctaatcttcctaaacaagaattgaaagaaagaatcacagcccgcgaggagtgtcaaaacagaaacaaccaggagcttggtcttcaggtatcatgccaccacctttgcttgtatcaattgcttctagcagcttaactacatcagccatgtcaggacgtttctctggatttgcctcccaacattttttcatgatcgcataagatttcggacagcatcctgggatttcaggtcgctgattctgccattttgcaataaatgtttttgagtcattagcacataaaaagataaaaaaaaaaaa

SEQ ID NO: 45692 - DNA, 1757 bp, Cannabis sativa
  modified_base (1722)..(1730): a, c, t, g, unknown or other
aattttataacccgatctttatgtcgggttggaaaatatatagtataaaccgactaaaccgaccgatgtacagccctactctccactacaacaattcaccgccctttcttgctcaatctctcttttatttttatttttattttgtgtttatttattttgtagatgggatgggaatgtgtgctaataacttgtttatttattccattttcaaaaaaaaaaaaaaaaattgtttatttattttggagatcgaaatgtcactttcctaataaagcataataaacaaaaaaaaaaaaaaaaaagaaaaacaatttgtccaagtactcaatcacaaaaattaaaagggacccactggccgtgacaaatcgctaccaccaaccaacaaaattatttggctatattttggttatggttatggtgattctaccgtgtattttttttttttaaattgatatattgatataccctttatttattttggcatttgtaagagatattttataaaattttgaaaaatttaaaataatttatcatacaaaaaataatatttaaatagtctattttactataaaataaaataatcacacgtgcaacacactgttttcgacgttttttgaattttaaaatttttacaagatgtattaaataattataatttatatgacgatgaaaaaaaattatttcgaatattaaaacagatagaaatgtattggtacattttttttttaagggggtgcattataaaattttttaatattatatattgtgttagaaaaaataaaataaaacatgtatttgccttacagtgttgatgtgggagtaatttatgatatttatacttagtagttattaaattttaactcatatagagttttggtaattaaaaatattatatttgatatgattttattaaaatatatatatttggttaattatgatttctgtcaacccgaattttgatatattttttaaatttttcagcccgttaaaaatttatgtggaactattattattaaattcaataatttttgtttaattttactaatgcgaataaaagtctaaaagtacaatttggtacattttaaaatttaaagtaaaatttattagtagatatcaaaaaacaatttagtatatagacaattgtcaagttagtaaaaacaaacagaattctacaaaaattttaaatccaacaatcttaataatttaaaaagaattttttaactaatttatttatgattgaatcaattcctcaaactaaaatgataaattctatttaatgaaagaaaataatttttttcatataattcttctaaataaaaaaattattgacaaaaaaaattgtcaattcactatggaaagtccttacaaaaagaaaagaagaaaaaaagtcattattgaaattactctcccatttaatgtgatgaaaagttacataaaatcatcaaatgtgaaaggtaagatagacataaatttccatgataaactacaatagaaattacaaaatgaaggtaacatatattattataattattctagtagcatatcatatatcatatctattatggtaagtaagatgagaagacatgttcatgatctgtctaaatagacaggatttcataccatgtgatcactattgacatgctttagagagacgtatacatgtgtttatatataaaaaaaattagatatacttgttaatgatgtctgttaattccatttttggcnnnnnnnnntgacaaaaatattttattatttaatgt

SEQ ID NO: 45693 - DNA, 2150 bp, Cannabis sativa
ttattagacccaaagatcacaaagtttcctttatcctccataatcgcgtgagaagcgtctccccttactatctccgaactccaaatctcttttccttgaggatcaaccaatacaagtccccgatcagctgtcaggctgacttgggaccccctcggcactatagccgaggagtttattgtagtagcataccagacaactgttttgtctggtatgtttgcataccatatagagagtaagaagaggttgttttggttttcgagttttcgaaaaccgaaagcaaattcggttgagggtgagagccatggtgatgagttgtctgttgctgtgagtgttgtgccaactgttatgttgttggttatttgagataaggctgtgtttggcagaaaaacaataataaaaagaagaaaacagagctcataaaacagagccatgtgtgctataataaatattttcttagactttttggttactgggattacaagaataccataaatattatgagagtttttctttagtaatatcttggaaagactctgggatcaacgaaatttgtcttatgttatcggaatagtcacatgatattattcaaatttcagaggcttaactttgatttgaaaataatgatcatttttttttacggcgccacacaattagttagcaatatttttttaaaaattatatgaaaccgatacttaaacctaaaataataataataaaattatatctatacatataagtgataagtgtggtcttatatatattaacataataaataaaaatatctcatattttcaactaattgattcatatatatatgttttgatttataacatttatattttttgaattaaatttaggggaagaataatagatcacccataaatatagtcaatactatctagaaataaaaatatgggtcaccaaaatttataaacatgaagttttatttttgtttcaattggtcgttattggcttccctaacatttaattctggttccgctcttaccgataccaattacatcaataataacaatatgatactaaaaaaaatactagacattaataatatcttttaataattatcttttcataatattaatgagtgttttcatattgtagatgataagaaaaaatgggtgatgaaaagaaggccaagtcatgtaatgaggttcacttacaaatcaagaacgttgtttaattgaatagtcaaattacaacacctttttgttaaaagaaggccatgtcatgataggaaacaaacaccttttggttctgattgggtgattcggaaaaagttatcaatgttctcggaaaaagtatttcttttggaatattgacagttacatatttgtttgtaatcaactttctaatcggttattaaactgtaattttttatttatttttaaatattgtaattttgcgttccataatgtggttaggtgaatttttgttcaaaacttttcagatatggtaacgctctgctgcatccctgactatctcttttataattactgggaagtctaaccttttgtttatatatatatgttgtggtttttctaaaaaaaaaagaatagtcaaattgaattatttatttaatcaaagtcagaattcttacactatacattttgtggactggacggtagtgtttgattattgtataaatattttaattttttaacatgtttttttttttaattaaattaaaattttaggataatagaacttaaaacaaaattaaagtttgagatccctatataaataatttatttagtggtagtaaaactttttaaaactcattccaagatttaatcctctataactacaaattaaatattttttaaaaaatagaataataggaattgagaattaatctctagatctcttaacttaagataaaactttttaccactacactagacactattttctcatttacaataattttaatcatattaggattttttttttcagcactaatcatattacaattagattaagtaatctctataaatagtcttgtctattgacatgtgttaggtttttcctaatgtgttcgtgtgattcaagtgtgttgcgtgtgttccaatgttaggatttttgtgttaagatctttcgtgggagtcaatgctagggtttctgtggaggttcag

SEQ ID NO: 45694 - DNA, 3829 bp, Cannabis sativa
  modified_base (50)..(55): a, c, t, g, unknown or other
gagacatattatttcgctgcacccaatgtaaggttttctaaaactttatnnnnnnttaatttcattgttttagaaattcatattaggatattgctatttcctgtaaggtgcagccctccaaaataatcaaaatatcctcgccctttattgagggaggttgtatccttggattattcaggttattgggttgattatgttcgtttccttgtgtcgtcacatactgccttgaataccgccgcgagattaggttctcgattttgtctttcaattgaaagcagtctttagttgtatgcccaatgtctctatagaaacgacaatacttatttggatcttacttattcattgcatgtctcattgggtctggtctgcaaaatgcgacccgatttttaattggccgaggtagaatattttttgcgagtctcatttaattcagtatacactgaatgaataggaacacacttttcatgtttcttttgctttttcttattcttggatgagtctcttgattcatcattcctcttggtattcaaaccatttgtatttctactttagtagtcaaagtgcttgttcttgttgtactagggctgggtttatctcccaagtcagactttaacaacttgatttcattctatgcctctttttttgcacaaaaatctatgctcttttgttgaactcataaatatttgtaacaggatgttcttgtaaatcatcccataattctacccctgcagttgacaagtcagttgtaattccagcctgaagggctattaattgaatgttgtcattcaaatttctgactttgactgtagccgtactaaaacgacttaagtacgccttaagagattctcctggtttctgctttaaattagtcaataaagatgcttttggtccccaatctctcgtagcttgaaactactttttgaaatcttttgacaattgctcccaagaagttatgaaatggttggtgaacttgttgaactaactacttgctgctcctattaatgaagttagaaataatatgcatcgtaagttgtttgaaacgttgcttactcgcattattgtattgaaattgctctggtgggcgacaagatcagtggtaccatcatactgtgcgacatgtggatttttaaatccttgaggaaattgtgagtttagaatatcagggtggaatggttttatctcttcatctgaattataccctagtagttttccatactctccattcgggtattgtctaaacttgtcttctaattgtactcgcaactatattggatccacaggccggtgatctatgttttgattgagttggttacgcaaatctggtgcattacggtttaaatgctcacgtaggtctgacaaccttcgatttaattgttcacggaggttaggttcacaacgtctctggtcgtaattactcacggatctagtccttgagtaactttcagattgataactattcaagttactcatactttcttgattggtaaaataatatcgtgacctatccccatctcgcttttgtctagagtcctagttgacctactgtgcctgtgcaattttgactcccctgtacttgaaccggtttcacgtgactcatcttgcatcagcttcttctctaaaagagatttgacacacgacctctactcaggtatgtgtatatgttttctctatcattgcgagaaggcctttgtggatgcctcgggggtcgacctgaaccaagttgatttctaacatttctcccatcatgatgagggatttcttggtttcttggtcgtgactgccttgcattttcattcatgcgagatgattatggtatatcaggttgttcattctcctggtttacaaatccatgggaagttcctagaacattgtgtcgatgctcctgatttcttacattgccagtattgggtggattttctccatccaatgggatataccttgtattcccaagttgttcttcctaagtatttgtgggattctcttgattattttcttgcctcctggtcatggaacctcagggccttccctatggtcgccttacagatggatcaagttgagtttgaagagtggttccttgtgtagccctagctcccgcagcctttcgttccaactcaacatttcttcagtttgactcaaccaggcattgtcgaagttgcaagttttctaattccaccagtgggacatatctggtgggatcataggcatcttcactttgcctctctgggatttgttcaccagtaaggttgaaatttccatcgtttcttccaaaacagggggttttagtcgtgttggttttttgtgatccctgaggttcctctctagggcgatgggtggtctcctctggatggatttctttattacgagaagtattatccgccatagatatagatttgtagttgtatctataaggagggtatcttctgagtttttattacaaaggttcttaatgaaagcatcaaactattaatgcaaatttttgttaaccaaacatataaaactttttcgtaatacatctaccacaaaattaattatagtaataaatgaacaccaaatatttttacgtgattttgtagttaaaatctacatgttctacgagtccattttactaggatattgtaataccttaagattaagaaaatagattagcaaatcctaactagttaaatgtgtattattatgaaattatattattatataatctattatatgtgaattgatttgatatatgacatgttaagaccctgttggtgagccatgggcatttccgtaattttgacccaagaagggtaaaattgtgaatttaatttaattatgtgcttatgggctatattattatatagtatacctgctttgtcctttttcatatgcgttctgaaaagtcagtgcggtatagtcataactgggtattttgggccgaaccaggttcggggttgaaatacaattttgggattctatattggcatttttattgatgtatgagtaatctaaaattatttatttatacatgatatgtgatggaaatgacttaaatacccttgaatgcttatgtgagtgttatatggccctaggggtaaattggtcattttgaccacttaatttactttataacaaaatgaatgcttttgttcaagcccttgaatgcttgaatgcttttgttcaagccctagccgaaccccctttaccctcttcctttctcaattttcttcattttgctattgagtttgtggttttggagcttgggagttagagctttgagtttgagaaggttttgaggtagattttcaccctttgattttgaatattattgctgaagtttgaagttgatttaagtttgaaattgttggttttgctcttgattgtatgtatgaaaatagattgaattatgatgcttttgctatgtctttgagctagtggggattcaagttaatgttttgattattaaagggacatggactgagttttgttgtgtaaattatgagtttgaatctaatttattgtaagctgaatatatgctttgacgttcaagtttaaaggtgtgtatttgagatgaactttgctcaagtgttgagcttgtatttcatggtaatttaaatctgagatatgaagcttgtatactgtgattttgagccataattttgtatttcaactctatgtatgaatattgatgattttaatttatggtttgagagtttgattaagtttttggcatgaattggtgtgttttggcatgaatttttgagcaggaaaatgcgaattatttgggtttggaacttaggggtcgcgaccctgcttttgggcactgcgacccgcctctattttgtggcctggg

SEQ ID NO: 45695 - DNA, 1482 bp, Cannabis sativa
gaccttccccaggcgatgtgggattgcacatcttacctagtgtttctccttacggatcacgggactactgactgtcacatgttgactttgaaaaaggccaccaaaggaagtgcccaacgtgacacaataggaggagacgaattagccacgacttgcccagaagatctctaacaactaatctctttagtctccaaaagaggcttttggtaatcactcaaaaaaatcatgagcccaactgaccaccaacttaagggacattaaagtattattatgtaccattttatttctcctataccaaactctccacatgataacaagggctaacttcacttgagaaaatgacaaaggatccaaaaaatagtagataaaactaataaaataagtacaagtaaccaaagggtctccgaggttaaactcacaaattttttagaactgagaaagagaagaatgtccccacaaagcataatgagaagtctcttcctgggcgtcgcataaaggacaaagaccatcagtaagcatatacaatgtatattcaaattaaacttgtatggaatctaattatttgatatctgcctagtaaacatttcaattttgggaggtatatgaagactctaaagtttcttccactatctcgaaaacccctgagaagtagaaggtttgtcacgctccaaaaatttagtagcaaaccagtaactactcttgacagaatagaagtcagtagaatcatgaccccaaatcaatttatcacaaaaagaatttgctggctaaggaatcgaaagaatgcctaaagcttcattacgaaaaaaagaccatgaatcacatccacatcccaaccacccaaatcataccccaaacaatccaccgtgctaccaactctgagcaaattcgaagctaaacagagaagccaacagccaaaggaatccaactgtatgtcttcataaatagaaatatttctatcatccccaactctccaaattgccctgcattatatatttcatttttccataaaatattcttccaaacagaatagcctcttttgaaagacttaattgtcaagatctatttctatgatacaaacttttcaaaacccaagccgccaaggaagaaggatcttgataaagcctcaaaacttgtttagtcaataaggcttgatggaaaagttgtgaatctcaaaactccattccactattatctttgtggtgatataatttctctcatttgcaccagtgtatttttatcttcacatcatcatccaccaaaattttgtacacactaatattttttacaaaatttttgggaagcttgaagaagaacatagtataaatcaaaatagattgaatgacaactttaataagaatctctctacccacgtaaaagatttagcctttcaatcattcagctttaaattaaaattaagtcatattcattcaagaaaaaattaagtcatatattttgggttttgaatttaaggaataaataatt

SEQ ID NO: 45696 - DNA, 885 bp, Cannabis sativa
tctgggccaaacagttggggatgtcaaaataattcatttagttagagcaggtaggagcttcgatctgacaaatcacttctaattcataacatttgaatacttattggatctcggatcatttctggacctgaacctggaccggcagacccgaacccagacccagaccgccagacacggacccaatactcaaacccaaacccaaactcggaccagagcgtggacccaaatttgaacttggacccggaccagacccaaacttggacccagacccagattcggacctgaacccaaactcgagatcccgacctgaacccgtgacccgactcgaacccgaaaccaggatccggacaggacttgaacctgaacccgaacccagatccgaactcgaacccaaactcggactcgagaccggttgcatttacactcctatacaaacaatattatttcccggactgaagtgatccacccttgttgagtttgtaagctacacttacatctagatctagtgtcgtagtttgactccgtgtgggttgatctattaactggactgggcccaagaatgggcccgcttttgactaatattgagctttagcagtgtatacgtcactaatatggaaacacgaaccaatagcactgctttataatactatagtagaacactacaagaacacgaacacggactatatatatacatatactcatgtcttactagttaatttactacaagacaaaaaccaatacacatgatcacatcaaataatagtctccaaactccaatcttcaattcattaatcaataaattataatatatcattattacatttaattaatcactaattatcttcgttaatttacacagaaagagagtgatccttcgtggaaagt

SEQ ID NO: 45697 - DNA, 2066 bp, Cannabis sativa
aatttaggacaaagaaagcttttgttgaagtactagggttttctttattggaatgcaaagttcaaaaatttgaatagtgttgtgtgtaataatgattaaaataccgtacgaggccaagccattccaaaattctgatatgctgagccaagcccactaaacaatggacccccctaaaaattggaccatggctaagttggtggagctcactgaaatagggcaacaacatactcattcaaactccttgcttttaaccaatattattttactaaaacctcattagaaagattgttattgctaatgcttagtgataatattattaaattaaaatgtacacaacctaatgtttaattacatttataattgtataacatctcatgatattattgggtaccacgagtattatctattaggttaatttagatttttgtttcctgaatttagacgtgtatcaaattataccctctgaacttttttgatcgttaaaaatttctctcgaactattgggattgttggatttaagaatatttgtctaattttacttaaaaaatctaacgagaatgaaaatttaaaaggacaattcggtacatattaaagttcaggggatataattttataaatatcaaagttcgggaacacgatttagtatataaaaaatcgctatattagcaaaattgaatgaaattagataaaaatctttaaacccaacaagattttttaacgatctaaaaagttgaaagagcataatttaatacataataaaactcgagaaaaaaatcttaattagccaatttattaaattcactgttttctttttgtgtggtccattgggatttaatttaagctgctttggcgctaaagtattattcaattagttatatcattaagcaattcacttcattaatttctatttgtttgccaacaaacacattatctattaaattcacttttccttttttgtgtggtccataaataaattgtcatgtaattttgtataactttgttgattcatgtgggcacgacccatttgaaaatactgtccaaatggcactcaatgattggatcaattcaaaagacataagtatatttgtccctaaaatccaaaataaaaaccatacttgcttgtgtcttagtgttcccaaactcaagcgaatattactttgtttaaaattatgatgaattcaaaaaaattggaatcaaatttcccatttttgaagattgtatccctccttttttcatgcccattactttccctttagatgaaaggttaagcctatactaatcattagttttaaacatgtttgtagaattgtcccacaacatgagccattaatcttaatcttcaaaactcatcatgatttcataataaacaaaaatttgatttgaaaaccttatcttagataaagttttgctcggtttcgaattgatttttcaaattgatgcaagctaaagcaagcatctccttttaaaaaaacaatgattcatttgtgtaataagttaatagcatatattcgttaacttagaggaaatagttcatcatttttagtgtactttttttttggggtttgaaaaatagtgtaccctttcttttgatagacaatatcatgaggattagtttgatgatatttttgtttaaatgtgttgttactaaacttttggttttaaactttatttatatttattatctatgttatattaattgtaagtatataatagaaaatgttattttttttaaatattacaatttaaatttaatacatatcacacatatttcgtttatcttttatcttatattgtggttatattatacaaagtaattttattttaatatttcaatttaaatttaaactcattgcacatatataaaaaaaatatttttctattattacttttgaaaaaaattataagtatatgatatttctaaaaatgttaaaagtattatgattaaattaaaaaaataattaacaaattttgttaatattattatattttcttttttataaataatacttaaattaaatatacttttttagtagaatataatgttgtttattgaataatattaaaaa

SEQ ID NO: 45698 - DNA, 2648 bp, Cannabis sativa
  modified_base (2275)..(2275): a, c, t, g, unknown or other
gcatcctaatatgtgaatcttagcgtattgtcctcactcgtacgcttttcgagatgactcccccaaagatttcccatcttgagattaccccaagttaagtatgctcaactcttaggtaagctcattgtgggttatgaaaaagtagatgcttctttgtcgttcctacttgtatttcttatttttttacttccgttatttaaatccaatttccgtcatttccttcattatcctcttacaattcctcatcgattttgttcacttatacttgaggaattttcatcttattatcaagttgaatcttatccatctacactcattttaatttgcatccatttcctaacttcttagctaataaaaattgatcaaaaaccattccttgatctcaaagttccgtatctgtgttaggtagaaatcctaaaatttcctttttaacacatccagaaatatacatgtatattctttattttattgacaatcccttggtgtgaactaccactacaacttgtagtgagtccctcgttgatggtattgagtcatcaacatctaagactctgatattcttttcctgtttttaccactaaggttttactccatgattcgtatgctactattgcttggttgcaatcatcactattttcatacttcgttaatcactctaaactcattctaccctcagttatgtagtccattgtttaataaacaacctacttagtgatcaaacattcaccaatcagtcaaataaatgtcctttaaattgcatctcaatttataagcctttcccccaatatggatgagtatgcctttccatcattgcttaataagataatccttttccaaaatttcaatagtctccttatatactagattgaccatccggtccaatatagaagtatttttcatcatcaccataacaccatatgtaatctgagtaatcttccttatcttagtgatatcactactcttcctagcgttgctttatacgttaccctagtaacgtccccgtatcaagcctacattgggacccttacactcacaaaataatggctcttatacaagagtgaatcactttagttacttccgagactaccgactggccctatagaccgatccaagtatttccaacttgctttactctaactcgcacgctttaaggggaaacttcctaaatgtagtcaccccaagtcaaggatgcttaactgtggagttccttcatgatgggctaccaagtagaatacttctttctaatataggtagtgctaaacaattcattcaagtcctcaacaccatgtggtcccatgtatacataatctcaaaatcactacatacaacccttccccatgtcatgtggattatacagcttctggtctttccttcgcggatcacggtggtctaattgtcacagcttgactcatgccccctggtagtgaatagatccacccacacaatcaccacatttaattcacctagggtttaagacaatactcataaattgtcccgcttatcctaacattagatcactttatatcaaaatatttcgttcaccaaattaattagttggatacccccattaactactcatatcctatattgcacttaggagtataagaaaatttaactcaaactgccatttctctaattttcctaccctgtcagatgaactaccataaaaaaacatactggcacagtccattatgatcttttgatattccctcgttgagtgtacaatttttaataccgatataaatcgaaatagctaatataacattccctattaaattttatcctaagtcggtcaaaggaccaatatccaagttttttggagtcgtaaccaatactttgacaggaccggtacactattcttctttaacattaaccattccaaattgagggtaggcccttataagatgacctactaccccacataaaacaaaatcaggctctacaatagccctagaacatttttttcctattccataattagtgattcatttagtttctgtcgactgatctgctcatacaagacgagcttgttgtcctctcagatctcgaatttgagtctccttgttgtctaatcacatcttgcatagcagaatttacatgtttccagtattatgacaataaaggattctttttcttaccatttttcatgagccagagagctcgctaatcaagcaattcaatttcccttactgtataacttgtcacacaattaatccacatcttccaaatgcttaaaactcatatagatatcaatatcaatatgcgtataccatanacatattcttagtatagataatcaatacactatttcttcccatcatacactatagttgtctaagcatgtaaggcaaaagcaaataacataaaaaacttactataccatgcgtagacatgtgctcgcagcaaaggtacatcatacactataatttatattttttttaaaaattgtgagaatattaaagacttgactaaaataaagaactaataatggacattataacgacagtaaaaaggtgttccaaggattcctgttataaaaatatttacccaaaagactatagacaagagcaatccaaaacacaattcaaaatacaacagatccaaccagtccaaaacaactccttgcaactcgacacgcaggctggtgg

SEQ ID NO: 45699 - DNA, 1129 bp, Cannabis sativa
tcactctggtactgttgtgtgggcggctgttaacatgctcaatttcagagatcccctgattggggaagcggcggcgtgtagacttgcattggactccgctagactcaagaatcacaactatgtcttggtggagagagattctgaaatggttatcaaagcgcttaaaggatttcactctatttggaatattgataattatgtttctttacgtaatcaactctctaaaaattttgtatcttgtaatttttcatttatttcgtgttgttgtaattctgctgctcataatgtggtaaattgggcgttccctcaaaacatctcaggttttgtggaaccctcctcaatacctgataatatcctttgtaatgaccgtaaagtaagaaaaaatagtgtcgacatatatacatcctgcgtatatatatggtatttgacatagtaaatggtatttatttcatcaaatggtttatgcagaatatatttttatagtttagttgtaaacggtcgattactgtgcataaatgtgtgtgccgctgtaattttgttcggcgtaaaatatacatgcactgacaacttaaatgcttgtctatattacattgataaagtttttaaagtataatcttaatttttcttcttttaatgtttattaaagccatttctttgccgtataacactggtaaagattttataaattatacataattaaagtaaattgtatatatataatgaactgaaatgaaaataaattattcatttcgtatatatattatataataaaaatgtattgtgcgatatatatatatatattgttggacagtttaaataacaataatagtataataacaatttaattcaaagtttagttttataatttattaaaaatatttaatatttagttaaattaattgaaacaaaatatcactaaaatgatctcttttatgtagattaatttaatcaaaatattagaataatagtgtgtatgtgattcataaatttattaactaatttaaaagtgagttaatatttagttaaatttcatgcatatttgtagtgataaatgtgtgacaattataatatattttgtgtgaataatatgttattccaaggattacatgttgtttgacataatttattg

SEQ ID NO: 45700 - DNA, 1624 bp, Cannabis sativa
tagtgcttgtggcactgaaatttacagttacttaatatcgagtgcgttgtatctaggagaagtgaattttttacacattttttccttttataaacaataatctaaaatagagagatggaaagaactataaattggattgctatcaaaacaacgaagtatgaatcattaatctaatgaacatttttttgtacgaaaaaaaataagggaagcttttcctatttggcattggctagccaatattcttagtctgttaagtttttggtagtcatttaggcagcttctgtactggatgagatagctatgaatttattattagcatttgtgatatgaaatctaaacaatctgcacaatgttaacatatcgagcaaaattttgttgcgaatatatcgatggagggaatcaattagacttctgctatggaaaataagtttgttatatcttgttctcatcatcctttgtagctctttcataatttctcttacacatttagttgaattcatgacagctgcaagggctttggaattgctgaatttttcttctttaaacggaaggccaattagggttatgtactctcaccgtgatcctagtattcgcaaaagtggggctggcaatatatttattaaggtatatgtccattgtctatttttgtattttgctgccactttaaaacatcacaactatctgtttttgcttacttcatattttgagtaatgatatgttcaccatcaatattgcacagtgataatttttttcttaacaaaccatttatttcatatgagactcactaaaacagtgccacaatagtgcatatattgtttttgtgcgtattttaggtgcacataccattgctcattttattttctcttgtcgagactaacttttcttctggctcaaaactttcagaatttagacaagggcattgatcacaaagcacttcatgaaacattttcagcatttgggaacatcctttcttgcaaggtagctacagacccaactggacaatcgaagggctatggatttgttcagttcgacactgaggaagctgcccaaaaggctatagagaagttgaatggaatgcttttgaatgataagcaagtctttgtggggcccttccttcgcaagcaggaaagagaaggttcatctgataagtcgaagttcaacaatgtttttgtaaagaatctatctgaatcaacaaatgaggatgacttgaatagaatttttggtgagtttggagaaattactagcgtagtggtgatgagggatgcagatgggaaatcaaggtgctttgggtttgtcaactttgagaatgtagaggatgctatgagggctgttgaggctttgaatgggaagaaaattgatgataaggagtggtatgttggtaaagcccagaaaaaatctgaaagggaagttgaattgaaagtcaaatttgaacagagtatgaaagaggcatctgacaaatatcaaggtgcaaacctgtatgttaaaaatttagataatactgtcagtgatgaaaaacttaaggagctattctcccaattcggtacaattacctcatgcaaggttggtcattgcatctgttttatgaagccttcacattctgatttgttaagtagatttcataaca

SEQ ID NO: 45701 - DNA, 1127 bp, Cannabis sativa
taactcatatatgcattaatccattatattatgctctcacaagggtttatcctaatgctgtttatcaggcctaatctagttatatcttatacacaaagttttatatatctacacaactcatttaaaatattctcatatatagaaactttagactattaatcctaacacatgtttctaaatagctaactacacacgattagcatataaaagggccaaagcgttaaacttaaatgtagggctcactttcttacctgaattccaacaaagtggagaatccaaacactcaggcgatctcgatcaagtgaccgtagtcctagtcacaaacccaggtacaaaaataataggattaatcctcaatctcataaaatatttataaataatggctccaaaatttgggccaaatgatatagcttttcaagagtttttgaacggtataaagaacatgcaaaacggagtttagagtaaaaaattctagccaaaataagtttcataaaattctagctttgctgatcgtatagggccgtgactcccaagtacaggtctgaggctcttggattaaaaacccaaaaaaaaaaaaaaaccatattttgagctccataaaagtaccaaattcaacacccaaaaagtaatactttgaaataaaaccaaacaaaggcatagaataaaagttgttttctttccattccattccatttcattacctccaaccaaatgccaccttaggggttcgagagctaaggcttagagtttaatgtatttacacacttcttccatagccatgggaggattaaatctgacaaaaaaagatagtaaagggagaggtcgggtgtgctggaggaagaagatgaaggagaaaaaaggaaaaaaaaaaatagagaaaaaagaaagaaaaaaattgattttaaaatgtatttttttttaatttaaaattatttggtggaccaattttgttgcaaacacgtgacaattataaataagtaaactgatcatttaaatttaagactaatggacttacaaaaaataccactttgattataggggtgttcatccaatccaattcgcattattttactcatagtgcattcgatccgcgctaagtgcatattttatattttagatccaatcca

SEQ ID NO: 45702 - DNA, 1741 bp, Cannabis sativa
  modified_base (1242)..(1247): a, c, t, g, unknown or other
ttttttttttttttcagaaccctacactactacaaatatggcttttcccaacggtttataattgtcttttatactattacccatcggttcctaaaaccgttagctatgtgggtgtcataaaaatgcggaactttaaaagacggtttataactgttggaaaaagtcactttaaatgacgatttacaactgttgtaaaaaatcactttaaatgactgtttgtaaccgtgggcaaaaatattatgtagattaaattaaaatattttttaatatatttttattatttatttttataatctaattattttttgggttgcattttttaaatattataatttttttatttatttttataattagaattttttatttatttttggttgttgttggttcgcttggtctacaatccaaatctctcacttcttcaaagccaaaaactctgtagttacccaagaataatatatcctcatcaccaagaacacaaatgcattgtgtttgatcattgtcacaattacagtcgatattgcacttcactgcttgataagtgctcgaaagctccggatcgaatgtggggtcctgccaaaatcaaacaataatttgatattttcacaaatcaaaaggatgaaaggaagagaaccaaatccgatccaaatgtcagtggtggcgtacctttaagaatctcaaaacaacatttttttttatcaaatttaatttttttcttctttatttcctaaacattaaacatttatgtaaatggagagatacccattaaggaggaggtcatcgttgaggctctgcaaaagattgagaagttcctacttcaaccaagaatcgagaagaatatcaagaagatgtagaggcgtcattagatcttcggaagcctcgccagatctctatctctctctctctctctaaataagaagaagatgcagaggcgtcatcagatcttgggaagcctcgtcgtggagttctattccttctgtggcggtcccgtccctgtcgttcacataccagccccgtccagtcgaactgagtagtgtggcgatggtggaaaaacctcatcccacttcctgtgtcccctgcaactgagagaaagtctgagagaaagagagagaagtttgagatttgtgaggtgcggctgtgcgtggattatgtttattctacttagggtttttgaaatgatttatatattagtatatatataaaattacagtaaataaaattataaaaaataataataataannnnnntaataataattataaaattaatttgtaaattataatttatgataatattaatatattacagtaatattatttaggcatactattttattttaatatgtaaatataaattataattttatttacattaatatattagtattactgtaaattattttaaaagtcagatttttttttatactttaattttatcccaattaattattttatatttatttatttatttaaaataaaataaaatatgatgtaaaataacatattaaaaagaatttttcccaacagtttataactgttgggaatactaagtatacccaacggtttataactgtggggaatacttagtattcccaacagtttataactgtggagaatacttagtattcccgacagttataaactgttgacattcattgttttttttttaaatttcatttagtattggccacagttctccaccgttggcattagttttttccaacggtttttttgcttcagtt

SEQ ID NO: 45703 - DNA, 5759 bp, Cannabis sativa
ccaagttccacatgtattcccttgtgtctatctttgtagtgtatataataacaattatgtctgatacacttgaaattgcagttaaggttgttaattatccaaactacacaaatattaaatatcatacaatttgactagaacatactaaattcaacattaacaagtatgtttacattggtgagtagccagtagcttctatgaatttgaccttttcttcatgatttcatagtttctctttcttgtagctgtgttaccatacccggctagaacagcaccaatggctttagaatcattattgagccaaaaacaaagttggattacaatcaattcacccaatgaactctcaatgaagcttaacttcgattacaattgatcctcacttgtggcagtagggacatggttagttaaaactgttagaatagaaacagtcctcaatggataatgaccaaacacaacagttactaagaataacctttcaatttccttaatgagaaaagaaaaggtcatatggtacttttgttagtctgctacatagagaattgcatcatttcttgtgattcactacaatatttaatgtaatgtaatcaatgtaattatcttttaattaattacccaatgctgtaatattaattaagaattactatagtaattaataataatcaccatcaattccaatatttcacatttacatatagaaatattcaaacacaggttggaattggaaatgtagtgaattatatatattgttaatatcacacctaatagtaatacagacaaatcaaagaaaatttacaaagactttacctttgtttatatatggatgtttatgaagatcactatgagattcttgggttaccaagtggcaagaatggtgccaagattacattgaaagagataacaaaggcatataaagcaaaggcattgttgttacaccctgataaaaatccatttgattcaaaagccaaagctaaatttcaaagactcaaatcttcatatgatgtactcaaggatgacaacaccagaaaactctttgataagaagctaagtaacattattgccaagagaaggaagatggaatctgatcttgctagagtaagttcttgatttaatgtttcccatattttactaaaacaaaatggatagcttccaattctctcttattttgagagcttgtctttacaaaacaaactctagccttaatagtgctgttaatcatattatcaaacacacacactagctgctagagtaggttgctcatgcaatcgaatccccaacgactgttctcactgttaggagtagcactagcgttaacaggagcaggaagagtaagtagcacgtagcactatgactttcattttggaagaatgggttgtttccagtacaaatagcgtatataagattggatgggacatgaaacggccattttgcctagctagtacaatcttgatgccgagaatttggaatagaatgccctcttgggactggtagtgtcaaagaggagattatgttttgaaagactccctttggacgattgatgtgcccaagccaaagccgagttttgataattggataaatgctactttagttaactaacaaatttggcactagattaaattatgtatgggcaaggtagtatggcactgcactgctttagcataattcacttttactcaccttgaatttccctgctgctatgataaagtaccacttcacatcctgcttcagattataagaccagaatcagttcacccaaagctgtattgtttgtttggttgtatggccccaaatctacttacctattaaaactttgttcctctgtgtccatagttccccataggaacattcttcacagtttatctatctcagcaatcactttttgagtaaacaaatactcatctgttgttgaggtatcaatccaagtcttacatcgaaaaagtaaacaagagttttgttgaatatgtgttccacctagtatgatgtcttcttggaaggtgtccaaaaataaaattataggagttaaggtgaggtagcgccccaataagtttgaagaaagccgcccgatattatccaatagcttatgatttctaaaaccacaacttgaattagttaaactcttgacttcaaacttgaagcttcagctgaatcattagatatttaagaacaacacccaagatgtgactcttactttgatcagatcatctactgccctgaagataatttgaaacttgttcttattcatggatattttgcataactttgacaaaacatgttgtaactcttttgttttaatgttgtaattattatatattttttagaagaagcgaaaaaaggaagaagaagtagcgaaatcggccagagcagcagcaaaagctaaagaagaaacgaaaacagcagctaaagcagcagcagaggcagaaaaagcagcaaaacgagtagcagcaaatgcagaagaagaagcaaaaacagcagcaaaagcagcagcaatagcagcaacaatagccaaagaaaaagcaaccgcggctacaaaagccaaagaaagagcaagagccgcaacaaaagccaaagaaaaagcaaatgcagcagcaaaagccgcagctgaagcagccgatttccatgttctaaagaaagaaagtgaaagagcaaatgacacaaataagaaagacaaaagcaatcaatactcattctctgactcagattctacagacacttcttcttcttcttcatcttggtcttctttttcttctgattcttcttcttgctaggataatggaagactcaaaaactatggcttccattagtgtaagcacaatttgctgctcaactgaaaagtaacaagtcaatatatttctttgtaatctttttttttttcaatgtaaaaactcataatatattgtggtattattctttaaaccaccgatcaatattcagttaaattagttagtcattaactaatacaattgtcaaaaatgacaagcaacatattagatccattggcctatatgaagaacacttatccaaaaaaatgagagagacacaacacagtaggaagagaagttagagtgagaaagtaaaaaagagagattgggaaattatattgcgcaacattgatgattatgttggctcgggttggtgatttaatgagtgttgcggaattacaccatgaaagatttactgggattatttccttgtatctcgtgatattgatatctcttattctcatcaaagaaagattggtggcagaattttaaaactggagtaggaccaagtttacattgaactttgaatatggactattataattcttgtgtgttgttgtgtttggaagctatctagattcatctttgtgtttatgtttctggtttgatatgtgtttgttggttttattctagatttgtttgttttttatttaacttttgtttgtttagtgtaatcttgaaactcgaattacagaggttaatttctacatatcagagctagatttcttatatatagggtaaatgacatcataagtacttaaaatttctaatttgtaagtgcgtttatttttagcgggtgtaagtactcaatatttgtaaaattataatttttctctaatttcgccagtacaaactttgttattgttttaaacagggcacatataagacccagattctagatcattgggtctaaacagaaacatgtagtatcaattatttctaaatgttcttttaataaattcaaaacaaagtctgtactgacgaaagtagaagaaaattacagttttataaatattaagtacttatgctgctaaaaataaacatttaatttatagcacttacaaacttaaatctttgggcacttataccgccggctaattactcatatatattgtttgtgtttttataaaaatagttatgaaattgacattttcttgttgtctttgttcaaccacttggcttggttggttcctttgtgagcaatttgtaaaagattctacattgattgtgatgtcagagattaataagccatagccaaacgaacctcaaaaacagcagcaacaataacagtcaaaacaatgaaatagtagtagcttcagaagtattaaaaagctaacttgagactaaagtttcttacatgataagatgcatagagatttgttggagtatcactctaagtcccacatcaaaataatatgttagagttgtgagattttttaggatgtgtctaaaaataaaattgtgaggacttagactcaaaacggacaatattatactaatgtagagaaaattgcaaattttataaatttttttaggggaattttaatttttatagtttttaaggtataagttttgcataaaaaataactttttcacaaaagtactattttataggaaaattttagaaaaaagttaaaaaatatgggaaaaaacagtattacataactaattatctctctacttaccattaaagtatttgttacccttaattcattttctcatattattaacattttcttgaatttttcccacaaaatatcttttttgaaagaaaaaaaacctaatataaaaaagtatataaattaaagtgaagtgacaatccgacaaaatttactccaaactttgcataaccaaatctcacaacttaatttctataaaataaaataaaatctcaaactttcctttttcttaattacaaatcaaatacaattaattattagatactgtagttactaataatatataaaaaaaaaaaataggaaactaggcagctagctaaggagcttatatataaatatatatatacaaaattatatagacgaaatggtattgagagagaggtaggaaaatatccaataataatatgaaagctatgaagaaaaatgatgatattaagataaaacataagtgtaaaaaagatttgatgatgaacattattttggttggtatgataagttggggtatggcttttctcaatgcatataaatttgcaaatatttgtatgagttatggcttaaaaaaactaacacttcccattgttattcccataacaatgattggagtcattagtttttccatgacaagattgaaaagtataataaaaacaagaagagaagtattgataatgattaatgaagaatttgataatggtgatgatgtggaagcaaatcattggtgtaatgttacattagatcttgtttgggtttgttattgttggtttattgtgtcttttgtttgtgtccctttgtttaatttattagtggtgatttcttctttagatgttttctttgctctctttcacttttatctcactctaatttttatttatggtggacttgttcttgttgaacttcattttagtgctgctaagagaagatatcatatcatggagaagaagaagaaaaagtgatcattaatttaattacaatttcgttgtgtttaatcttgttttattatagtttgttttttgagttgtaatttttcttttattttacagcttataatttaattaattgagctttcgcttaaaaacgttgagatttcaactattttaacgaatattttatgtaataatggagatttaaatttaatatatgtctctctcttttttatcaagagtattttgtaaaattaatttataaccaaaaaaattattagcaaaataattatgaattataatattataaaataactgtttgtgacaatcttttttttttttttttctaaagtaaaaaaaaaatagatctaaaattgagtgtcgttattttacaataaattttcctt

SEQ ID NO: 45704 - DNA, 861 bp, Cannabis sativa
  modified_base (481)..(494): a, c, t, g, unknown or other
  modified_base (619)..(622): a, c, t, g, unknown or other
ctcgtattaaactacttgtcgcttgaaatcagttgttggctaaaagcgaggtcaaaagattttataagttggagaagcactcccacaagttgacttgccccaccagcttcaacaaatatgtcccagacttctgggacaattggttcttcacaaccatgaagggagttctgaccccctatctctttatttccactctgggtaagcatttcaatctttttctttcttttcattttcttccatgtgttgtatccatttttgtaatggaacaagttttgtctttacaacgaacatcacactgactgtaatatctcgataagcctaatggtaaataattatggtttatatttatattgtgggttaatcaggtaataagttggatgatgatgctactaatctatttcagcataaaatttaaattttgctataagtgagtaaataagcgtaatttataaactgtagagatttatatagcatgtgtgannnnnnnnnnnnnnatatgtggaataaaaatattttttcaggttcagcaaccttgaagactcgataagtggataaataagcataatttgttaattatggagatttatttgaaatacatggatataatatgagttatttnnnnaataaaaatattttcaggttcggcgattctggagatccgattggagttcaaaaatatcacaacgaatttagttagaaatcttgatgagattattgaaataagttgattttagaaatcttggagtattttaggatactcaaaatttgccaataccttaaaagtagaggattcttaatggctaagaaatgataagaaacgtatattttgggaacatggtaatacaattgagtgggagcgct

SEQ ID NO: 45705 - DNA, 1491 bp, Cannabis sativa
cgtacatatataaaaaatccccttaattttattaattattgtaacatatatattatggaattacaaaatgtgtgtagaatgatcacaaaatagaaattgtaaatcttttaatttgatgatcacttaaatatgtaactcccacctctttttcactcttaaattagtaaaagatgttactaattgtttataaatgtaaataaatgatagctattaaaaatatagctgttgcatatttttctgcctaaactttgttttttttttaattgattatgggctcctagttatataggagccaattccataaaaaaaaaaaatgattggtgattattgtctgtatatagttttgtgcataatacaatttgacataatacaatttgagccgatttatcaaaaaaaaaaataaataaataaataataagtacatatagaaaatcgataatttataagacatttacttataaagtattaggcaggaaagagaacaggagtgagatgtgaaaaggttctaattattctttatttgtcatatgtatgtactctatttttgagcattaatgaaattgggactattctttgtgtttctttctctcattattttttgttttatagctagaaaattcaacaaccctaatagatagatattattcaaaaaacacacgtgtttttttattaatttggtttgtacaatataggagtgccaaaccagctaataatgagatttatttatattttaacacacataagatccctaagtccataaataaaataaatatgatagtgaaatattcaatactctagattttactaatttcttctaaagcttgtatgaattgcatgaaggaaaaatatatcaactatttaaggaagttcacatatatacctttctcttttacagatctgaaaatcaatgtgagtgggattttgcatgtatcaatggctagagattagcactactactactactactacaaaaaaaaagttattttcgttgctttataagtaacatttaaagaattttcatattgattagagaaactaataaatttgtattggttttgtttagaatagttagatacgtgattaataatttgttgtggtaatgtagtgaagtagtgaaattgatgagtagtagtttatttaatatatgaaattagtttggcttagaaaagagaattatatgtaaaatagtaaactcttattgatagtttggaattttgacttttgggtgtcgttttacaatttggaacccttgatgggtatttatagttgctagccttcaagcatttgaggctagaattattttttctagatctttctagttcaaggattttattcatgcatacatttctacatatttcttaagcatgcataactacaaacttctagactagagctttctaaaaatacctatgttctattgtattttttacatgtttagaaaattctaaagtattctgcaattatctaaaaatgaggagtgctaattacaac

SEQ ID NO: 45706 - DNA, 3237 bp, Cannabis sativa
aagaatgtagtggtgatcttgaacagccaacacagaaaagtactcgcaggagaagcaaacggagcaatttaacaaaaatggttagcgagggaaaaaagttggaggttgagtacaacaattacgaacaaaactgggaaagggagcgacggcaaaagttacccaaattggaacatggatgcaaattaatgttccatttcgagacatatcgtggcctagagtgagccaggatattaaaaactaattatgggatgacataaaggtaaaattaattctattattcgagttctttactattgattataatttgtacttataactacgattgtcaatttgacaggccgcgttcgatgtatcggagatagataagaaattaatcatttctaaaagtagagagatgtggaaagattggaaaaataccctaatagatggtatttttaaatttaaagatgtggctctccaacttctcgacaagacacctaaaactttatgaaaaaataattgatttacatggagagagtttgtggctacgagattaagttcagaatttgaggtgaggaggaaaaaggcccaacagagtagggcttgtaatatatacaaccatcgcatcggccgaggtggtgtaaggttggttcaagaacaaatgcacaaagaggcaggccaccaaattactgaatttaatttgatagatttgaaatatggaaaagacttcgcatgaacacgaaaggcgaggtggagggcccaactgcaaaaattgttaaacggattgtaagtttaattaaagtttaatttcatttgtattaattgttatgcttcatcatttatttctaactctatttgttatgtttgtaggatgactttcgtaagcaagtggaagagggtgttgtacaagtggaaggtaaaagggatgtgctaaccatggagttggggacagatgagcatggtggccgtgttcaagccatgggtttcgacgtcacccaaaccaaatatttcaacacaccacgccctaacaagaaaaatgctgatgggtcaaactaggcatcaattgatttggagagactcgttcgtgggacagaggaaagcaatagaaagctacaggagaaagtggatgagctcattcgtctgattagttcccagcatagcagcgttgcgtctggttccagtgttggaagagcatcaaatgaacaaccccatgctgaccttgcctccaatccagtagcataaccaccaggtcctgccaatgtctatactccactagatcctatagcacaacagtcgggtgttgctaatgtctctacttcatcaccaccgcattttagaaatgattcttctccagcagtagcaccgccacctactggtggggtagttcagaagaggtaatcttaatgttattttacgaattgatctaatgcaaaattataaatatggtcaatttacaaattgaattgttgcttgtttgatttggatttgcagactttaccgtgttggatgcactatcgattggagcctagtgggatggtactgaaggttgcttctggccacattgtgaaggagaaatatttgaaagatggaaagttctccattcacaatgatgaatacctacacaaagattatcgtcgcgtattgatcgaagaagtcaatgtagagaatacactgctaccgtgtcccatagctgaagattcattgacaacagtaggtcaagctatagaaacttacgtagcatggccgaaagactatcttacacctgttggaaaatacttggtatgcttcaatttgtttacttaagttattgtgtttagtcattaatgacatttctaactttattttttttttcatacatatagacacaaccacccaccaagaaacttcaaaagcaacccgtgaagagaagcagacaagcctttgaagatttactcggtcctccaacacagcctccaaaataccctgagaggctgagtaagccaacaggccatggtcattatgtccaaccacgcaaaaaactagctcaatcattaccttctggaactccgtcaataatccagaagtcgtccataatccaattccaggttgcttatgatctatttggggtcgaagatgactctatttggcttgttaaaaatgacattcacaaattatataccatgcaatacttgggagcccaaccattaagagtttggtgcaagtatgatttctaactcttaataataaacttgataatgttcttttgacagtgacggttattaattatgactttgtattaggcacatgaaagaaatattgttggaaattaatgggttgaatcgaatatatgaatttttaaatctgggtgtgattgctcctatgactaggatgactaatctagacaaatggtttattgccccatacaataatcagtatatgtagatttaaaataaatattttagtatttataactcttcataatatttattattatttatatattaacaattttgtacatatttgttcatgcagaaaaatgtttcattggatgcttgaactcatccaactaagtacgcaaacggtggcatacttagattcaggcaatgacaacataccggatgatttagaaattcatcataatcacgtaagttctatattcaacattccaatatgtaagtgttttctatatttataaatttatatatgctaactttactttttgtgtagatcgttcaccgtatataatcaaatgataggtcggcctgatcgacctatccagtggatgactcctatatgtcctaaacaaccagacaacaaacaatgtggatattatgtcatgaaattcatcaaaagttttatgaccatagaagatccaatacatgtgttgacacaacatgataggttctctactgcatacacaaatgataagataaatgttatgcgagatttgtagattcattacgtgaaagcggaagcggatcgacaacagttgtcgtgttagtcagtgtgtatatatctcgatttattgttactatatagatttgtaaatatatttagatgatattagccttagtttaactattatcactatacagaattttaaatatatttagatgatattagctagtttgattactgtgactatacagatttgtaaaaaatttaaaaattattgtaggggaaaaattgcaaaaaatctatgtttttccctatttttctaatgtaatgactaaaaaccatcgtccctgaaaaaaactttttataataaaaaacgtgacc

SEQ ID NO: 45707 - DNA, 2232 bp, Cannabis sativa
cattcattccgtgggtgtaagggcacaatggagacttgaagcggggacgttacatatacactactccatgcatttctcaaatgatgcctcatgagtagacccattccacttaaaccatgtacacttccaagacttcacataattagctcctaaatctccataggtaatacaatttcatacttatcatttatggtaccataagggcactactactactattacattacattattagagcactcacatcatcttctttaaaatacctttcaatgtaaaaatttaggtaaaaatgatcaaatgactcatacatcaaatgagttattctaaagttattttaaaaaatggtactgtagcatctctaaatgtagctacaactattcaatgagctatattattttattattattttactctcactcttttctcataccatctctttatttattttattgatttttctctattattttatataaatgtgtattgaaaataataatatttaaatgatatagagataaaaatagaaaagctgatgtataatgtaatgtgagaatttgaaataaaatagaaaaagtagaattttggtgaggtattatagaggatagagtaaaaaagttgttaggagtgctcttgctctattaatagtacaacaatgctatttaattttatacctttaattattataatgctacagcttaaattaaatgataattatcatttataatccttttctttctaaaactatatgagcttgtactatttttagaactaccactctctaataaattgaagaaaataatttaatttataaaattattatttctacatcaaggtaattagactaacataatagaaaataataactgaatattttagttattgtagcctaccctcgttaaaagaatttcgttctcaaaatttacttactagagaacaactcaggacttaaccttgggcttaaccttaaaaatttactgaccaactctgtccagtatctcgaaaggacttataaatcttgggcttaacttttccttatttttaaaacttataatccccttcattggtgatacctttaagaacaccaagtctcctacaaaaaaactcaacctcccgccttttcaaatttaatttttctatctactttgggcagtaagcatcctttgccatatcttttcaactgcttctgaagtttttcttactgtttttggacccaaatactatctttctccgacctcatcctaatgaattggtgatttgtatttttgtccataaaacatcttatacgatgccattttgattgtggcttgatagatattattgtaggttaactctattagaagtaaatacttactccacgagacagtgaagtctagcgcacacgctcgaagcatatcctcaagtatttggatggtgctctcagattgtccatctatttgaggatgaaatgtcgtagtaagttttaatcgtgtccccattgccttatatagactctcccaaaacttggaggtgaatactgaacctctatcagagattatcgtacttggaattccatgcaacatcaatatctcttgtacgtacaagtcagggtactaatgtgtgttgtaagtaaactttacaaaaataaagtgagctgactttatgagcctgtctataattaccctaatagagtcatgttgcttggttgttcggggtagccctgtcacaaagtccatggctatatctttccacttccatttcaggatttccaagggttgcaacatccctgctggtctttgatgttcaactttaacttgttgacatgtgagacatcgtgttacaaatccagctacatccttctttattcttggccaccaatacatggtttttaagtcattgtacattttgattgatctgggatgcatcgagtagggtgtagcgtgtgcttccattatgatcattcatttaagctctatgtcgtaattggctacacacactcttcacttatacctcaacatgatgtttgtatctttagagaaattctctgcctccttctccggcaggcctgcccttttcttttgtaagaactcatcagtaacttgtgaatctttaagttcttgtagcagtgtcgagataatggttaggttaaatattctttgtgtaatgatctctataccacttttttggagttcccattgtagtggcatttccatttgtgccagtattgccaagctggcataactgcgtccacttagc

SEQ ID NO: 45708 - DNA, 3046 bp, Cannabis sativa
atttactacataaattccaaactatatatgtcataaaataatataaatatttttaattaaaataaaaatatattaatatattaagctcttgctcacctttttgtgaagtaaatattcctaaatataataattatcaagttactaatgaggaatgtacttaattaaggaatataatctaatattaattattattgaatgactaaataaatagtcccatagtaaatacactattcatgattccttttcctttcatacacaattttattcccctattatatagttattaaactatataaacaaacatccttaaatgacaagatactatataagtagcaattagagaaccaacattaaaaacacaagagtgatcaagaaataataagatgaagaaagagaaagagaaagatactaattaagctcttttagaaaactccatttatttatttgaacattaattaattattaaataaaaataaaaggctgttactcactttcccaataaaaattccatatcttaatgtcatgcatggcatgggccagttttctccaccaaaataataaagccatttttattcaatctatattctcaatatcctttcccactacctaaactttttttttttggaattatttcatgatgaaaaaagttgcatatgaagtcatttctcttctataagaatcagaatattttgtgtttttgctttgggaatgccacaaatgtcttctcttaattatttataacttctttttttcattaaatttttttttttggtaattatattatttcatgaaatttcacaagtacttgcatgtagtttttttattttattttatctgtcttgtataaataactaatttacatccattatctattataaaattagaccttgttaatttgaaaaagaatccatttggagtaagtatttttttttattttgaccacgtgtttataaaagtgcatggtttatattataataaattattattattattattatttgagtacataataaatttttatttaagaatcacttaaattacataaactaatataatacgcattaattattaattattgtgcattatctaaatcaagagtagtcttattaaaagcaaaattacatcctttctctatatttacagtatgggatagtctcatattcttgaatagaaagttcttcttccaattaaagtaaatagtaattaatatcgaacaaaaatgtacgtacatttctattttatgagataatttcaattaaattctactagcatttttttcactttgactcgatcgagttcaattaattgttgtaaaactaaaagagccaaaaaaaaaaaaagtgtcgaagaaaaaatcaaaagacaattgtaagtggtcaattcaccaaaaaaattatatatttgagcattagtaattgattgctaacacaaaatgtgatttgatttctcttttagtttatctcattcatgaatgatgtatcactatattaaaagttgtgatcaagccattgtaaaagagtagaaacttctattttaaaaatattaaataattaattaaatggtcatattatgcatatttatatatatactttatcgtcactagtatgaatatgatattgtctttttttaatgggtataagacatgatatatacgaaataaactaaaaagttggctaggattgttaatatatatagaacattttacataatagtagaacatataaaaagttataatttttactttgtttcctttaaattttaagcttgagttttttaagcttgagtttttttttttttttaaaaaaaaaagaaattaaataaaatagtaataatttaactttacaattaaaaaaaaagttgcaaaccttaaggttatacatagtttccattacaatattacaaaacataaaacataaaatatatgtaaaatggtcaagtgatcatcctacaataaaataatatgttttgacaaaaaaaaagtatatattaatatatgtaatattatatttgcaatgaggaacatttttttttataagatgtagcatttgtgaacaaacttaataaaatcaagattacacatgctataatgacatgtaatataatatttatattaacatattagattaatattaatcaactgccttcaagttgatcaatataatataaaaccattccaaaaaagaaaaaagaaaaaaaaaaagagaccaaactcatcccaagaaaaaacaccaacaagaagaagtaaacaaataattttcctacaccaagaaaattcctttaatcctataccaatgtaagaattttagttaattataatttataatcatggataaccccactccaccattccaaaatcttccttggagtgagtgtttatatattctttcattggggttggaattgatgcttctatgaagacttttgcttttgaaattaaaattaaaaaaaaaaaatggtaaaaagccataatatatataaacaatgaaacagcctttattttatatgggatcttttcttttgagaaatgggaaaaagcaaaaggctatatacccgtgccttacttgtacattcttcctcagctttacatggtctctcacaataatatgttgtggacaacctaaaatatatatctatatatgcatacactatatttatataatgaatcatataataatgtctctttttaatgggtttttattgtctgtatatggtttgtcccaaacctatgttatttcttaattttgaaaaattatgttggtgatggtatacttataatatggctatattattaattggggtacttgtttttcaagtgggaaaaagaagagtattatcacataattggtgtgtagaatgtagaataggaaacaatatattagatattattatatatatacatatataaatacacgatctaaaccattgatttactacaaaaattgaagaaaaatatgatatattatttaatataataatatgtagattaaaatgtggtaatatatgttattatatgaataatatatattaagtgtttggtaaataaatt

SEQ ID NO: 45709 - DNA, 2218 bp, Cannabis sativa
  modified_base (30)..(48): a, c, t, g, unknown or other
atctatattaataagtaaatttgattatannnnnnnnnnnnnnnnnnngggcataaaacccaacagttcaatatgtagaaacatctaataaagataccacattcccactagcaatactccaataataatattatgtaagtaaatatcaaagagtgtctatcgcataaagctttggttacaacccaatttagcaataagaaaagagtcttggaggtaggagtgtgtaacatctcaaccaatctaaattatatcgaatcaatttaatccaatttaattacaaaaatttggatattcaataatatttttattagattagttgtgaatagttagatttttattagatgaaaatttcaaaatttaattaaaaactaatctaatctaactatacatagtatatattagaagcacattatatttatttatatacaataaggcaatatttaaatttacttttactaattatttttttaattttcataaatctcattgcacctagtttaaaaaatccttacaaaaaacgataagaacacatgtatagtttagtttttattatgtgttttttttaatttttttttcattattattaaaaattaagtgtcaaattaaaatacaattaaaaaattgatctaattcaattattaattgtattggattttgaagtctaactgaatcggatcacatgatgattttctaaatctaatttctaattggattagattggattaaatggaattttgaagcctaattgaatcaaatcggatacatgtacgcgaatagtcggtcttaacatattaaggcctaagaaaaaataacttttaggaaccatagcgttgctggttccttcttccatgtttttccttgtcccgctaggcccatcgactcttactaggttttgtcgtggcttttgtcgagtttgatggctggtgcaagggggtggatttgagggatcatgcattttctcactagatctcttttcttgtaagtttcttccaggatgctaatggttttggcttgttctctcagggtatggttttggctatgtttcatggcggtggttgatggtcgggatggttttaggatatggctcagggttcgcccaatttggggttgtgggttttggggatctgtagtgtcttggaccagtggtgggctttgggcacgaggtgggtatctggccgtaggatgggcttcatggctctgtggaggaagtctttcgtcgtcttctcagttcaagggtgtggtgactctcggcttaagggttcctaagggttttatgatattttgtaaaagtttgatgcttggtttgtttttggtgtgccccttgtgcctagttttaattatttcaattgttttagtttcaatcctatatttgtttagtttattttataataatggtatttcgtcaccgctccactaaattagtagatattattatggcttcagtgaatggagtgagatttctatttattggtgcatcgatatttcattgattggatcaatttgcttcaacaggggttatatctttctctttctcgaccagatctaactattgaccttgtatttcgtggtattcagttcttttggttaccttgtaatagttggtcatttgattatttttcttattttgtatgtgaataatgaggttgttatgtctcaatttttattggaagatcattggctgatagccattgataggttgattttttaaaatgttcatttgatttggaaacctaattttcttcacatttttaatgcttgatcactagaggcttattggatctttacttgaggtttctattagggttttcttccttctattgtaaacagttttgtaagcatattattgttgacattgttctatgagctatattttcatattatggactttgatattatagtaaacattgggcacgtatatatttgatgatttatgtcacttataaacttagaattttggataggtatggcggacccagaatttaattggagggtgggcataaaattttttcatatataaaaatattccaaaaaaacaagtaaatataaagaaaaacacaattcaatatttcaattcccaactaaaaatatattaaatatcaagtactaaaaatcttttaataggaaaaaaaacaatctaaaacgatgttcaaaatatataacatactcaatatcctaaaattttagcaaacatatcaatttttgagttcatatctttaga

SEQ ID NO: 45710 - DNA, 1705 bp, Cannabis sativa
taataataatataataaaaaaaagtaaccataagaaatattgcatctctcttcacaaaaagatatctcaagtttgaaccccattccacacacatcaaatttcttttaattatatgtttgtattttcctaaaataaggatgtgattgtagattgtaggtatctaaagctagtgtgctgttctaaattagtaagagtggtgttaaaatttaattggacaaaataaagtaaaatagctacctcacttttttcaatattatcaacaactatatccgattcattgaaattatttaaatctcaccaattaaaggataacaattcacttgatattgaagactctcgatcgaagcaagcatttggatatttgagtaatacaaagtcaaataaattaataaataaaagaaatcataatactttttttttcttttgctgaaaataaagggatcatggtacagattatttccccacttttttagttatttcaatagttttatagtattagtttaacttaattaagttatcagtaatcacttagggtttccatcacacaaataataacactttcaaagtctttttttaatccctttcaaaaggaattagtgtgtatttcaaaccctttgatccaaataaaaaaaaatactaataaatacaatccctagctaccattacactacgtggtaaatcataatattcttttgtttactacattatttggaaccaacttttatttatcgttatatgtaagacaagatataatcaatattgtgagttttatatattattataatttacgtatcaaatacaattatattgaagactatcagggtgaattaatacttatcaaaaatgaaatgaaacaagaactaaagtactaaaatagtttaatcaaataatgatataaactagaaaataaatacaaaataaactaaataaaatagagacaaagtttaacgagatttatcaccctttttgtggtgactaatccccaaagaaattgtcatttggccaagttttatttgatcttcaacaatagaagaatacaaaggagaatacatagttttatccgatcaacaaaagtatcttgcatcttactaatggtgtctttaccttacaaaaatcaactcacttgagagagatgtgatcaaacacacttattctctataacaatccgtcctcccttattacaaatgtaattgttatcttaattcctttttagatcgtcacgtaaagaagtagaactcaaaattttatatagacaactcaatatataagaggggtactcgagttagtaatcttaaataactaacttggagttaactagacagacctgcaacatcactaaatgagattattagcagtaacaatatactaaattactaaaatcttccacaaatatttatctcaaaataaatcattacttcaataacaccatttatgcagttcacctaagaatattcatatgttatatactccaatgtacaatatgtaaacgagaaaatcattattttttttttattttgttttttgcaaggaaaaaatcattgaattttagtacacattttattagtgaagggcaaaaaaattaataaaaaatgtgatattcaatattgtaaatcaaatatagctcattttataatttgtgtcaaatttagctacattttgcactactattataattctatgttgttgatatacattaaaaaaaata

SEQ ID NO: 45711 - DNA, 1094 bp, Cannabis sativa
gacacgaaattatgtgttgctccggtgtcaataaggactgtgaccggtcgttgtgcaatatgcccagctaacttcatcgtgtgtgccgaagtgatgccaatcaaagagttcaaggacaaagtagctaaagtttcatctgaagctacggtttctccggagtcaggtgatggtggtgggttatcctctgtctgttctgcctcatcgtcatcagaattgagtatgatttggagcaacttttgatcgcaatcatgaccggggtgaaatttcttgtcacacctgaaacataatccccttgcccgtttatcttgatagtctgcttcggataaacgtcggtaggtgggaaaattcggtggtcgattgttgctggttttggtgactgccgaagccatagatgcggaagtggagttcccttgtttgatctgtgaacttgctggtgatggtcttggtgtatatgggttataagatggtctagtaggaatgattgggctcaaattaggcttggtatggttgggcctagtggctgggcccaaattgagtaaatgatggccctcctccactcgttgggctgtgtccattatggctgccaatcccttgggctgaagcaaatagagggcagctttgatttcttccttgaggcctttcacaaatgacccctccaagatgtgttctggcacatcagcgacacgagaggccagcacctcccacctgacgcggtactctttcacagttccggtctgagccaccgataagaattcttcggagagtgaacccacgggtgcggctctaaatcggagtaagatcaattgtttcagcatactccacgaagtgattggtcgacgctgattttcccattggaaccaagacagagcatcaccgtcgagtcccacgattgccgtttccaacatcatcgactccgttagtttcgtgagaaggaagtaccgctcggtacggtaaatccaagcattcgggttctcaccattaaatagaggaatctccatgcgtagtggtcggaagtcctgattgtaggtgggccctgaggaaaacgatcccaattgaatcggaggtcccggcggaggagcaaattggggaatcgt

SEQ ID NO: 45712 - DNA, 1916 bp, Cannabis sativa
agggagaatttaattacttgctgatcatttaattttatgtacaatttagattatatttatttattttcacttaatgatcaacatccacatataccaactctgaatttaaatgatggaagaaattgattttgatttgccaaaataaaatgattacataaaagaagaaaaattcagcaaagatttttggccaacaaccacaatacaagagtgaaagacgtgtggatcgagattttagactatgactttgtttggctaggtttatgtttttggagctaaaaagcacaataaaagtgaaagttgtaccttatattttgttttgtgtgtttttggtaaactattatgtaaagatatgtttttttttaatgaaaagcaaatgatttttttatgaattaattagaaactattgaatttaaaaaataatttttaaaaaattcttgttggtagaagttacaaattttaatttatctcaaattctaatctttttaatcaatagagatatgatcaactgagatagaatcgtcgtggtttggtgtatagacaagtgatggggtttagcattagattttaccacaaactaatagtctcaagatcaataaagacacaactttttttttttttgaggaaaatcatggttttggttatggtatatatggctatgaatgcaaatggttttctaattgaaggttatacctcttttcatgaaggtcaagtagaattagatttagcattagcattaacaaacaatgggagttcgtgggattcttagttagattaaagatctttattggtaaatggtatctttggaaactgattatctttgtattgtgcaagtcttttgaaattctttttctatgatacttatatttgggcatgttattaatgattgtaacaaattacgaagttagattaaagatcttcattggtaaatggtatctttggagactgatttttggtatccaatttgtgtagttaagaaaataattttagggaatatcgttaaccaatcataaagtgtcacctataaaaagtgttaggcaccaataataaccaatgaaataaacatattattaatttccaaatgaaattaatttttgtatccatttcaattaattattatccctctactttgaaatgtgtaaacaacccctttccttttctaatagccacatttaataagataattacaattttacataataaatgaatgctgtccacattgatgagatagggaattaattagtagtaattaaatagcataattctaatcgatccagatttatagttgtaatgttttccatgtcggataaatatattttaaataaaaagaaaagataaattaagagaatatatgtacacttaaaatgagagttggagtagaaagggagaggggtctttttcttttctttgaggttgaataaataatagtcaaagtagctaccacacaacaaaaagtactacacgcaaagcaaacttttaagaagctacaaacaaaatcaaaataatgtggaaactgtactttgatcaaatatgttggggtcatatatgtataaacgaatttgacaattattgtctaaatacacaattaattctatatcaccttccctaatatgaccaatgattacactcattgtaattgtcacttcactcaccatatatgcatacatacgttttgattcattaatattttctctccacacttccgtaatccatatcatcatttaaaatattttaaaactcttgagttgagttttctcaattggttcaaaactttatctcacagatttattgttgttaatacaagtttaatttcaaaataaaataaaataacaatcatctcacaaaataattaatcaattcgcctctattattataatcttttttaagaattactaaaaaaatacaactttgttagtgtt

SEQ ID NO: 45713 - DNA, 924 bp, Cannabis sativa
tacggcactataaactgtgtggcattataaatctcctctcttagaactaagagaatgcagtaggtggtgaagtaaggttcataatctcttaagagattgcctctagtattaggcttctttcctccaagggagttgccttggtttccaccgttgttggctctcttttctctgttcgaacctcccttcttcacattaccttgcccctccgtggtaggggcttcagtttctagtgacttattcttgccaccctttaagccgttggctcgggtgacgactttttcaagtttgataaagctatctactctatctaggagtcattcataatttatatcgcctacgaaggtcaaaccacagaggactcatctctttgagcccaactgtgagtgccatagcccttgcgttctcgctaagactcttggtcttagcaattgcctctaagaaccgttagatgtagtccttgaggggctcatcctcttgtttcttaacaaccaccaaattattgggctcgatttggcattgttgggaaggagcaaattaattaccaaaagcatccactagatatttccatgagtcaattgatccaggggagcttaaggtaccattgttgagctaagcctgtcagcgtggcaggaaagattctgcacctgacgttgtctctcataccttgtatatcggtctgcactttgaagtagcaaatgtgagacagtggatcttccttctagatgtattaatgctaggaagggttcttgaacttcagacaaatgggaagagctttaatttgtttagagagtggtgagcaccgttctctgtcaagttcaaatttgtataacttaggtttcgtgatcccaatcactaaagcagctgaggtgtcgaattctacctgaagttcccacgtccaccgttcttctcttatttaagagatca

SEQ ID NO: 45714 - DNA, 940 bp, Cannabis sativa
catgccataaattgtatctcttaatacttcttatcatactttgttataatgcattcagatttcagagttacagaattgcatattaaatccttgttactttcatttttttttgttgttgcagtatcagtttgcaaattacactaatcctaggtacacaattacaggaaaaggagaagtaaagtttcagataatcaaacagagatctgatttctcttttgcacttttctccggcggcttatcaaatgtatgtcacttctaatgtgatttcttcttctgttgacttcatataaaatggtacatttattgtaattctagatctttgggctaaggctaatcttttactgcaaataaaaagttttgatttattttcagttaccatagctattatatagtttttttattgacaaattattttagagtatctgaatatcattaaaaaaaattgtaaataaattaaaaggtaggtattttattctcaaatattcttttgggagaagctacaaatctcctaatgaattttttaatcctacaagttaaaatgagcttaaataagctaagccaaacagagcagtattgtactatttgtaagcaaaatcaagtggggtctagcctttggtttccttccaatgtggactaaatttttttttctttccatttctattggtattaaaaaaaaatgttcggaggattaatatttcattcacctgagcatcattatgagcatttaggtatgagaaatgttaaaagacaccggtagtagttagcattctcattggtgtcatattgctagctatcagtgcaattatgtatcagatcttatataacttaaataataatttttaccctactagtaaagggaaaacggaagtataattatttaccaattgtaaagcgacacctctaaataatgttaggcattattggtgcccaataagaatgc

SEQ ID NO: 45715 - DNA, 1425 bp, Cannabis sativa
atatacgtaaaacaaattaataagttttaattaagttgttagagtcatttttatatgttaagtaaggatatatataagtggattacctaaagaagtctataattcaaacaataaaacaaagaaacccctcaaatttaaataattaattgttctaatctattaataatattactatatttttaaatatttataatatttacctatgtttctcaaactattaatatcatatttaacattatagtaatgatttatattcattgttgaaggaaataaaaaaaaaatattctgtgattaatgtgtggtatatatgtatatagagaatatatatatataatgcctgagaaaaataatctaatctatatctatatatctatataaaggaaaaacttaaaaagagtgatgtggcatctttttcttcttaaattttattttctctaatttgtagtgttttcaaaaaataataatatatataacatttatttataacaataataattattaattaatagttataattaatttatagtgtctttctattttctataactatcaccattattttttaaaaatatatatatatttaatatttattaataacaataattaattaaattataattttaaagagaactatttcatgtactatttttttaactttttttttaatttattgtttgagtttctaaagtagtttctccaataatttgtacagttgctatagaatttttagttgtcatttagttactctgctagtattctaataatttagaaaaatattaggattggacacgtggctacgttggttacacacatctaatgcctcataaatatgaagaagcataataatgcatatacaagtagtaaagtagtaaaagtgaaagctggcaagagtggtaccattcagttcaacaagacaaatagtattaatgtgagaaactaccaaatagcatttactaatgtcttagatgtcacaaactaccaaactctaaaataatcaactataaacataaccacactaaagcaataataactatatgagaaatgttaaagggcaccagtggtgcttagtactttcctacatgtcaatattgttattggtccaactaagtaatgagtcccatataatttaatataatagcttttagggagtatttctagctaatcacaacacgacatatcgagaaagtactaagcaccactgatgcctaatagtaatgctctaactatatatatcagtagtgcttccaaaaccgacaaacaataagaaaactaggacacattagcacaatatactagctaggagcagtatgagagagccataagtcaagtccaatataccatacttaaaagtagggatattcataaaataatcgatccaatttaatccacatgatctaatttattctaatctccaaagatatccgc

SEQ ID NO: 45716 - DNA, 2205 bp, Cannabis sativa
gttggattggatttttgaattatattgttatatgttgattatgtgaccatgaaaattatgttggactaatatttattatacatgttagatgtgtgttttattactaattatgaaaaataaattttaaattgtgtttatttatcttctttttttagggaaaattagcctcaataatagttaaaaatataattcaatagacaatcagttaatgcatccaatagttagaaccgattaaattcaatacattaattgattcggttgacaaaatttgaaatccaataaataattagaatagatagattgagtctaaatcaatttaatttgatccaataaacacctcaataagaaatagtatcatcagcaaactatttacattagcgtgaaaattttgaacatcacaaattaatcacaaagtaattaatagtctcacataataatttcctcccttatctcaaaataataataattccctctaatatgttgaacaaatttgtttttttctctctatgatgttatgatttggtggcaatagtagctctgccagaactttaaaattgtacattttggcagatactttttaatgatattttattttctttaaaaaaataattaaaggaatatatgggtcagtgactcaacatatatggattatactatatatattatatatagatatatgaggaataaattacatcaaatatgtcatcttcatatatatatattaagttatgaaccaaatcatttcactttcgtattttttagtggttaaaccttactcgaacttccaaaagcagtacatacattgcttcaagtcgtcaattttgttggtctctgaagaagaacaagatgacatcgtctctttccttctttcgtatttttgagtggttaaatcttactcgaacagtcaaacttccaaaggtagtacatacattgcttcaagtcgtcgactttgttggtctccaaggaagaacaagacgacatcgtctcttccctttgttcttctaccatcaatttctgtataatctccaacaccatagaatgaattccataacaatatgaaatattggtgttgaagcaatttttcataattataattccgacaataaaaattataacccggtagcaaataaatgcataatattcatggtatacttatatatacaggtatatgttagtgctctatgtactcactgatcgaaaatctttatctttagagttggaatttgaaatttgttaatttcttaggtgttataataaaaatgagacataattttataattttaaagtaaatgcaatgatttaaaaagctgccattagttttatagtattagtatgtatcatttcaattctttttttttttaatgaatatattgttttactttaaaaatatttgttgagaagttaacagcatatgctaaaaatctaactattttaaaactaaaaaagattctgttaaaacacaacaatctgttaaagcacaacaaaatctgttaaataagcatttatatagtaggtaagatttaaaagagttacacctacatcatctttccataataacatcaaaacctattctagggacttcaagtccattattgaaatataaaacatgacaaaaatggaaaatatcattaggacctaacttattttctattaagaaaagaacacatggggattgctctttgacgagcaaatggagatgacgaaatgtgcttggattctccagtccacgcgcatttcagctaatgattttcatggctgagggcagggctgaaatccatccaccactgcattgtcaaagtcaccagaataatccataggtgctgcagaaacattttgggttttctcgtcatctattgacaaagtagaagtgatctctggttgttgagtacctctgcatcttttaagtgtatctctgagtgaaattccatcagattgtcttttgaaattacaatttggagatttattttccttccattgttgtccttttcgagtagaggtataattaatgaagaattaattatggtagagtgtgacatattcaaattttccttctgttgcatcataaccaaatgaggataaaaaggatatgtggaaattatgttagagttgttagactataatatagtatatgtaatacagcatatatatacgatatgaaatgcggaaaatgaactataaccatatcgataatatatgtaatgaaag

SEQ ID NO: 45717 - DNA, 1373 bp, Cannabis sativa
taataaattgatttctttaaagttctttagttttaacaattaacaattttgccctctaaactttcatagtactgattttgcccctttaaatatacttgttaaaaattttccttaaacttttaccttaaacttttacatttttcagaaagagtaaattgtagcataacctccagaagtgtagataattgcaactaaccaccaattctcaaattttgatggtaaaaccacctaaactccgaaattgttagcaaaaacaccccttcgtccaacagatcttgttttgtgcttatgtggctcgggagcccaatcgccaggtagacttgcaaatgccaagtcacaaaaatgccaattatgtggcattatgcatttaaaaacctaaaaaaataatttgaatacaaaattaaaattaactaataatatatttagaaatataataatatttataacggaagaattaaaatttaaaacagaagaattaaatcgaaggttaatgaaatttaaaatagaaaaagaaatgggtaaatgaaattagaaatcctttatgaatagaaattcccaaaacataaaacctaaaacaaactaacctaaagacaaagacgcaataaggaaacccaaaccagtaagacatgaatcaaagagtaagcaaacccaaactagtgtaagaaccccaaatcaatttttcgtaaaatcgaaggaaatccagaaacatccattgaaaatcaaagaatagcaaaaaggaaccagacgtcgttgatgaaatggcctttctttgccgaaatgaggaggatgctcctctagactacggtaagtgttggattttatttttctagtgttttttagggttttgaaaaatattaggtatgagtgttggttttatagtggtttttaattccagtagtggatgtaatagttgggttgtgggggtttgttgatttgtgatccatacaaaggtcaagtgggtagatgggatattaaagtattgcacttttgggcagaaacgaagtagtcaaaagctgttagggagtctaattcttttatcttctgtaataggaacatttgcacatgttttctttttcttcttcttttttttttattttttttttattttaacctgttcctaggatgtggggcctaatattgtttagggggttttgtcaaagtattggataaagttgtttggttttgcctagtatacatctatccttaactctgtcactttatattattcttgaaagtttgaacttagataatttcactgtgaaattattccataggggtttttggtttacctgttattgcaataagatgtatgagggtggccgaattacctattttgatcattgtaaggatgaagggttcaacaagctgcattt

SEQ ID NO: 45718 - DNA, 1199 bp, Cannabis sativa
aattattttttcgaaaaaataaaatttgataacttgcaccaattaaaaattgacatgtggcaatttacttaatacttaacagctaggtatctacaaaagttccagaattataactttagtattattgtcgcaaaaaattaaacttaggtatttatttgtaactgcgagttaaatttaggtatttataccgcaaattactcaaaagaaaaatatattttattatatctgttataagtgcatgtacaaattaatatagagtaattagcaattttatatcccttaaatttatgtaattatcaaatcgtaccctctataatatacggcttataaaaaatcccttaatacataacaagtatagaaacgtgccccaaccattaggtctttaattaacatttagctgttaatttattggcgtggcataataggatctgatgttgcattacaatttgatagtagttgaaaaatttattgtaatataggatactcctaccaacacgtttacttcctaccctaataaaaagggaataaattatttatttttctctgctagtgggcttgttaaggattgtgttggatcatctatggttggttgagttgaaacttcattttgatcagttcttatcttggcggtagaagaatattggttgtctttgtttcgacttcatgtgtctcccaattgtatgcagcatcttcgtcaaattttacatctagactaattatacacttgtttgtttctaagttatagactcgataaccttttgattgagtattatagcctaataagattcatatttcagttttctcatcaagcttgtctcttttctcctttagaatacaattgtagcatatgcaactgaagactttgagattctttgttggtggcttacctccactccaagcttcaatcggcgtcttattttgcacagctttggttggacatctattttgagcaagtagattgcagtgtttactgtctctaccaaaaaactttttgggagacatttctctagtagcatggctcttgctgccaccatacaatagtcctacttttcctttcgaatacgtcgttttgttttggtgcgtatccaacagtgaattagtgcttcatcccttcatcttcacagaacttgttgaattcattagaagtgtattctttacctctatcacttctaattgtcttgatgtagtgaccactttgt

SEQ ID NO: 45719 - DNA, 2100 bp, Cannabis sativa
tttaacatagtattatataaaaatatgatatataattcaaatcaatataatacaatacaataatatacgacctaatacaatgttccaaatgaacccttaatgtattctaaatggcttgatcatatatgacaattgtttcttcttcatcttcttataatagcttaaaagtttttatgctttaatttatgtttgatacctccatctagaatttaggtcgatagcaactgagcctttctttgattgagccaaaagatgtgaagcttgccattcctgcctgttaccactacctgtaggctctagagtctgtactaaatagtcttgttaaaaatagtcattagtttgtcgggattggattgaaaaaataatgtaatttgttcacctcaccgccaaactaaaccacttgatttgttgatatcagaaatgctcgcaagttattatacagttattctgtacacctttttcctatgcctcatctgtacaaccatcttgttattcattatattagccaattttgtaagatcttgttgatggaaccttaatattattttttttactttatcgtaaatttacaacaatgatttttattctcattcttgtttcttcattgatgacttttttcatgtgatatggggattctctctcgtttttcttttctaattttcaggtgggaaaaagtgattcaaatcttgattccaagaactcatatagtagttctttttgtactgcaaagtatattatgaaatcttaccatgaaagatatgaacagcttcataattcgcattataaagattttatagaacaagtgctcccatttggcttgtgtgacatacaatcagatgatccaaatcttgtacccaatcttttaagtatagagcgcaaattgattggagaaggttcccaccatcatctctcctaatctatgagaattagcaaactacctgctgtgttcgtactagctaatatctcttacgatagttgtggacttatttttattgagaggctgcctaatggggtttttgcagatccattcgagtttcaacatctccttcagcgcggtgttaattatgctttcatcttgtttaattaatgaatgtgataattacgggtatattattgttttcttgataatatattaggttatactgtttaatgtagtctttaatgacattgctgtttttggagatacgaacttggaatcaccttcattcctttccaatcgttcttctgtggaggttcacatgcatgttaatccaggtatcttaagtgacaagaatggaattgatatcaagataaaaattcccttacatgaaagatatgcggtaagtaaaacaaatgtcctttgttcctactcacttggtactctgtatgttttgccaatttcacaaaaattagtttcagaaattaaattttacagtatcataaagacataagctgatgattatgcatattgaaggggttacatacgttacctagttttgctgtactatctctcaaaaagaactttaggaccatatagttatatagagtacattatgaagtgttgttttaggacaattgaatgtctaaatttatactctaaatttaaaagattaatttcctcaatgcagcctacgaaagcggatattcacgagttgtattcgggaaacctgatttgttcctccggtgtagtgttggaaaaacatcactcgatcagagttgtttatacgtgatatcaaacaatgattccgaatcacggtatagtacaattatctggagaaaaccttagggatgaaggcacattctggagttgtttatgttttcacttttgtttcagcctttttagctgctcttgtaattatgttgacatccatattccattcaactagtagcttataaagagttcttacttgcttgataatttgacatgcattgtgtatcttttaacagcatttgaatgtttgcaccgttgtacatcaaataatgttacaaagtttaggcttagttgcaaaaaaaattggcattaattttagctacaattttgaatcggacattaatgtgtgtgtgttttaatcttattatccattccatacattaagagcattatataatatatatatatat

SEQ ID NO: 45720 - DNA, 1874 bp, Cannabis sativa
aactgattgcagaaatttagttaaaacccttcgacagaacaagaccctaaattaaaaacccatcaaccaaatatacaacccttaaatcaagtcgcaattttgatctaaacaaaagtcaaatcgggaagtagcagttgaagctataaaatcacacacctggtaattcttctggctcgaatttgtagacatcagtctcgccaataacattcaacctcaatttcttaccacaaatttttcttttcagataataaagcaccaattcctcgtcggtcggataaaacctaaacccaggtggacaatcatgatcgtcggaaaacaccatcgctcaaaacccaaaagaaaatcacaatccctttgttaggttcgtgatcaaagggaaatttgaaagaaataatggaggtgaaagagaagaagaagaagaagtacgtgatttagagagagaaaggggtttttctaaagaggagagagagagagagaagagtgtctgtatcgtaactactgaaattctgttatttatattcgaccgcctttctcaatagtcaacggtcaacggcgagcccgtgcttttactgtattggatcattttcacccgttttttcttacagtattgctattgggtatcgggtggtggtctcgagcaactttacgacgtgtcactttgtaattagttagcaatactctttaaaaattattatattaaccaataatgatattgaataaggttgttcatcaaaccgttcacattgcacaaactactcacacccagtgacagactaaattttttgatatgagggggcttaattgttataaaaatatttattatttactttacattaatattataattattttgtaaggactttttactattttgttatataattatttaactaaatagaagatatttaatattttttaacactaacttttttttactggcactattattagtgtgtccatctctgctcacaccgcatcacaccgtataaaaaatacagtttgatcttttatggtatggttgcaatttgcattttttccaaactgcatgatgtggtgcggtttatagttttgaatttaataatgtgattcaaacttcaccgcattatatattacaaaattattaatttttacaatataatttgatgattaatatatatatgtgatgatattaaaattttaataagattttcttttttgtattgttaaaattttatagatagatttttaaatttttattataatgttcgataattatggtagtgtaaatcgctaaaatcacaccgtactacaccatatttttacggtataatttttacaattttaagatctcgcggtgcagttgcggtttgagaaattataaaaaccgcacatgcggtttggtttagaaaaatgtcacaacccgcaacacctacaccacaaacacgcctattgatacgtaagagagttttaagcactggtgtcttatagtattttttttattattatcattttatttcattttaaattttaagatatgtgttaagcaaattttttttgcaaaaaagtatattaaaaaaaatatacattttgagcctacattttacaaaaggatttttttttattattaacaaaaaaaaaaataacaatattacaaaaatatttcaagctgaccaaagaaataaaaatacagtttaaataaaaaaaaaaaatacacaaataccacttacacatacctttaacctaggattcatgcttcctgggcaactatcgcgcaactatcgcgcaactatcgcgcaactacgcaacaatctaacgcaatcaaaacgaaaattcaacctcaaagaaaaccaccattaattatggcgatttcattgagaagacgaccagaatcaatc

SEQ ID NO: 45721 - DNA, 947 bp, Cannabis sativa
  modified_base (912)..(920): a, c, t, g, unknown or other
aattataaaaattacaattacaaactcacaattgtaaatacatattattctattttttgtttgttctttctttgttgtccttttggtgattgaaccaaagtagtatttagaggtcaccagaatagacattagggtattacagtgcttttgtctactcaaaaacttttgtattattttggaaagtggttgctcgtgtttcttccagcaccacccttaacataaaagaagtgaatctactttaaagaaattataagtatgtaagtctttattctattaatattattgtaatatataatttataatcttcaattgaatatatgttaatttgttgttctatattattcctaactcatagtttttatgagaaaagtttaaatcactattacttactagaaatgacagatatattgattaatttttttatattcaagagttttgttgacagactagatttaattataaactgtattgaggaaaatataaattagaattggattatattttatttgatcctgggtatgtaagaatcaactgtaaaaataactatttaaataagcataattttattactaaataataatacgtataaaataaattatattaatattataaaaaatattaaagcatatataatatataaataaactagatatagggggaagaaacggaaacaagaaaaggtcacagactcacaggtaaaataatctttgataatatgtaaatcaataaaaaaaattgaaaggaaaatcaactcagttatgctgacaaaaaacatggttaatatttctggcacaatattacttgccaaaacaaatgttagctaaataccagccaatacgtttaagttatttctgggtaatgtaaaatccaaataaatgaaaaaaaagaaagagtaatttgcggtataaatannnnnnnnnaactctcagttgtaaataaatacctaa

SEQ ID NO: 45722 - DNA, 2238 bp, Cannabis sativa
cactagtttctcaatctcatccttttgcacatgagggtaacgatagggccgtatactgatcggggctactccggggcgaaggcaaatagcatgatctcggtgccgagggggtggcaattggtttggcatgtcaaagacactcgagaactgctgcaatagctccgaaatagcggctggaatgtcatcctcaacccccacggtggtagtgtgaccaagctccacccataaaccttcatgttcttccttaattgacttgatcatggtctttagtgaaacacgagtcttgtggagggccggattaccacgcaactccacggtttggccacccctcttgaatctcatgaccccttccttccaattatggtaagtgtcacccaaagtttccaaccattgaacacccaatattacatcggtgcttcccaaagctaagggtagaaaatcatcaatgatttctaccgtttgtaaagagatgggcactcctacacaaactcccgctcctttaaccgcttgcccagtacccatttgaactccatatgattccgtatctgaaatggggagtttgagctgtgtaaccaaggatgtagctatgaagttgtgggtagctccactatcaataagtacagtcacctcctggccatgaacactacccaccaatttcatagtttttggagaagtcaatcccaccacagaattaagtgacacttccaccacttgagcttcagtcaacccttcctgttcattaacacccaattcctccatggcagtcaactcttccatttcttccaattcatcttgcaccaaaatgatttgtaattcaggagatttacattgatgtccccttgtccatggtccatcacacttgaaacaaactcccttagcttttttttcttgcacctcagtttcagtaagtctcttgaatcctcttcccaactccatttctcttctctggtttactggagttgaagcacgataggtgttattttgtgcaaatgggcttttattaattgtcccccactgccccattaaatttctttgagtgagcccacttgaattaaaagataaatttctagttgggcttatcaatttactcggcccacctccaaaagcccgaaccacgttaggattggcttccactatctcagccaactccattgtcttctccaacccaaccggttcaaggagacggagtgtcccctgtatctccgaattcagccccttcaagaatgccgattccaacagcggctccgccactgtccccaacgacgcagtcaacgcttcgaattgctgcctgtattcctgaaccgtggacgtttgctgcaacgccaagaaccggtcgtacgccgatccttcatgggcagggagaaatcgccggagaaggaggcctttcaattccgtccaggtgcgaatttcacgtctccggttctcccatctgaaccagcgaagtgccggaccttccaaacacagcacggcagcttccagttgctcctctgccgtaagcctctgcaaaccgaagtatcgctccgcccgatacgtccaatcgtcgggatccgaaccagtgaagagaggtaattcaatgtttctcgggcgaaactcagatcgtcttcccccataaccactcatctcctctcgattctggtttcccgatccactagacccgatcggaggttgaacggatctcccaactggacttcgtggaccatcggtgagctccgtagccattctcgcctgtccgcggaggagtaagtccaacttctcactgattacggcaatgccgcgttcatgggattccaccctctctttcatcgtatcccaatccccatgaattggtgactgtgattcctcttctcccgactgaaccgattccaccaccttcttcgagcttctcgtgttcgtcatcaccttcccggactactcgctctgataccaaattgatatgccctgcaacctcaattaccaatagagcatatagacagtaaaataatgaagaaacatccagtgagtgttattgaattaaatggcaaaaagattacagaatgagtcctatagaactcttgctgcagagaaaagaattctcaataccagcataaacctctaaaaccccacaacagtgctatatcaagcttgcaacaaactcactcacaattacaaaaatacccaaacagtaaaagaccaaactacccttacgctttagcattcttacctctcctagcataagtgaaacgcaccttggttctaaca

SEQ ID NO: 45723 - DNA, 1210 bp, Cannabis sativa
taccttttaacatttgtctgtattattatacttgtggctccgttcccaaggatgataatgcctatatttataaggataacattgactttatgtagtgcttttattcttatgttcacatacatatgatttcataatcaaatggcaaaaacagaaaaatagtagctaggtatatgtcaaagttggttcgacttcctctaatataaaattataaaataacacacacttttacaaaagtattaattattatctttttcattataaagcatatataaatatttctccttaattatagtacttttaaacaataattgtaacaattatttagtacacaaatgaatttgagagcatgacaaaaatccagcccattacaatattatgtataagttaatttgttatagtgactttttcttattaatatatatatataagtgcatataattgatatagtaatgcaaaagaagttctttcttttatgctcaatacttggatatcatattcatagttattgtttttgaatcaacacgcactactttctgaagagattaaatgagaacattttcttaactttttttttttttttctgaatgcagttgctgagtaatccttacatgaaaactaactcacacaaggtacgtttaatcaagatatagatataaattaaaaataattaatattttatttaaatttttacattatcaagttgtgtctcttatagtatacaacttattataatatcttcaaaatataatgtttgcagtaatatgactcttctatcacattttattatgaaagaagtagtagatgataactgataaattaatacaaatttaaatatttttaactatttttatgttaataaatgatagaataaatattttttctttttataataatttatatttttatttttagttttttaattattgaagtaaaaaaaatgtaaaaaatatttatttgtatttatttatcaactatcattcatctatcttatttcataataaaattgaaaaaatcacattactctaaaaattatattttatattattaacaaattgtatgatatacagtacacaaaaaaaaataaaaaacaaggtaaatatatttacatttatgattaatggcagtaagattggattgtgctcaactagatttatgggtcatcctcccactaagtgtacatgtggaacccacaatatataatattgtagtg

SEQ ID NO: 45724 - DNA, 2923 bp, Cannabis sativa
  modified_base (2741)..(2744): a, c, t, g, unknown or other
tagtataattgcaagattaagcccacaaataaaagcagggcacgtgacatttaaaaattttcaaaatatatgtaaacatgccttataaatttatatgtttataatatttcaatagaaaattaattaaatattaattattcaaaatataatgaataatgaacatttatttcttaataaaaaactattttgtttctaaaaatttaaactgtttagctttagactttaaattttaggcaatatttatttcatgtacaatttttattagtagggacttagcatattttgtcttgtatactttaattttgttataatataattagaatgttttttgtacttaattttgttatataattagaatgatttttatttcatagaaactatttattcttataattagtttataattgtttcaaaaaaaaattaatatataattaaatactaaataaaaaattagtatacattcagatttaaataataattgaaatatattcagagataggtcccttttctcttcagttattaaataaaaaccgaagagaaaagtaacatttgtcttcggttttatataataaccgaagataaaggctctttttctagttgtgagggtttatctttttaaatttcataaaattatttgttttgtgtttttataaacatttttaattattaaatttttctaaatcaatgttacaataaacataaagcattagcactgttcttattttaaacaaaataaaataacaaaaatataattaacattcccaaatattatactcttaattaacatgaactacttaaaatatcaaggtatgggtttacattatttatttgggtgcataatgcaccgtgcattgaaagtgtgaaaagtaagagagaaataaaagatgactcctcacatgcacctttttaattgcttaatatttctaaaataaaatagggttaattaattttcaatgcatttacttaaacccgtggcttcctcataatatattaataattttgtttgggaccattcatattaatttaacattgatggttatatttatttatttttaattgttttaaatccttattctcgattatttaaaatgaggtcggatacataattttcaaattagtttattcaaaagataatttatattttcaataactcacaatcattacatgttgtaatcttttccacttcccataatttacagccacctatttttgaaataataaaaaggtgcacgtgttgagaataggtattattaaattaatcttctccgaggagatgtcaccaataaaatattatattaattttttaaagaaagttataataaaacattttcttttggagaaaaataaaatattttatttgttaggaatactaaatgaacatattgtatttttaaaaaaactatattaaaaaatatatagaatctcggattaagtaaataattttgattggatgaaataaaaaaaacaaagaagaatagaataaagaacaaagaagtaatttcattaatggagaaaaaaaaataaaccaatctacttatacatttttttctaaataagtttaatgcacaagtttaatccaactcatagtttgtcagattcattgactcactatatatgatggaatgcataaactgtacatatctttctttgtcaccaccagtcgcgaaatcatgtaccattttgatatcgaaatttgcaatttcaagttgttctttccacatatcgatctccttctccaaaagtccaacaagacttgtagacaaatcttctcgtttcttttgttgctcgatactacagttgataacttcaacttcgaatccatcgtgggatgtggtgagtctcggatttgcaaaactcttgagaatacccaattgctcttttagcgcactgattatgtagtgaataggcagctgaaaaagtacaaattgatctatatccatgactgatgaacaacagtgattttaggagacaatataaatgatattagaagagaagaggagagggtacaatagaagtttgtgaaaataattgttcgaggtggtatatatatagaacccattcactttaatttcgaatttctaatatattaattatttaaattgtaaccataaataataccaaaggttgcatatcttcaacatgatatataatttttttacttttattttccattattatattgaaaatttaatttaaattgatttctcctacctatttcgtggattgtactatgtttgggaatttgaattatcgaaattctttactcaatcttgtgtccattgaataaaaaattatttgaagtttatttttatttataagtaatcttgagaagttacaaacttaaaattccaccatttaaaccacaaatttcagccaaaaaaataaaatggaaattgactaataattattttaaaaattttttccattaattacgttggtctttattttattgggtaatttttattaattagattctatactcaatattagcacattcaattaaaaattgatttacctttatacatatattaatttttaaataaataggacaaaacaaggttcctcgtccaacaaaaaaagatattgtcatacatagaaaatgtgtatttgtcttcccaagttcatcatttagaagctattatatttaatatattaatttatgaatataatattaactttttttttgacatgatattaacttttagagaaatgctaaagggcaccactggtgcctagcaccnnnntacgtgtcaatatcgctattggtgcaattaaatatcgggtcccatatagtttaatataataatttttatagagtatcgctagccaattacaagtcgacacatttagaaggtactaggcaccactggtgcccaatagcaatgctctaactttttatattgaattagataaaaaaatatac

SEQ ID NO: 45725 - DNA, 5300 bp, Cannabis sativa
agggcataaaacccaacaaaatagcccatgaaagactttatagatatggtagatgagatcattaggattcctagcaatctagtgttatcttcagataccattagggtggatccttttctagccatgtcgtttccacatttatgagaatatggtagcttcatttgttggcacaacatgattctttttgctagtgaagaaccttatagctgttcactgaatggttccacccacatgtatattttttagaatatgttgttgtatgctaactatgattctgatttttctataaagagcttgcttgctaatcatatgattgttatgtttacagatactcttgaagcaaagatgtggaagtctttgagtgaaaagatcccaaaagccttgccaagatggaaggatcctaaggaaaagggaagggcaatgctagggttcacaaaacctataaattgaggcctttgtctaccttttccccttcagatgtttcgcaagttcatcctccgacaaaggtgaacaacaatccataggttcgtaagttcccgctggggcaaatagaacttcaaccatgactaaagatatttctagggaactggttatgtttacgagtggcataacccaagttggccatttcaagcaacaaaccctggcaaaggcttcacttctacttattatggatggaactacccaggaaatcccagagaccaccattgcctcgaatgagagcttggattggcatatgtttcccaaaaaaggtgtttccgtgacaccaaagtgcaagactcctccattatctgaaatggacacctagaaggctaagtctgctctaattaggtccctttctcaaggaggggatggtgatcttcggggatctactactccaccaccaccaaatcaatcatcattaatgtcaactcaacaacaataatgacaacagaaataacaaggacatcaacaacaacaccagcaaaaataacaacaacaaggctagtaaaaacttcaacaaccaccacctaaacaacaaagtaaacaacactcgcaattaggagccgttgttccttcgaaggccaaaccatcctcttccaactagggactcagaattgtcacctctttgcctaaggttctacccctgaactgcaattttccactgaagcccactattcttggcgacaacattttgacaaggctaggcaaagccgagaacaatttgaggaaatgccacaaaaaggagaggataatgctcaaaaagagaccaatgttttgagggaattcacaattctgttctattaggaccaatgattgacaaggaggctctgtgcaagcaaatgatgcccaaactcaggagagaagtgacaccttttgctgcagagcttttggataaagtgatggggcagtgcaagtgagatgacttcaaaaagtgggcgatttgcagcagcagtgatgccttcactattgcttaagattcaaaacaataggttttaggggtaagttttgacttttttgtctttacttttattgttgtgtgttgttatcttatgttgttttgttgtaccagatggccttaattgcagagaggaatccaaaggaagtaggggccttgatcatagagttcgaataagctcatgccaaaagtcagtcctagcataccaacaatagggctttacttttttatcttaagaaggctaaatcccaaaccattgttgaagtgaagaaattcaaaaaagaggcagaggttttggtaaatcaagtcaaggccgattgtaaggctgaggatgaattctatcgagtgatagaggagagagataacaaggatgattggttggtgaaccaaggtgacgctctaaggaccacactccaagaggtaaaatctttgaaaaataaggcccatgagaaagcttaggtgattcaaggcttgttgggaaatgtcgaggatctaaagagggagatcaaggacttgaggaaagcgaaagaatctctactggtcaagtacaatcaagaaaatataatcctatagggtgttcgcttaaccattaatgctcgtaaagacaccataaagatgctatagagggaagctactcaccaaccagccaatggtataaaagattttatcgccatagcggctaagaagagagctagtgagactactaagcaatctatctaggatgctgccaacatagaggctaaggctgagaggctctatcttgatgtcttatttaatgattcttcatagtttgtggagaaaatccgaactttctccaagcatcttggatcagataaggcagaatttactcagagggtgcatcccatcgatgataacacttctttagaaatatgaccttcatagtgatggtgatgagtccatcgagggattagctagagacttagaacttgaacattctgttgaagtggtggtttcttcgagaaattccacctaggaccttccaaaggataaacccgaagactctatggctctagctcaagatgcacctcgagctcagacccaagtccaaatccaagagtcatctaataaacccaatgttttgttttatcttgcatctttttttctttttactttaagcctatttgttaaaacactaaattatgccttaactgcgaggttgtatgtaataacatagaaaagtgcttctctttatatttatgtatgttcattttgcttgccatgcctgtgtttgctttttttcctgctattacatattcactaggccattcgataaaatgccatagcattttttgaagattttggttcgaatgtcatgagcttgatgcccttagacttttaaactttgaaatcacttgttgaatcttggaagtttgcaaactgaaaattccttttcttagatgtcaacctgttcaatgccttgtttggtggaacttgtaaacttttgcgaagagggactataagctcgttcccaaatgtccaaaagagttacaaagcttagctcctatctatgtgtttctcgattagctacctccagaagaatgttgtagcgctttttatcttcaggatttagtaagagaaggggcctatatgtgtagtagaatccaagcaaagtttctcacgcgaaaacaagactggacacgtattaacacttaggttgtgcttcctcaatgcaaagtaacaaagcttgcctagcatcagataggtttttcccaaatttatgataagagaattgttgaaaatgcaaaggacttcaggaaaagcttctttttctcactccttataggaagcctatcagtatggtcagcaaactagaacgactgcaataagattcaagcaatgttcctttcttaggaaaaaggctgaaaaacatagtgattgtgcttttgtggaagccaagttgaatatgcaatagacttcaagtaaaggctgaatatatattgaaatttaagaaacatttccactcaaaactaagaatgaaaaccaagttgaatatgcaagagacttcaagcgtgggttgaaaatgtattgaaatttaagtgatatttccattcaatagttttatgaaaatttaaaaaatttaaacataagtaaaaaaattaaatacaagtaaagaatgaatacaagcaatgagtgagcagtgtatgtttttgagggcacatatctaggtatactactacccccaagtgagctaggaagtttagatatctctaaattcttgggcacttgtttaaaacatagcatgtacaagaggcaaaaatgtaaggtcttgagtaaatttcttctattttcatttgattatacctaaaggtttacattaagagggagaatttacaaaggattacatataactcaaaggaatgttcagattcggatacccccaacctattggttgtatcaatgtaaacaattttcattctaggcacgacggatctctgatctgtccattctcttaagttaaaatgttttatttcccactttatgttgtatctcatagggcccttcctaattagctacttttggctcttgtgaagttgagaatactctcgtcaagacaagatttccaacgtcaaatgtacaaattttgacttttgaattaaagtgtctggaaattttgacttgtagatctttagttgaccttgcaactattcttagagatcttcatttaaatctaattattcttgtaacagagagtgattttgggttgggtcataagtatctcgttcatgagagggaatcatggtttctactgtaatgactgcttcacacccataagccatcgaatattgcgtgtgccctattgatgttctcattgtggttttgtatgcctagaggactcgtggaagctcctcggccaatgggccttataagcttggagtttcttcttcaacgttgtctttaggatcttgtgcacagcatcaacttgtctattttcccatggtctggccacaactaagaagctcttcacgatttcatgctagacatagaagtcattgaagtgatcactatcaaattgcttcccgttatctgagataatctggtgtggaagtccaaagcaacacacaatatttttgatgacaatgtctagggccttctttgaggtaatcgtgttcatatgctcttcctctacccatgtggtgaagtaatcaacatcaaatatggcatacttgactccttctttccctgtggggagggatcccactagatcgatacccccaaactacaaagggaaaggtagtactcatgactgtgatctcagttggcggtgctcacaaaaccttagcaaatctttggcactaatcacacttccaaacatactctatgcaatccttcttcgtagtgggaaaaaattacccctgacaaagggtctattggaaagacttggttgaaatgtgtgatctccatgaaagcctccatgaacatcgtggatgatagcactgatttttattctgccagtacaccttagatatggcacagacaaccggctgcagtaaagtttcccatcaaatatcatgtatcggggagcttggtactagaccttttgggaaaaaactctgtaagtcagaagctcccccaagtttaggaacttataaatggggcctatccaggaattagaatgattcacaatgacatttacccctgcattgcaatacttggagtttttaatcggccaataggcagcagttcatattgtatgatcttaaggtttgtggcgagttttgctagcatgttcatgaatgaatttttgtatctaaacgtttggcagatgttgtaccttttaaatctttgcaatagtactcaagacatcatcacctaaacaattattttcttgcacttggtattagat

SEQ ID NO: 45726 - DNA, 1790 bp, Cannabis sativa
aaaaaattatgttgattacgaggttagtagagaattcataccaaaagattacaagtatgaacagttcgtacagattttcctctcttcaatggtgtccgaacccacaaaaataaccctgaaaatctagtaccaagcaaaaaatagaataccactgattaaaatattcaacgatgcgagcctcttctagacaaaagtacaaaacacataataataagacaaaagtacaaaatacatttactaaattaacaccacttggagaagagaagctactaaacaactacacatactcattgaatttggaggtcagatctatatttcagcgctttaaattcttaaacataatcattctggtactattatggtttttctaacatcattgtaggattgtcccactgttgttctctaaatttaataaatattggtttaaaattatacaggttaaatcaactactgattatttgtttgaggtgaccagaataaaaaaaccatgctcaaagagagaacatgcccgtgcaatagtttccaaattgatgaaatgccttgtggacatgttgtggatgtgtggaaggaaatgaacatggacccgtacaagtactgtttagattaccacacaaagaaaaattggatagcaacttataaaggaatactgtacccaataggacaccaaagttagtgggatgtaccgcaatatgtgaaagatataatagtcttgcctcctactgaaaagatgaaatctcgaaggccaaaagaaaggagggtgcaagctgttgggaaaagaaaaaacataacaagtacagtaaatgtggggagctagggcacaacaagagaatatacaagaaaatgcatcaaagataagaaagaacaagaacaactacagaacaactatgcaacaacggcaaaaaaactgaatatacatttgagcataggatactaaggaacagaatttacatacaagttttattatttttctattaatgttaaagaattatgtcaatgatccgtgtacatactttattggattttaaaataattggatactacatgtaattaagatataaatgatttgattaattgtgattggatttttattaaatgatattgtcaatgattcaaaattgagtagaacaaaaatgttaaaaaataatataaagaaatatagaaatacaacggtaaaacaactctaaaataggcataaaacaatcacaaaataaacaagaaacaataatatatacattcaagcatgaataatccaaacaaaaatgtttaacatggagaaaaaaaaaagaaaaaagaaatatagaaatcctacatattgtctagaacgtgctgacaccaaaaaaaaaaacaacaacaacaacattaattcaacaagatatttaaaaaatcccaaacaactaaaaaacactagggttgtgatccaaaattgtagatcattactttccaacgggtgatgaagactcgagttcactatcaatgttttccatctgcttattcaatccataatgatagaatgacactgctaagcgatcatgatgaactttcacatcaaaatcatcagacaagatgggattgttgtcaataaattacttgacaaatgcttttacaaacaatccacagtcactacaaaataaccatggaacaacataaaaatcttggaaaaaaattgaacaataatgaaaacaaaaacatagctcaaaaaataaacaagataaggcatgaggaataatttacgatgtgacctgctcagacaacccatcaataggaacaatggaaaatggttccatagtgtt

SEQ ID NO: 45727 - DNA, 2920 bp, Cannabis sativa
aaaaaaaatgtattttaacaaaacaaagaataactaaaaacaataattatataacacaaacacaataacataaaaataactataaaacaacaaaaaaaaacatatataaagtaatagaaaaagaacaaaacatcgtaatccgttgcaatatgcaaaacaatatcaactccttactatgttttgtattacgaagttcttttttttcttatttttgacaacttaattatctttttgtactattaaactattttttcatgaaatttatttgttataacttcatattttcaactccttttataataaaaataataaaattttataatttcaaaatgtaatatacattataaggggtaatatatcattaaataataaaaaaattaactaaataacaatataattttaatatgttaatatctactagggcacattgtgacattaaaaaaaattactactaaaaatttgggctttagagatgattttttaggacatacaatgtcagttttaacgaaattcgcgaccgatattattctaggggatgctaaagggtatgaaattaccatagtcatagagtccctatggcatcggttattttatgataatcgatgccataagggtgtttttctttccagcttaataatagatttttttttttttaaaaaaattcatatatattattttattattaatatatttaaattaactataaattaattaacataataaacatgaataaaattaaattgaaaagttaaataaatacatatttacattactctaagtaaatgtattacactaatattattctaaaattactttaagtatttaagaattatctaaatatgaaaaaagacattcttataaaagtaggttaaaaaaatataactcataccaaaaagcatatccttgacttttgatagagtcaattaacgtcacatattgtacaccttcctcagttatgataatgtgtgtcgagacgtcatagaggaacattgcatgaaattgcatgaaattttagtaaaaaaaacaagttatatggaatgaaataatggacaatagaaaaatataaatctaatataatgaaagttgaatattgtcatttgattacctttttggataatttcagctagataagctccatgagaaagtgaacatttttggtgtaaagctcagctgataaactttaactgcatgatggagatcttggattaatgggtttgactctttttaccaacggagaacttttgagacttaatcccttctatatggtgcttagatatttttgtattaatcgagtgaccaatggacataactttaaattcttaattagagtaagattattaaattaaatatttttgttaaaacataaaaaacgaaattactaattagtaaccaattttagtatactaaatataatttgtaaataactagtaattaatctttctctaaattactaactatgtaataatcatcgctcctcgtggatatatgactcattacaaaaattaacaaaaaagcctaacaaccaagtttaagagacatgtaaatcaaataattttatcctaactctaccgaaattttagcaatataacagctataattgaacatcccaaaataatttaaagttcttaataacaacaaaaaataatccaaaataagataaaacaatcataccaacatttaacaatattaaattttaaaacataaaaacaaaataccaaaattaatttacaaactagttactaattatataatttataattaactagtaaatatttagtactaaattactaactacttactcaatctcaatgtgccataaatctcaaacaagatacaatattttaagagataatcactaatttcaaactctagatatttttttatgtctttattgattgagatgcataatcctaagcttctgaaaaatggtagaattgagagaagaatttctttcctattactaactagtatctaattataactagttactatttatataatttgtaactaactagtatttaatattataaattagtaactagtaactaattttagtatactactcgattaccaggtgcagcagtcgatgaggtgtctctctcaccaactcgaaaaaacctctttaggaagtagtttcgtgattagagcgataaacttctctaatccgctgagacatgttatctctgatgttgctgctcaacgcagttgctttgaatgtgcttccagttttccatgaactagtgttgaaaccttgcttatcgagagagtctcacatctgttgttgcaagtcagccatagtttggctgagctgagcgacctatggatcaatttccttatggtcctctatctcaacgtgtggctctccaagtgggatctagtcgctggtgccagtcccgaaagcagttggtggtggccttgaggatgagttgaggaaccagttccaatgcctaaccctagtgcctagggcgcagcagtagtcctggttctaactctgtcaactactgtgcccccagtcgcttggctagttgctggagcttgtctgtcaacacttgtagaaagtgttacaaccatcttgattagtaactttcttaagttgtggctcacaatgaaagcaccaaaatattgactcagaaatctagactggaattctaagccacatccgctcgctagattggcaagaatgaataagtagttaagtatttataagagagactcaataaatttatagtagttcacttcaccgcctatatcgttatagtaatgaggctacatctacttcgattttttatttctcacaagatggtttttacatccatagactaagtttcaaaaaactccaaactttataaagagaaaatctagagagagaagctctgatcttgtgggtagttttctgaatgtgaaaaatgagctaagggag

SEQ ID NO: 45728 - DNA, 2240 bp, Cannabis sativa
tatatatatatatatgtgtggatgagatttattgctctttaaaaattattggattaataaactatcactctcttacaccctattcctctttggaccccatctatatatataatcacccaagaatggagtccaaataaacacgaaagctatatgtgtgcttctctttctttttaccctaaatatatcaacaagattttattgtatacaacatggtttcattcactattttgtactatttctcatatatatatatatttgcttttgtatgttaaattataaataagaaaggtacaatatattgttctgttttgtattttgcacataattttttttttgttaatttattttatatatatatatttacatattcatcatcataacaaagagtgatggcattcgtcactatactattcttacgtatttaaatataaaattacttttagtgacatatatacatatatataaaaagtagtgatcgatgatatgatgatcaaaaggtgaaatgaagttagattctattgcttgatttttgttgcccataagtttatgtatgctctaataagggaactgcatcaatatatataaatatatatacatatgtatatataaagccactttatataagtttctttattattaccacttcttaagctatttcacatcatcacatgtgtattgagatacccattttaatctattttaaaagtggtcgagactatagtgtgtcatctcaattcagtcaattatttttaaatcatagatcaaaattaaattggtaaaataataataaatataaaaaaaaacagtatatgcaaacaaataataacaaattattttatatttcttttaaaaaaatatattcaatgtcacttctcttttgttattttctgaacagggctgtattcaattaaaaagttatttaatttttttatatacttgcaagtttggtatatatacataattatgacaactatatatacgtacaatatgattgtgaaatatgattattattaaagaaggaatttaaatcaaattaattagatcatttaattgaaaggtccgtgatatctatattgaagaagatattaattataacattaactccatccctatatatatatatatgtatgtgtgtatatgtatatatatacttttttattataaatgatacatatgattcatatatagctttttagaggaaaattctttctagatttgcatatcacgacattatatacgttttatactttatttattaattagtttggtatataagcaatatatattaataataataataataataatggaagaggggcatctccaaccccatatatgatataatataagactttgctttcacacacacaacccatgatttttgaatcctcctaaaagcaattgatttcacaaaaaaaccagtaccaattatggtccttttggttaaatttatactattaattgtttatatatatatgacttaaaagtaaaatttgtatattatttatttattttttgtgtttgttggacaattaattaatatattgtttaatagttgaataaaaataatttttgaagtatttagatttcacataactttgatttattaaaaacagtaattcttattatctgttagtgtgtgtgctggatatatgggttcgggaagtagtggatgggtagaggagttatatctcagcaatatatatgcaacagttcagatagaggatatatatatatgagggtggggttgatcgttgacagatggtgccttgatattatgcaataatattcttttgtatcttgtagaaatatgtgaaacaacttcaaacaaatttgtttctttattaaatttatcatgaaatcaatattcaatgagttattgtaacgccttactaatttaggtatactagagtgttttttttaattattattattcactctatgctaattaaaaaatttattaaaaaatgtgattacaattatagtaaataaacataaagttgtacaatttcgcttagcgaccatctgttttgaagattcgaactttctaattctaagtctaattgtttcgatgtgtacaatcttcattcagttttaaattcactcttgctaacctttgttttgcctttacctacacgcatgtacgtaactatatattaagaaaatgagaattaccctatatattctttttttaacttttttttttttttaaatttacagtttgggtttctaaaatggtt

SEQ ID NO: 45729 - DNA, 2421 bp, Cannabis sativa
tagaaacttcaggagttgaaggttacaaccctgagcgtcccacctttcctccttcttttggtgaggcgcctcttggagggagtgaaggtggggaggaaacttttgttgatgcgataggcctctaggaccttgtgtgagtccattcttcttttttatttttagcattcaattttagtgtgttagttggtcgttcttgggcgacatttcgatgtggataagtcttagtagaatgtgtttagaattatttttttagttaaattagaaattatttcaaacttaataaaacttcaattccaatactttatttttttttattctagtttatccgttatcgcttgactttttaatacttgcacagtgcaacatgtcttaagaaagtcggttaatgggagtaatgtcactatttcattaaagttatcattaccatgagagtacttacacagatgtgaattttttttgaatgctcgcttaacatatggctctcgtataccataacataacctatgtgccccccaagtgatcaaagaagtgccttcattggttacatgccataccaaatccccctaaagcatgaatcttgagtggtgttacacctgtgagaactctccacttatctaagaatttgtgggtggcaatgtttactcacttaagaaacaacagaagttatctcaagaccaactcataagatttactcaacgcttagagagcgtcgttaggtctgtgagctataattgattaatttagatgatgtaccaaaaaaacttttacttatactttttctcattaaattaagtacaattacattactgtgagctaagttgaaagaaaaagtatagcttgatgtagtagttgcagaatctcttcatcatccaagcttagctgaagtgatcctcactatgctaatgccctgttcgacttttagcataggagccataccttagtgatggacctcttaacctagggacaacttcatagcatcttgttaattaaggatgatcgattcacttacatgaggtaaggtgaatctcactatgaagtgagctattttaaggaaatttgcttttatttgtagtatcgtcatagatgtaagctatttcaagaccttgctaccggccctagattcaagttgtagtcatagtgtgccaactagtaagttttgggttcaagtgcttcaactatgacatatggtccttccaaattacgtctgagtactcctattgctgcatcttttatatttaggagtacccgtcgttacaccatgtctccatgcttaatatcccatctttaaccttagagttgtagtgttttgccaccctttgattatacgccgccttactaagctcaaacctttctctgatctctttaattccatctagcgattcgacaagcagctagtgattgtttgttcgtcgtatgtaattcatcgatgggatggaggtatgagctctttgggtatcatggctttgtacccataggttagagcgaagggagtctaacctgttgttattttttctgtagtgcaataggcccataatacttcaggcacttgttcaggccaattcccttttgcttgctccaggcgcttctttagcatatccttaagagtttggttgaatacttccacttgtccattaacttgtggataggaaactgctgagaaactcttaatgattccatgtctgatgtagaaattagtaaagaggttgctatcaaactgtgttccattttttgacactatcttctatgggagtccaaatcaacagatgatgttttttaccacaaaattaagaactttctttgatgtaatggtggctaagggctctactttggcccatttggtgaagtagttgacttccaccacgacatatttaactcagtctttccccttaggcagtgagcctatgaggtcaattcccaaaaaataaatggccaggatgtttgcatactcttgagttcttttggggcaactctgcatattttgcagagcctctagcatttttcacacttactgacgttgtccattcagtcttcagtcattgttggcaaaaagtaccttgtctcaagattatctttcagaggctttgccctcagcatggttgccacaaaagccctcatgtacctcgaccatgaggagctcgacttctttcttcatgacacacatcagaaggggcattaagaagcttcttcagtacattactctgtccatgatgatgaagcgagctgctttctcatcaatctcttagcatcgttctggtaagttggaagaataccttgttctaagtaccgtgcaattaaggtcatccatgatggagtgtcgttaatcattaggataggctttgagtcttcattaatgctccatttggtgacatatttgacacgaactacactaagagtgttataatctgtagtgctagcaagctt

SEQ ID NO: 45730 - DNA, 3489 bp, Cannabis sativa
taatgtactttgagacccatctaatgtaccacggaatacattccgtgaaagtacatcacgaaacaaaatcatatccctatatatatatatacaaatttaattatactatacatattatatatatacgtattagaaaatatataaaagggaaagtagcgtagtcggcaggggaattcaaatgatttgctaacaaccacagaaaaacgctgaaaatatggagaaaatattacatatcatataataataatcataataataataataatcataataataaaaagataagtagacccaaccaaacccttttcctcctatctctctttctttgtcaaattaggagaagtaagtacaagatttatatttatgagtccagaaaatggaatgggatgacaattttctacgtgttaatattactattataattaagtattgagtcagcttaaattaaagtagattaagccataagttaagataggataaatttgcgccccacttattttagagtctcatataaaaaataaaggttcttttatttttaaacttcaaaacaactctttttatatatttttttataaaaatccatataacaactcatacataataacctacataaagtattggagaaattaatgtaacaacctaaaccataaataaagaaaattaataataattaattaattaaaaactgacaccagtgttagatactattagtacccaataaaaatgttcaataatttaagactatatatatatatttatatatttgttgtcattttccttaataaatgtcactatttgttttcctctctctataaatactttgttcccccttcttctttctcatctcattaatcaaagacacacacttcaaatggagaaacaagaaacaagtatggaagaatctgtaaagctcaggagggatagcaccagatcatcatcataattatgatatatttatatttatatatatatatatatacataattaagactcatcatcatctatataatatatgtctctagcgctatccatcctgagtttcatggcttcttcttactatatagtgctttctctctctctttcacacaaagtcatttttttggttggtattaaaggaattaatattactcatttaattttattcattttaattctctctatatatatacaaacttaattattattacattaatgagtttttaattatgttgtttagattgattggtgaagagatctttctcaagtgtttggccttggcgagtagttattatctttttttttttttttgtgattaatgtttatttaataataatattgttaatttgtttgttctttttttctttattattatttaatagatttatttgagaatgtactaggatttctcacttcaggatcaagttggaagctggaacatataacaatggaactttggtcaacacttaccacaagtttaaggggtttttttttcgatattattagacggttttatcaaaatcaaactattctttcgtaatttctgaatctccttactgattattttttttaattttcgggcaattgtttgatttggtggacgaaaaaataattattaaaacgttgtagcaacacaaaaatgtaagaattgttcaaaaataatgtatgaatagtatcaatattaggtattttatttcgtcaaacttgatgaatatattaatttgaaatgtattattattttttttttctttttattgaaactagcaattaattcaatttattacaaattcttgtataccactttgtctttcaatctatttacaatcaatattgttttgtatgcaatgtaacacaatggatagttttgactttatgattaccaaaagggctctattccacatcacataaaacacaagtattgaaagtcataatataaacttctcttcttagattactcactttgcaacttgatgaaaaaataaatggtcgcgagtttctttttcaagaccacaaattagagaagggaaatttgatattcacatattcttaaaaattttcctctaaactcataatatttgatatttgtgggatatgatacattttataatatccctaaaataccccccatttacattacccccctctcttttcttctctctttatttcactacactgtcaaccatcaggctccatcgggcccactatcgagcccatcggacccatcgggccatatcaaattctattttttacacatgcaatcgggcttcatcgggcccactatcgggccatatcaaattctattttttacacatgcatcgggccccatcgggcccaccatcgggcttttgtcttcctcaatttttttgtgttaccatcggaccggcatcgggcctgcatcgggcccgacgaaatcaaaccccaaacccagattttgtccaaatcacatctgacgaaaaaaaagagggttggagtcgcgtctcacggtggtcggtagtcgatggtctgggtaggtggtgatttggtgctcggtggtgatggtttgatgatttggtgagggtgagatggtgagagaacaaccgagagagatagagaaagagagacatttgaggtttgaaaataagaggggtatttttggatttattgtaaagtgttcatattttttaaattttaaaatgtattagtttaggaaaaaaattttaaggtatattatgcatattttttcaaatttcccttagacaattcgggtcacttttaatctttagttttaagcctattccaagctgctaaccaagtgttaaaacgatgcttagagatgctatggcgtttctaaacattcacaacataccaatttccaacatatagaggagagagaatcttacaaatctaaacaattaagtaaaaaagttgcaaattgtatgagagtgaagtaattctttcaaaatgtcttttactttcacaattgcacactaataccacccactagttcttttgccttaagtaaactgaatgaaactattttacccaaaggttgtgtttctttgtagccactttctacacatgctttttaatagcatttttgttccacacttcgataatcctgaagcctagatcttctttcttctttggtttacaaacatctttgtaggattttattactgtttatccctacacacaacagagagtaatcaattcaaaagcaatggtcaaatcagacctttattactccagtcaaaccttcttttgactcacagcaatagaaccaaacgacagctctcttttcttgagctacaggtcgtttttatatattatattctaaccctaaaattgcatcaggtatatatatttattatctaatatctcaaacacaaccagccacctaaattgaaccctagccgatctccttctttgttcttctctctgaagaacacagagacatcaacaagagcaataaacccagaaaatcaaccactccacaggttgaattaatcccagaaaaataccacacaaccccaa

SEQ ID NO: 45731 - DNA, 5112 bp, Cannabis sativa
attaactctaaaaatgacataaataatatgctaaaaatatcctaacataatgtgagcaagcactgtttccaacaacttgcattgcatattgttcccaacaaccctgactagggcagcgagtagttggtttcataagttcacaaatcattccattacttcatcggagcaattatccagtgaatttatgaagcaattccaggccgcgagggatagaaggtcagaagcgtcatcactaacaatttttttttttaaaaaaaagccaggagagtcattaaaggcttatctgagttgttttagcataacagcaacgaaagtgagaaacctgaatgacagtattcagttaatagcactccagactggtataactactgacttttctaccgcatgaggagagttgtggatgatttgcagggtcgcccagtcaggtcaataaatgaattcaatgacatggcgttaatctttgtgcaaaaaagaagaagcacacaatgaaatgaagatgctcaagtcaagctcaggagataaacccagctcaagtaccgctgatgtgagtactgtaacagcgaaggtgggaaatgcgagcagagggaatgaatcaaatagaaaaagaaaaaacaaattaaaagattcatcaaaggataagaaaaaataaaagaaacacgagaaatatgttccaatatattatgtttatacagaattgaatgaaacttatgaaaatatctttctcatcaaattagaattgggtcgctttctgaaggcacgaaccaatgaagaactgaaggagcaagcgagatccaaataaatattaccaattccacaaggatattagacatacaaccaatgaatgtcgccaattgaaagatgagattgaaggactcatttctcgaggttatttcaagcagtatgtgaggaaaagggggaatgaacaaaatcaacccaagagccagagccaaaaccatgatgtaaaaccacccccagttaaaggcgaggatattatagttattttagggccacatatcactggaacctgcaatagtgcccaaggtacattaaccaggttgaaaatcaagagtcagtttttgctcctgaaccctttaaacgtgcaaaactcgaggagccatcgataatcttcactgacgaagatgaagtgcatatgcagttcctgcacacagatcccctggtcatcacagtttagctcgcaaataaaagaataaaaagggttctcattaacaacaggggtttagtaaatattctttacaaagaaacatgaaagaagatggggctagaagatgtgaaattaaggccatgtatggtaaatttatgtggcttcattggggacaatgttgcaagtctggggaccattgaactcccacttaccatgggagaacctctttattagtcacccaaatccaagaattcctcatggtggatatcctttcagtatataatatactaataggtcatccatcactaactagaacggggccagtaagcccaataaagcatatgtccttgaaattcccaactcattctagagttgggacagtgaaatgcgaccagttgacaaccaacaatgttatggtgtagaattaaagaacagaagggcaacccactagttgatggtaaccataatagaagaaaatgagatatgcaagatggaagacttggatctcaggattcaagatgaacacgataaactcaagccaattgaagagttagaagaagtgaatttagatctaaacgacccaaccaagtgtgttaaaattggaaagggtttaggggaagaactaaaataacaattaatcacatttttgaaggcaaactaagaaaaattttcttagagccattcaaatagggccgggatcgacccaaatgtgatttgtcaccatctcaacatagatatctcttacccaccaaaacaccaaaaaagacgtcctttagatcctgagtgacaaaatgctttaaagggagaggttgacaggttgttagccaataacttcattcacattttatcccacatggatcttgaatcttgttcttgttctaaggccaaataaaacatggaaaacctacatagacttctccgacctgaacaaagcatgtccaaaagattactttccattgccaaggatcgatcagttagtcaacgcgacaacaggaccgagctaatgacctttatggatgcatattctgaatacaaccaaattataatgtatgttccagatcaagaacaaaaaatttttgttaccaatatagatccaccacatgctttgataaattgggaacaaagatttgcaacaacatgaatcagacccaaggataagatggagaggtagattagtatagatgttagattccattagttttagtatcacttaaagtttaatcaaaagcagatatcaagaaggatcatattagtgaattagacactatgattagaatttctagtgttatgaaaatcatcgaaagtgactgagtgactggtaagacatgttgcatcacagggagagggtatcgtaatcagagatgtagcagtatcaacatggaaaaagtttgtttagtcaactaaggagaagtcaatgtaattgacaaagaataccactcaattcgatagaatttccaagttggcctcgagaattaagtgcaacagactttagtaagggataaaagtatcttgcgggattcaacgccaagactagacataacctgatgatcaccatgtatgatgccaccaattatgttcagatggtgggggacttagaataagaggttctaggaaaaacaatgtcaggatggtcagcaaggtggccctgaagacagatacacttattctatatacccagctttcaaaaagtatcacctggatgagttgtaaagacatggcttgtttttcagtatagtattatgggacaccataaaagggattgaccctatttgattaaaaaaaaaggcaaaagaaagaagtaaaacccacttcagctcgtgtttttactattgcttaggccggtgttgaggctagcttgtcagtggtgacataataaatgataagttgggtagaccttgtgacaacaattagttagggtttgaactctattgcctagcaagaaattagttatctctaaaaggtggattaggtctatcccagagtggacaataaagagttaagtgttgattttgttgagctagtcataaaattttttgatatcattctcggaatggatttttaatctaagcatgcaatcaatattaattgtaaaaggaagatggtgcctttttgtcccgagggtgaggaacctttcatctttgtgggatcagtttagggattcccgaatcccatttatctcattatggaaagttagagacctatcgtaagatggatgcatatgattcttagcagttgtgatggacactagcagactcgaaataattgggctagaggacatcgaggtagtgaaagagtttgtagatgtatttcccgaagaactacctggtttgccaccatagcaagagatatactttatcattgatttggcaccaggagtagagccagtttatgaagtaccttatcgcatccagcagagcttaaagaattgaagttacaacttcagaggatgcacagcctagtgtttttccatggggagtttttgcctagtttgttaaaaaaagatgaaacattttgtacatgtattgactatcgtgaattgaagaagctgatgatcaagaacaagtatctactgcctagaattggcgatttgttttgtcggctacaaggaaagacaatattttacaagtttaaccttttctcgggctatcatcaactgagaacccaagaggtagatgtttcaaaaatgaaatttcacattagatatgaccattatgaattttttcttatgtcttttggattaatcaatgctccgacaactttcagggacctcatgaatcgagtgtacaaggatttcttttatatttgttttatagtatttattaatgctatccttgtatactattaatcagaagtggagcacagacaacaattatgaataatcttacatcaactaagagaacataagctttatgttaagttcaaaagtgtgaatattaattatcacgagtatattttctaggttacattatcagtaaagacatgattatgatggattaaggaaagattgaatcagttagggttttgcaaagaccgaagaatttatggaagtaagaagcttttttggtttagctgggtaggattctctaagatctccacattttaaacagaattaaccacaaaaagtcagctggttgtgtggattgattagtgtaaaacaagtatccaagtgttgaagaagaaactaattacaactccagtgttggctttttttattagatcaagaaaagtttgtagttcattgtgatgcctccaaaaagggtctggggtgtgttctgatgcaagccaacataatcattgcttatacttctcgtcaattagaggagtatgatcgatgtaacccatcacatgatttagaacttgttacagtgatcttgtactaaagatttgaatatgaggcagaaagtggtattagggttaattaatgattatgattgtgaggttttttttatcaccccagggaaagccaatgtgataacagattccttgagtagaaaaaggtctctggacaagttttcaggacaaagttgatctttcctcagttagtaacttacatatttaaggtaaatattgagtttatgaagttcccgactcaaattctagtaacaattttaacaattataacaatatccgtaactttaatattgtaaggttagtaattgttatttgtattttggttattcatgtaataatatttttgaagaaatacataacatttcaaatgtacaataaaatgaaattattatttgaaactcacaatattaaacattttgaacaagaccacattatattataaaacattcacaagtaggaactttatttttattttttatttatttaataagtatcacaagttcatatgcattttgaaatataactccatatattctcatttatttttaataaagattggtattctcttgtaagaagtttcagtgcttataactcatcaa

SEQ ID NO: 45732 - DNA, 2937 bp, Cannabis sativa
tttactttttggcaactacatttgtgttagtgaggaaataacactagtagttaattcattattggtgcaacgccaaaaactgtatagaactttccatatactgaataagtatctttcctaaaactttacattcagtctcacttgtagagttagagactccagatcaatttttacacttctccaaaataattgctccacccccagagtaatcaccatctcatcagtggactttttagcactaacgcaagtctagaaacctgatttgctgtagtctaagagtattaaaataccactcttatcaactaacatatagttcttcttctcgatcttaagattcatttgattgtcttccaatgttcttttcctggattaatctgatacctactcatttctctcactcaacagcaggtgtctggtctaatgcatactaacgcatatttgatacctctcactgttgatcctaagaaatacttttttggcctttatcttttctggaatagttaaaaaaaattccttagataaataaaacctatgtctagaagtcaaaaagcctatatagattgccattagaaaaatgctccagcatcttgctcgaccacaatggcctttccctttccagccacttgggtggaaggttgagcaaccttgatcctgatggaccactcaacgggtacttggccacttggaggagtcttcctcttcttcttcttactctgagccttctgtctgggcacaacctctcctactgtctccttagtctttggtactaaatcagtcgaatagagtttgtattcgacaacgttagcgtcagtggccaggagagagatgttctgctcatctagacagagttggagaatttcctaggccctattactaagttccagtgtgaatggatgtcggcaataagatgggatatgctagaaactggtataattggtgttcgtccccttgacaaaaagtagtcctccatgaagctacctatttttgtcacctcaatgtatgtggtgcccgtcagccacgactcctcgatctgaaagaagtagaattactctaacctgttttgcttggggcttgaatttaggttaaacaaccagttggtatcatgaggggatggcttgccccatccttgcgaggcgtataacacaaatagggcagatagattcttggggaccttgggagtgaattgggtcggactgatgtgataataattggtcatcttctttatgtatgggaatagaggcagcatcgcaccctatcagtgtgggctctcaaccaagcacaataaccctctccaaggtcggtagctagttgacttcgggagcaaaggaagcattcgacattccgtaagacaccatcctaaaaaagattagtcaatcttttcatggtcaggatgggtggcgtagaaatcagtcaatctcccttcagatatttcttctcagaggacgagcttcggtgtactcctcctcgacgtagtcccgactaacttccaagacatcacttgcttcagacataagttctccttccccattataattgccaaacggtagcacccgagctacctcatcttcttcattacctttggcttcagaaggagtagcgggacggagcttgcctggtcctccactttctggacttcaacatcccaagcagtctcttcctcctcaatggtaggacgagcatgttccacccatgccagagtagctaaacaagcaatatgagggttggtagctgaaggtttcctaacagtctatttggttcttgccatcatcctacgtttggatggagctttatcaaaagtgtgcctggcaatggtcacaacaaattaggtagtaggtttcccttcaatagctgggattgggcagccctcaagcaaggtgtcaaccacgctcgaatggaccctatacatctagctagtaggaaagttacgcctccaacctttcttgagttccctgattaaatgcccatatccctcaccacaaattttgtcggcatagtaatgatgttgcaccccaggcttcagggaaggtgtatgatcactacttcccaaccttcaaagctagaatttaaaagatcatcactagatgaggatgggctagcacggagacgggggtgatcttcatatagaagttaaacaaatcttggtcaatatgatagtagccttcccaaaacacacaagggttcatttacaaaaggtgggagacaagagaataagagttggttggagtaacgaatgaaaaatagattttatatgctgaccaggcttgaattgagaataaaaagcaaaggtttctcccagaaatagaatttttgatcccagaagtttgaaactttaaattggaatctgatttttgctaaaatcttatggacgagtcgaaatgaacattgtaaagttaaatttgaagcgcaatcagataattagatgtcatggttagacatgaatggaatttccaaaccctaaatctagttattctatggttaacctagaacagattgagatcatgaaaaattcactgcaaaaaattagaaaccatacatgcttttcattgtagatgtataaaagaaaggaatgaagatcttacttattgatttgaagcttacttacactgctcgaatggtatcgtcaagggttttcctataaatttcttgaagaatttgggagaaaacttggctaaaaatcttttgctctggtttttgagaaataaaatggctaaaaagattaccaagggttctaagtcctatttataagaaatctaaaaaattaattaatcatttcaaaattcaaatttttgggtttcttcccaaaagtagacgttaagcactgattggaaggagcacaaccgtcaagcgtgttcaattatcaaactgtgattcaaggtgtagcagtcaataagccttaaatggtcagatattgaagagacccctagttagagtcacatc

SEQ ID NO: 45733 - DNA, 2470 bp, Cannabis sativa
tcgaaaactattactaagtaccaacaattatttttctactttctatttagcaaataaaaattgaaagaatactattaaaattaggaaaacaatttaactataaaattaaagtaagcaaacaatgattatgaatatcaataataggatctagggtgttaatttcatcaacttgtcaatttatttattttattagttcgttctaccattttttattctaattttaatagcgggttaactaaaacaaatcccattcttttttaagatataagacctcaatttatataaattttttttacgtatccgtggtaaatttaaacatataaaaggcattaagaataaaaaccgtatttgctacataagttatatgggtactctcgtccaatatgtagcttatgtctatacaactatagcatattcaactctcatctctcgaatctcgattgaaatataaaaacatgcaaatagtgataaagtattcacaaacattaaacataaattatgtagattaaaataaagaagaggaaattaatagaacatcatggcaaaataaaatagaattaaagtgactccattaatccttaaataaaaaaaattaatgcatgaaaatcatgttcataattattgcattcataaaaaaaaaaaataataagaacataaacaaaattagaaaaagcgaagaagaagaagatgaataatactaagtagttgctaatttagagtttctaagtttttgaaatctaaaaaacgtactaaaaacactaaatataatgtggttatataggctaacaaatttaatcaaatgatactaaaacgatttaaaatttaaactttaaaatgtgatgtcctataatcggttagtgatttctcatatcatttgttaaattaaaatgtgttgaacttgatattaaaatgcaccaataacagtacgccacgtcttgtgatgtttggcaccttaagatatcccttatcatttatctttttaaaataatacaaaataatatcatgagtttaattttcgtcaatttatctttaatataatcaattttaagttactttctaggatgaacaaacgcaaaacatgtaaccagtctaatcataacatatccagctcaggttagtattaagattttttttaacaaaaattaagctcagagtactattttgtacaattctaaaaaatctaaagtccaaattatcatttaacaaaataaagagtttaataaataacttttaggggctttttttatttttacacttcaaaatagttttttttttttacggaattctatatagaaacccttattgtaactatcataacaacctaaattgcaaccaaaaatcatatagcaactcacatagaaaccacgggaaaaactactttaaaaatctaaaccataaatttgaaaaaaaaaagttaaaaaaaatagtatatgaggtaatttccctaatttttataaaatacatggtcaaattaataatttttgtagaacacaattaataacttttttgcttcataaattctactgatttctaacaaatataacacaattatcttaattatatatttactctattatatttaagaaatgtctctaattaagacacaattcactacactactcttatagttcttggacgttgaatagactagaaagagagagagagagatcagagtcagaacaaattaatgaaaatggctactgataatcataatgcaaaggctatggaattggaagaagatggaccaagatcaagagacacacctaaaggaacaccaaaaggtacctattttctgaaattgtgtttcttgttatgttacttaggaaattcacctttccaaaataaagataagcagcctatgttttcttaatcattctgattttgtcactagcttcttcatctaatcactcatatggagatagtttcactcttcattgcataactaagggtcaggtaataactaataactaatttttgttcatttatattagtaaaaatgaaaattgggaaatgttatttaattatattgaatttattgtgtgttatttttaggacattgtgagcagaatgaacagttttgttctgaattatccaccaaattcattattgactgttctttctgctaatgggacagtatcaatagtagacattattaattgtgatgactataccaaataccacagatttttggtaagtaatgagaaaatgacaatttggttttcttgattttaatcaaaatataattcattgacttttgatttgttgtagggttcttttaaaattctatctctgtcttggacagtagaacttgattcagatcatagtcctgagaattatggtatggcaataccattgaaggttttattgatcaatttagaaacaggagaggtttttggtggagttgtacaaagattagtagctgctacaactattaaggtattaggtgacattatcaacttttttgttcatg

SEQ ID NO: 45734 - DNA, 1930 bp, Cannabis sativa
tccaaagcgtagagatgttgaattctagattaaggattttgtcttccttcaagtatttccaatgaaaggaattctaaggttctagaagaagggaaagtttagtcccaggtttattggtctgtttgagattcttgagaaagtaggtcaggtagcttatcagttggctctacctcctcgtttgattggggttcatacgtgtttcatgtctcgatgctttagaaatatgtatcagatacaactcatattttaagttatgaagacatcgagcttcaaaccgacttatcatatgaagaacaaccagtacatattttaggcaggaaggaaaaggtgctgcagaacaagactattccgctagttagtgttgtggcaaaacaacaaggttgaagaagcaacttaagaattagagtcgaagatgcgggagttatatcccgagattttcatgtaaattttgaggacgaaattcctataacagagggatagttgtaatatcccagaaaataaaatgatagttaaatagacatattttattaaatatgtaattattttggtaacgaagtaagattatgatcttacttagggtaattagaaagaatttatcgaatgattataccaagcttaatttattaattacggagcttatatcagaatatgtgggtatcgtggataccatttttgaaataaaatatttctttgggcccaacaattattgaattggacggtgtggttagagatgtcacgatatttaagaatcgcacagtaaaaattggataggttctttagagttttaggtcgtcaattttgtgggatagttaggtattatttaagttaccctaaagtatgttaggatttaagtgttaattgggttatgttttggaattattattataatgatttgtaatattattattattactattattatagttaatattatttattattattatttataaacattattagtattattatttgttattagtattagatatgcataagaggtaacaagggttagaaaattcattacctcttccttccccttccattttcggctcaagaaccaacagaagtctaggagaatttcacttattttcaagctattttcttgagagaattcttaaccctaggtgttgcaaagtttaaggtgagttcctggtaacttttccttagttatttgagttttgaatgtgaattatggttgggcttttgggttttgaattgtggtgttgagttgagttcaaataatgtttttgggattgaattatgttcttttaagtgaattatgtggctattggtgtggagattacaagttttggatataaagcttaaatcttgaatttgtgtattgtgatttgcataattgatgaattatagtaaattgatgtgttggacatgttgtatttagtatgttatgctattctggaagtactatttaggtatgtgttggtattggttcgaattggggaagaaaaccaagaatttttttggtctgccagaaatcggtcgactggttggttctggtttaccagaaccagtcgactgattgcctgcaagggaaaaatctcaggttttcttcgaaccccgttttggctgttggtggaacctggtacctgtttttggttgtttatgagttatttgatctattttggacttgttgggggctaggttatatttagtttcgaattaggttttaattaagaatttcaagttaaggtattccttgagttttcaattgtcgtgacataggaccgcgttctcctagcttgtttttccacttaggtcggcccgtacgcttgagttttgaattaaggtaagaaaagtggtaagcaccatatgtagctaaatgttagcggttgaatgattatagtgttgattattatcaagattttgattagatgtatgttgagcctaggttatgacctagggttgg

SEQ ID NO: 45735 - DNA, 4212 bp, Cannabis sativa
  modified_base (2261)..(2266): a, c, t, g, unknown or other
  modified_base (2533)..(2540): a, c, t, g, unknown or other
agttcctggtaaaataacttccaacaggccttgagttgtgtagtattgccacatggagcttgaatgaatgaagtagagaactcttgtttttcattaactttgagccaagaaccataaccctgttgttgcttccccgttgcatcttcaaagattttaattggttctgcacaaatccgagtatcatgtcccacaaaaccacaattaaaacacataaagggtaatcgatcgtacctatatgggagccagatctttcgaacttcacatggaaagaggaatcctggaaagagtgggtttgcaatatcatgccacactttgaatgtaaagtagcctttggctgcaatcttgggagcatctgccttttgaacatgaataatttgacccgcaaagcccgccaatcgatccatgtttccttgagtgattgatcggatggggagatttagaatgcgtccactaagtgggaatttggtgagcactttgtctcaatcttgagggattccttcaaatttctccagaattaaaatgccattgttaagaaaccatggattcttggccagaattcgattcaaatcttcggatgatttgaatgaaaataccaagaaactcgcagattttgttgtatacttgatttcaacgctccaatttctttcggagatcccccagactcgtcccaagatagtcttcaagagtgagcgactaattgggcgagttgagcaccatcggcccatcgcacagagcgatgccatccgaatctccagaaccattgacttcccaaccttcgtcttccagcaccgacatgtttgttgttcggcaagcaggtcttccatggtgatgtccaattgttccatgtgtttaggcttttccagcatttcagggaggctcttctcaagagagagcatttggatctgtttcataattttgattatagaaaatatatactataattctatttttactactacaattagtcttatctctgggacatggttttaagttttttaatcttctctctgtgacatagttttgagcatttttgtcttgtctttatgacatgattttgagtgttttaaccttgtttatgtgacatggttttgttttgttttattgttggctcttctttgatttttgatggctcgctatcaaatcattgttagtggttaggaataacaagttctctgggactaaagttcagggactgaaggggttgttagtagtgcagttacataccttacacaatagtttagtgctcaagctacaaggttgaataaacttgctgtaacaatttttactattgtattttctccgaacaagagagagacttcaaaaacacaatatcattgctaaagattgctgtctgttctgtagaacacaaacatataaaatagaccatctcttcttttcttgttctttctcactagtctgtgaaaaacaggtaaaatgttggatgggttggggagctaagtcgaactcactgtgtaagcttctaaggtggatcggtcgagcaaaaactagtagattcaagaagttggttttttctagtgctacagcagcacttgtgtatcatctttaacatgccagaaatgacattctttggaactcagcagagcgaaaggatgatcaagtggtgtgtacgatcaaagaggaagttaagagaaaaatcaactgtgtttggcctaaaagtgttagtatagtagatacaaattagttttcaacattgtaaattattaaagaaaagcaaagaaaaaccaacaaaggaatataatagggaatttctataaacaagcattatagaaaggttaattatgaatcattattggagatgtctaggtcttcaaattgaagatgctatcgggatgtaaagttgttgttttggagtaatgaatttcttactggtttaccgaaaaaacaggttaattatgatactgcaattttttttatttaattttattttaatttttttgtcaaataatgtggaaatcaggaggtgattatttgattcgtttttttttaattctaatcttagtagtgtctctaccatgaagatatgaaaatgtcccgatcaaattacaaattattattttagttgataatcattaataaaattctattatttattttaaaaaattacttgaaaaggaattaataaataattagtagccaaaagattaccatagccacactactctcattatacattactagcacaagaaattagacttattccaaataggctaattagcaatttttcccccgaactttgacannnnnnaaatcatgcctcttgaacttttttagccgttaaaaattcctcctgaactattaaaattgttaaatttaaggacttttgtctaatttcaataaaaaaattgtaatatggatgaaagttcaggagacatgatttaatacatataaaagtttaaggggcataatttagtagatatcaaagtttgaggagcatgatttagtacctgaaacagtaaaattgaatgaaattagataaaagtccttaaattaaacaatctcaatagttcagggnnnnnnnntaacggcaaaaaaagttcaggagacataatttagtatatgtcaaagttcaaaggaaaaaattactatttagccttctaaatatgcgttatccattcctcactttccaccatactaacacagtaatctttccacgaatctcgactcagtgagtcaaaagtggcgagctaacaaccactgccgtccccaccaaaaatcctatattaatataaaaaaaatataattagttatttaatttaatttcaaaattaacgaattaatacgtacattagataagtcgaattcaaactccaataccatatgtttataaataaattatataaagcatgtgtgtaattattaaatttcgttaaagtcaacaatttaaattaataccattaaattaattatttttaaaaaaatcattaactattttactttaaatatctaaatttaataattatgctcatattttttttatataaattgaaattaaattaaatattattttttcaaataaatttgttaatatttttcttaaaatattttaatttaatttttaattaaataattatttttcaaaatagaacttaattatttaaaagtgtataaaattagatatacatatatatatatatattttatacatatatgagcctaaatatgaatttaactaaattttacatattaagaaatatgctacaattgatttatatttaatttttaattattatttgtattaataattaaataataacaatatacaatgtaaatttaagcaaacatgttgtatgttgctgttagctagtattttgaccataaattaatataatcaggaatgattcatgtaccactagaaattgattgtttcgtgactaattagtttgttttactcgatgagaagaaaactcaaacttgagaacctccctttaaaaggttgtaaattgtaatatcatttttttacgctttaaatctaaatttcttcatccatatctattaatttcatcatttatttttcgtgggacatcaatttaaattttcaaaggaaaactattagttctacacaaaatttaattatagaagaattcgaaagtcaattttgtaatacttattatatatatatatatatatataataagtaatagtaattttgtgtataaattttaaaccttttatgataatgaatttatcaactcattatacaatatttttttttttttttttttttaaaaaaaagatggttctttgaaagaaaaacaaattttaacatcgtacattttttatacaaacgattaaattacaaataaacaaaaatttagaataaaaaatcattaaactttttacccttttttttaatctaatatcactttcgcttacaacactttgttaatttgtcattaatttaagaggcttaatttaattcgagttatataatttaatatctaaaaactttaacaaatattcattttatcttaaaatagtacagttttggagaaaaatgaagaataataacagataaaactttatacgtgtcatgtataattgaggggacgggtggtattttaccaatcaaattgatgagacccaatactaatttttgagaaatgctaaagagcactagtggtgcctagcactcttctatgtgtcagtatcgctattggtccaactaagtatcggatcccatataatttaata

SEQ ID NO: 45736 - DNA, 3121 bp, Cannabis sativa
  modified_base (505)..(505): a, c, t, g, unknown or other
ctaacataagggtaagggtccaaaaattttatttttctttttcactgtggcccactttgtttcagggccagccctgcacgtagataacacattgtgtacacatgaacagttcattgtggcacttaacatctaaaaatagataaaaaatagcaaactactagcagaacataagttttggtgattttgccgccaaaaaatgaattttggagttaattgttagcaattaagtaaaagtttttgaggttttaccataattaactataaataataagaacatatatataaatttaaaaataaaatatattagaataaaaatatatacacatatatataatatataaagaagaattatcccatatactgctttgttaactttttttttcaaacggtttgagtttttaaagttgttgcaacactagttgcaatagggatttctatacgattttttgttgcaatttaagttgcagcgccagttgcaataagagtttctatgtagaattccgtnaaaatacaaaaaaaaaaaaaactgatttgaagtgtaaaaataaaaaagtcccatatataaataacaaaaaagaaaaaaataaaagggttcttaaaaattatttaagtcaaatgagtatatatataaataaatatttaatgcatatgactttagaataaacaattcaaaaaatttaaataatattttaccttagacaaatagcggccgcgaatactattagtagcggtcaagcattagcggcggaccaatagcggtcgaagtccgccactaatactctttagcggccagaaaggacagtattagcggcagagtggtccgccgctaatgctgtgctgttgaatgttgtagtgtcacgtgttataaaataatatagaataaagaaaaaatatgagaagagataagacaattaaaaagagattaataagagagtgaatgataaaaaaaataaaagaatgagagagtgaatgataactcctatttatacaaaaataagactaaaagaataaaaaaactaaatcaatgtaataaaaaaataaaatcaaacattaataattattttcattttagtaactaattaattctctattattatggtcatctatataaatgtattgtattttatattttacaacatactcatctttatatgaatgttattgaaaaattttactaaagccctttgaaagactttaaataatcgtaagtaaaatatattatatatttacatatattttatgaaaatcaatctaataattgtacaaataaacattattaataacatttatagtaattatatatatataatatattacaacaaaataacttgattatactaaataacaaaatagatgaaccaaaataaaaaccaaataatactatcatctttatataaatgatagacatatatatttttgatttttgatgagtttctaaactaagaaccatatatttttgcatatactatattctaaaggaacaattaaattatattgcaatttgcatgcatatccctagctattaggtaaacaataatttataatgatattcaattttaaatattggcttattagaggattcggtggaaagaaagaaggagaaaaagctgatcacacccaacaaatattgcaataattaaaatactatcccttttcccactactttgaaatatatccgatgagatgattgtattcattgtttaatataatctaattatatatatatatatatattgtatttatatagacaaagtcccacacaaatttcgtatatatctaatcatgttgaacatattattcagtaataaattaatgttcagtttcgattttgtgcctgataatagagttagatccttaatattaaatttgattttatctaataagtcagattctcaatcaatcttgtacatctaaattatttatgtatgtcgcaaaaaaatatataatataaacactacttacataatggggaaatatataaatatatttattacaattatatatatatatatatatttctatttgtaacaacaaattaataagacgtcggacctaaggatccatctcccaaaacattgttctttcgtcataaggggtagttgactgaattctgaaaataccagaaataaaagcatatgggttggaaatatttgccggccggaaaaataacaattaattactcattttttttttgttttctaaaataaaaaatacaaaattgtttcatatatcatcatgacctgtaaatgaagacaaaaccctaattgcttaatcattcaacagaaaaaataacaaaacaacaccaatctatgtgtggagcctctaagaatagaggagcccacacttttaatttgtatataataatattatatatatatatatatatgatatatatactcttgaaatgttttcttttggtatgggaatagtgtgtaaataaggatgaggcactgtacattcattaattaatttatatacatcaatgagagccatgttcatgtggcccttctttgtccccgtcgctatgagcatcgcccaagggagggcataccaggttgcctcttacttaagactacttgtaataagtttaaactttatacatacatcgtttcaaatgtatatgtatatatatatatatatttatatatatgaagtaataatcttatatatatacctgtggcattttgttccagcggaggaaattttaaatacaatgagagagttctccatagttctctaagatatgaacctttaatattctttaagtgaaaaataaaataaaaaatgattctaataaatatgtgaaagataagattcaaaattttaattctttcactacaccatagattgtaagattttaattttggatttaccttaatattttattaaaatattggtatccgtttgtgacgttttaacacatatatagttagtgaggagcgtactcgagtgtattttaattggttacaatatatatatttataataaaagataatatttatagacataatgttagtttggtttttaatagttaagttagattgtatacaagataaaagtcaagattcaaatcctactaagaatattttttttttttaagtttacaaaaaaaaaaaaaaaa

SEQ ID NO: 45737 - DNA, 1084 bp, Cannabis sativa
tgaatatattctgttgccgatctttgattggtgatgtaaatagttaaacaatgtttacttcaagttctgttgcaaatttcttaaagatttacatcacaaatattagtttgtaattgtcttgttgagggcaacaataatgttggtgttgatgaaggctgttgtcttgataccaattatgctttccaagttaaataagtattttaataaggttagttatgttttgagtgattttgagttgtttttttttttttggggctctggattttattgtgcagttgtggaagtattatgttttttgtcacttttacgtgtttatggagttttttttttcttttttaggttggggtggttattttcacgatctatatcaagaagtttgttttagatctgttcttgtttgaaaataatgatgggagttttttaatttgattttttagtttttgcaagtagtttcaaatttgtttttataaatttgctttttgttttgtttgcatttataatgtgttacagattttgcttttttttttccctattgatagtttttgctaatattgtggtacataatgatgagagtttttttatttgatttttcagtttttacaagtagtttcaaatttgtttttataattttgcttttgttttgttcgcatttatcatgtgttacagtttttgattttttttccaattgatagtttctatttttttcttttaattttttttatttcatgaaattttttgcagctgtgggaattctactttaagcctgaagataaattgattgggaagattactttttatcctaattcaagagtagattttattgaggtcattaagaagaaattaacctcaaaacaacttgtcctctttagggaaacatattttggtcattttctagacatgtcaacagttacgatgcaagctcaattgattcatgcatcattgtataggaaagttcatcaaaataatgagcgtgagattttgtttaggtttggcaatgacactgttagatttagtgttgctgaatttggtcttatttctggtttaaaatgcactggtgacagggattattccaagtatgttaaca

SEQ ID NO: 45738 - DNA, 1999 bp, Cannabis sativa
ttaacttaaacattgttgttgataatgttgaggttgaatcttccattttgaatcacttaaaataattgtaacacaaaccaatctctgataccacttgggaaagcgaacattgaatacaaactaataatatcctggattatacgtttttttcttctttgagtgaataaaatgggaaaatcaaaattatattgatataaagaaatgaatatataaaagaattcattcagtataaaaataatgggattacaaatataaatctcaccagagtgagtatctctctctcgctctctagagattttattgactctcttgccttttctctatatcaaggattgtcttcttctctttttacagtaataataatgactagcaccaaataatttttgtctagcctacacatgctattaaaatgattaatcttccttgatcaatgtatataacccatcaatcaatatgtacatatatactaactattattagtatttattgagattttcagaaacgaattattgagtattagagctaaagaaaatgcaattgaaagaatcaaatatgaggaaaatactcatattttttgcgtggttgggatgttaatgaggcttagtccacgtgttagtataattatgagataggctaaaaagcctaagggatgaatatgaaccctttattctcttctcaagcttgtgagttaagaaattttaactctttctatgaaggatttagcacgaattcatagattaatagaggtcatacttagttacccttttcctctaatggggtgttatacagataatacattactttgggcttatcaaatgaagcccagcccatgagagagtgactatatgctgacttggcatgttgatcacagtcacaactattgttactgtatcctattattatgggtaattaattatatattaattacttgatcttaaactatgcagtttcctattttaggctgatattattctctatttgagatttgaggagagtggcttccttattctgaacaaaatagtaaatggaaaactacagcgggcttccaagtacacactagagagttcttttggctacacggagctagcatcctttcagatacggactagccttgctgaaaacttgtctaagcgagatgtgtaattaccttcccagaaggccggactggtgttgggctcgacccagttcatgttgtttgggcccactgatggaccttgaattctatttggaatccacatatcccttgctgaaaatacagataatatttacccccaagctttcggaatgttgtggattgtagaggctcgcttcagcctactcaagtggacatgtggaggctaaaggtgaaacctttatgaattctaaatattttatgtgaatggaagacaactttccattcctcaaacttcaggttctatgtggcatagcatctatttgcttgatgaagcgtgtgtagggaggcaaaaaaactaaccattatttatttttgcgtgagttttgatgggaattttcatcatttgatctacaccggttccagatacgacattaaatgcctaacagatgggtttttgagatttaaatatgttttgcatttctagaagatgaaatttaaccattgatcttggctttgcacagatcattcctcatgggtataaatacttcttaatgataaattttaccgcttctacccaaattttcaaaatctcttgtttcaaacatagaaccttcgaaagtaaaaacctagaaccagaatcatacataaattgaaacattctgcattatgacattgatttttgtattcaacttctttttcaaatcaaaagtcgggaattcctaggtgcattaccccttgtgatctcgagtgcatcgccagaagaaattataaatctagatattaattctagatcaactccctcatcactaggccaatgccattgcagagaggcttgatcgaattgaagatccttgggttaacaaaatttctctatgaccatccatt

SEQ ID NO: 45739 - DNA, 1272 bp, Cannabis sativa
tccgagatgtgtgagtcattccatttgagatatgtcatcccatctgagatatgtgattcattccattaatgataagtcgtcctatccgagaagtgtgagtcatctcatccgagataagtcatcaaatctgagatgtgtgtcagttatgtcatctaggatatttaagtcttccgtcttggacgtaagtcacccgtcttgcatatgggtaagtcaccccattcgagataagttaccttattcgagatgtgtgagtcattctattcgagatatttcatcccatttgaaatatgtgagtcatcttgttaaagataagtcatcctatccgagaagtgtgagtcatcccattcgagataagtcatcacatttgagatgtgtgtgagttatgccatcctcctgaaatgtgctagtcatctcattcgagatatgtgagtcttcccattcgagataagtcattccattcaaggtatgttatcaaattcaagataagttatcatattcgagatgtgtgagtcatctcatcttagatgtgtgtgagtcaccccactcgagatagctcatatcccatttgagatatgttatcccttttgagatatgtcatttttcaaaaatatgtgagtcatctcattcaagatatgtcatcttatttgagatgtgtgagtcattccattcgagataagtcatccctcaaagatatgcaagtcattccattcaagataaatcatcctatttaagatgtgtcatttcatctaagatatattatccaatccaaaatatatcactcaattcaaaatatgggagtcatcccaatagagatatataaattatttatctaggatcatctatggtgtaactcttccactacatgtttaacttcacctaggatatgtaactcttatatgatatatagtatttttaaaatgggcatttttgtatgtttttgagcttttatataataatttcggttcacataatttatccaataagaactattatatctaaaagatttaattcatatagtgcttagctactgtatttgtccataataatatattaatataacataaatactttattgtgattggctctaaatttgatataatctatatatatggtgcacttttaatgagtattactcatgaataggtaaaattagaaaattttaaattttatgtttaattattctatttgattaaaaaaatctctcatttttatatcatatggactgagattgttctatcggtaaaaaatattaaaaaaaagttttttagcaag

SEQ ID NO: 45740 - DNA, 3006 bp, Cannabis sativa
  modified_base (613)..(646): a, c, t, g, unknown or other
aacatacttgtgagtagatttgagatcctggtaaaataattccaacatcaaatagccaccatagagaacatgtggtatgggtagaatgttcaaatacgactgaatcgaaccactcttgaaccactctcagacgactgctcggcgacgttgggcgtcgttgatcggtggaacgacgcctgtggattatcgcaaaaacttcacgaaggttccagccaatacgtgatatttccttctctcctctacgcgatatttcctctctcttcacgtctgcttttctcgcctataaaagagaattagttaagctaggcaagtgaggttattatcgtgactattggtgctttatgctttgttaaaatacataaatgtaaaaagttattaattacattaatgagtgggaaaataataatagagaatgatacctattgcggtgtaaaatttggttcttcctatattttgtttcaaatttggcacaatttctagtatgtgttaaatttaaactacattatacactattattagagtttaattttatgaacatggactaaaaaaatacttatacaacatctttatagcactttattagagatgttctaagataataataataataatnnnnnnnnnnnnnnnnnnnnnnnnnnnnnnnnnnataataataataataatagctttatcaaatttttaatatatattaaattttaatttatttttttcttatttttttatttttatttttttatttttttttattattgaccgagattttcgacaactccttaattttattttaggaaaattaattatatgtagtgaagagtatttttacgtggttcaggtattaattaaccttaatccacaaaccacttttattgatgagtaatattgtcattacaattgagcatattctgttttgaagttttgaagttttttttttactattttttattttttggattttcgatccccctttccacttacattctttctttatccttccctttacctctaggctctacatgacctttactataggtgtagaaaatgatgtttgtgatgtgtgcatcaagtaagctttgaagtaggaatttggtgagacaagacttaacttctacacggctgatgggacagcacaaggagtagtcgtcaattagcgtccataagaaaacagaatgtcagaaaagtataggctaaatcctaaagacatcttctctttgagagcaggttcactttttcgtatgcactgaagtagtcatctacagtgctttgtctcaggagatgtgtcaggaacactggtagctctcaaacactagatgattcgggaggcactcactctcctagaagatagagtttgaaatcagtttcaagaatccttttggaatcattgtgcactctcagacacccccgtgcctttcgaatgttttttagatttcaaatgttaatattgatttgttatgtcttctatgcgagccccatagacacgtggtttactctctacttgccatgtattttagtaaaaaaaatatagacaacatttacccataagttctaatttacaattttgtaagttccaattttctgaaattaaatccctagacatccaataaatgcagagtgttagtcggatactcgagtgctccaaacatctcctcataactgtgttactttacacccttccccaaccgttggaacattgtgtgttacttggaatttgaagggaattgtaatgacgacatagttaaattatgagaattagtagataattaagaatttaattattaatttatgattatgtgcctcttagaagaaattaaggcttattgtcaaaaataggccttaggaaattttttttctcaattacagaaatgttatcccatttgttgcactatgacgtggcaacatgagtgacacgtgtccaacattccttgtatctgggcggagatgagtatttcgaacaagtttggggtagcacacgtgcacacggaaagtctacttacacgaatagggtaaagggcaaactgcccgggcagatggcaagtttggttttttaaactattcagcaagacttctacttcagaattgatatcgtggaatccaagcacgaagaaaattcctacaatcatgggatcaaattagagggatacgataggctgtctcaatcccccatttcatgtattctaattatgtaatagatgtttcttcctattatagacattgtaagcaaaaggggaaactttccctcatgcattaagaccttataaatagtgacctagcttcatggtaaaaaggatcgaaagaattgctttagaaagagaaccaagagaaatactaagatatttcgttgtaagagctttgagagagaaaacactgtattctttattctcaagttaatacaatctaagaggagtaggctattaccgtaataaaggggcttaatctcttcaaaatttggtgtctttattacttattagtttttgctctgttttattacatttctaatcgcttcataattgacttactgtcattgattaaaagtagggtcaatattttggtgctttcattgagagcaaaaacccaagtttattctgtttccaatcttaacaggcacacaaaatggtggtgcaaacccataaaggcttggtggatcagagtgatccaacggtgacagaccctactgtacaaacccctgggaatacaagggtcccatcaggaactaattccgtgaaatcatatttttttaattttttttgttattttggtgtatttgtaaaataatctcatccaatccaatccgcaaaatacggatatccgcacttgtgcggaattggattgaaaaatttgaaatccgcacttgtgcggattggatgttgtttaatctcaaaaagtaaccgatccaatccaatccgcgcacttaattatatatatatatttaaaaaattatattatatataatattatattaatttccttataatattcaaaaaaaattctaaacctaaaaacctaatatag

SEQ ID NO: 45741 - DNA, 597 bp, Cannabis sativa
  modified_base (469)..(470): a, c, t, g, unknown or other
aaaaaatgaattatatgtaattaaattacgaaccagtagcaataaaacaatcatgtatattaagttgagaagagtaagagatcatgattccatcagtgttgggactggttttaggtgctaatatatgaacattagagatagtcactccaatgcaaccttgaatggtgatgtgtttgtttggactgttcttagaagcaaatccatttaatttaagattgttacaatggtgaaatcctaaaccctgcaatcatcatcatcatcatcatcatcatcatatataatcaatgcttttccttttcaaaaatataatgatttatatagattttatagtatgaatattacacttgtctttattgataatgacatctttcttttttagtacgtaaataaaatattactattaggcattctgcctaccactatggtggcgtgatataactagttagcgatattttataaaaattattannttaaattatatgagatttgatacttaaaaaaattgcatcttctttaaaaaagtaaaaaaaattatatgtattttttaaaaaagaatttttttaggcccttaaattaggtgggccctaggtgcaggcc

SEQ ID NO: 45742 - DNA, 2192 bp, Cannabis sativa
actttaatataataatgcgagcaattaatgtctcaaataacttgtgctacatattatttcccacatcgttgacaggagcagggagtacttggtttgataaattcacaaatcattccataacctcatgggaacaattgtctaaagaattcaataagcaatttcaagcagcgggatgggagactaaaagcttcatccttgacaaacatcaaatagtagattggagaatctttgaaagcatttctaagtcgctttagtacgatagtagcaaaggtcaaaaacctaaatgatagcattcaattgacaacactctaggccaggataatcactgatttgtctactaccagcagtgaactgtgaaatcattttcaaggatgcccagttaaatcaataaacgagttcaatgaaagggctctcatctatgtcagaaaagaagaagctcagtctaagttgaaaatgttaaaggatgactcaagaaataaacccagctcaagtaatgccaaggcaaacatggctaacacgagcaagagctacgagccacatggaaaaaggaaagataagtccaaagactcatcaaaagacaataaaaaacaaaagaaatataaaaagtatgtcccgatttatactgtgtataatgagctgaacgaaacacgggagaatatattcctcgcaaatgagagtagggtcgtgtttcgcaaacctaaacctatgaggaatgcaaggaataagtgggatcaaattaaatattgtcactttcacaaggacgtaagtcacatcactgaggagtgtcgacaactgaaagaagagattgagagtctaatctccagaggttacttttgacaatatgtgaagaatagaggattgagcaaactcaacctcataaccaaaatcaaaccagaatgtccagtaaccacccataaaagacgaggacatcttggtgaattctagggggcctcactttgcaggaacaagtaacactgcacaaaaatgatacataaaccaagttaaaaaccaaactttagcttttgcaccaaaattggcaaaaagaactaagactggggagcctctaataactttcactaataaagacgcatgcctgtaaggttttcccacgcagatccactagtaataactatttagctcgcaaataagagagtgaagcgagttttattggataatggaaacttagtcaacattctgtataaagaaatcttaaagaaaaggggattaaaaggaataactttaaaaacatgcatggttaatttatgcagattcacaggagatagcattgcaagtttgggaatagtcgagcttcccctaacaatgggagactcacccttgtcggcgactctaatgcaaaagttctttgtggttgaccttcccttggtctataatttgataatgggttaccccgcactgacaggattgggggcagttaactcaataaaatacttgtcattaaaattcccaactttgaatggggtaggaactttcaagggcgactagttgttaacacgagagtgctacaatatagaattgagggaaattactaagtctcgtcaaataatggatgtaataatcaaagaaattgagaaagaagaggagggtctggacctgagaatgggtgtagaaaaatctcagcttgggctgatgtaggaattggaagaggtattactcgaccctagtgaccctacaaaagttgtcaaaataagaaaagggttagaggaagaattaaaatagcaactaatacacttcctaattgcagactaggatcaatttgcctggagccattcagacatggttgggattgacccaaatgtcataagccatcacctcaacatcgaccctcactatcctccaaagtaataaagaagatagtttctcgactctgagaggcaaaatgcacagaaagaagaggttgacaaactattaaccaatgatttcatatgagaagcattctacccatagtgggtatcaaatccagtactggtgccaaaactgaacgggacctggagaacttgcattgacttctccgacctgaataaagcatgcccaaaggattgcttcccattacctagaattgatcagctcgttgatgccactgctgggcacgagctcatgtcctttatgaatgcttactcttgatataaccaaataaggatgaacgttgatgatcaagaacatacaagcttcat

SEQ ID NO: 45743 - DNA, 916 bp, Cannabis sativa
aagtactctggcgttaaattaggtcgttgttttgtaaaaagaatttcatgaaattcaaattctgggaaagaattccatgcacaattccattttttagagagcacacaagttctggcagcatcgattttggggagtaatgataatatacgatgcaagataaatgttggtaagtctgacactttgtccctggcttcgattggttttcctgtaacaacaataaaaatacatattaataatcaacatcgtcttcatcgcatgaaaaatatttttttttataatgttagtaaaaagaacttacttcttttaaagtaaatcatggtaaaatcaatagagatatctttagaatgtgattgtgagttaggtgagcgagagtacggtgtcaatttttttccactagatttaataggaaatcacttatatatagtgaaaaatatgggatttaaacaaatataataatgtattcaatttaaaatttagatattttaagagagaaaaaagattttttctctaatattatcatttaaattataactctctataaatatctttcttatcttttataaatatataacataattttttttttaatattacaattcaaaataaattttttacagatatttaaacaaaagcatttttctattattttttttaacttgcgatgaaatcttttttttatttattttttctgtacatttatatacacgtgtgtcgtatatcatattcatatttcttttctttctaaataaaaaaaaaaaaacaaattaaaaattagtaaatagttgatgttgtacataaaaaatgtaaaaaaatttaagaacaaaaaggcttcattaaaatatagaattacacattaaatagcaaactattctgccttctgttttcctttttccatatccaaatggatggttttaca

SEQ ID NO: 45744 - DNA, 1314 bp, Cannabis sativa
atggcattcctcatgactttttcccatattttgtaagttttttttttttaaaaaaaatgctatatttagggtaattaagtttttatgtcatatatatcaacacatattttcgtttttccatatttttgtaaatagtccattttattattggccttgtggtatgtgacaatccaatcttttgtgttatagtccctatgcatggttcatcattggtttattccctttttattttgttttatttaaacaatggatttattatttttcaattgtttttttttgaaagatcattgttgatagaataaatttgtcacatgctgatttagtttcgaaacctaactaatttgtttcacacttgttggacactttgatagctctagcattttttttttttaaaaaaaatcacctcaaactttaatgcttagatcgcctcactaatcaagtgagaaatacaatttataatatccatctcagagagataattgaaatactttctaaaatatagtttatctaatatatgggtcataatatttttctcacgaaaaataaaataacaagaaccaacattacacatggaaagaaagtattggatattaccaacaataatcccatcttcactcaagcctcctccttttataattgcacgaattgcatcgagacaatcactcagcagaaagaaagcgatctaccataacctttgtaaatactcgaaccactctaccatcaccattaaggatcactaccccaaccaaatagcacatctattcatactaagtactaaccatcgtgagtaaagaatttcatgtacaatgatgagtcatgcgatatttttcttgtctaggctactaaagagaaattgaaatgaatataataacgaattaagtgggactgtttaagcggaaacaaaatgcacaattttgggttaacatatataatagtacaaagacaaataacacttttacatattttgttaccgacaagatggttcaaatgatgacatgaataacatgattagatggtccagatctgataaaataatgtgattagcctaatacagatttagggtttttgtttggccactaaccactctctatttattaatggctcctaacatgtttctttcttgtctgttatttatacataataattatataaatataattatatgattgtcaattatttggaattggataaaggaaacaattttttattatttttttttatggaatgatcttttcaccattttggtgaaataactattccattttgaaatagaaaaaaaaaatcattccaatgcatgataagaaaaaaattaat

SEQ ID NO: 45745 - DNA, 972 bp, Cannabis sativa
ggtttggataataaatttacaaaatatggtatatcaaataccataaaaaatcttaaatgtaaaaaaatatcatagaagagtggcaaatttataaatgccataatttttataacttttttgtaaaatcccatatttcatgtaatttttacgaacattattacacaaacttttgaggctatggacccctatacaaactctcattttatcactaatatacaatctcacattatttattttactaactaatcgcttttaaattaaaagttgaattctttaaaaaaaaagttgagttaaatgaactagttttaatgattttaatagatataataaattaaagttaatttacctaattgttttcgaaatgtatatctgtaactgtaatagcttgggatcaaaaaatttcaacgaaaaaataacagtaagaatttttttacaagttataatgttataaataatgtgagctctaaaacaacattcagaatcttgggtataagcgagctaggtccaataataattataattatttttaaaaatagactatttacaaaaatatatataaaaaaaattaatattataacatgtaaacttaattgcatcaaaaaaaaaaaaaattaaacatatgtgataaatcattatagataagatgaaatatcataaaaaaatttttaaaaaactcatatataaattttacttttatataatcaaaactaattttttaatgaaaaattcaatttctaaaatacaaatatacgatatatttggcttctctgatttatacttcaaacaaagagaaataagttttaaaacattaaatatgaaatttagaaagacatttacaataatatgacaaacctaaacccataaaaaaaactaaaaaaaaacataaaaaataggcaaagttaaatcaaccatatttaattaaaaaacttttaaatcttatattaagtataattttctctttaaaatatatat

SEQ ID NO: 45746 - DNA, 1529 bp, Cannabis sativa
ctacacaataccgtagtctcattggcaagctaatatacctcaccattacaagaccagatatctcttttgcagtcaataaattaagccaatttcttcaaacacctcgagaacctcaccttcatgctgccaccagaattctccaatatctcaaaggcactctcggccaaggcttgttcttccatgcctctgcaccaacaccacttcaacttcacgcctttgcagacgcagattggggcgcttgccttgacactcgacgctcaatttcagggtattgcatatttcttggcaactccctcatttcctggaaatcaaagaagcagcacactgtctctcgctcctcagctgaagccgaatatcgagcaatggccaatgccacttgtgagctctcttggcttcattctatcatgactgaacttagcatcagtttcaagcttccatcaactcttttttgcgacaacagtgcagcccttcacatatcagaaaatccagtcttccatgagcgtacgaagcatgttgagatagattgtcacctaatccgtgaaaaaatcaacagtggcaagataaaaacgaaccatgttccctccaagtctaacatcgcagacatcttcactaaacccctgtttcctacacagtttcatagcttagtttccaagatgagtatcaacaatgtttacacttcatcttgagggggcctcttagaccgttaattctgttagttagttaggagggtagattggtcctttaactctatttcattgtatataaatattgtatcattagtactgctctgtatcaattcaattcatttttccaatcaataaagctcttcctttctctgtttctatactgtaatatcggtcttgtaaaattttgataactatattaactcgcataaaccaaaaacttaacataactaatcacaacaaaaacataagaataacttgaagaacgtacagaacatgaatttaatcttcaataacataaaaatagctaagatcaaaaataaaaagaaaaaagaggtggagtggtgggagtgtttgttatgagttttgatttgtgtgggaatgtggacaagagaatcaatataaaactcaagtgtataaaaatattcatattacccaataaaaacactacattcccacatacaaaaattgcaccaaacaagaagttccaatcaaatgccctcatgtcatatcctatcttataagtatagggtgggcttgaaattcgttaatgggcttgtaagtgctgcccaagctctttacctggcccatctaagtgaatatgtaaaaagagcttaccatccaaaagatttctatcaaatatataggaaaacttataaaaatattagaatttgggttaatttttacaaaaatactgccacatagaaatttattcaaaaatactgtaattttataaaacaacagtagaatacaaaatatattaactaaaaacaacagtagaacaactaaaaaacaacagtgagaactcaacacattacacactataaaacttacacaagtattttt

SEQ ID NO: 45747 - DNA, 2206 bp, Cannabis sativa
aatacgttatgacactccatactctgtacttgtttaacatacttaaaggtttgtttaaaaaaaaatagagggatacgatattcacaaaaatatgagaaaaataagtgaatatttattagaatattgttcaagcaaaggttaatgacaagttaaaaattggacagatatataacaagcttataagtggtgattaatttgagtttttggcagctatttggtgtaagctctcagtgaagcacagattcattatgtggcaatcactccataacaacttccttaaaagagataacctagtgaggaagcacatactaattgatacaaagatttgccctgtatgtgagtggaactttgagtcacatagtcatttattttttttgactcctcttcctcttggagagtcttacaattaagagttggcttggaagtcaactttggcctaactcttttgaggatcttcagatttgacttaaggcaaagagaccaagaagacttctttaggatgttttctatgctgtcttagcaggtgtaatatatgtcatatggttaaaccaaaattcatgtatatatgagaacaaatatttgagtcaaagatgtataaatgatagtattaaagaaagtttaaaaaagtagacttaatacttgaatgaaaattatctagtatagatataaatgtacttaatgttataaaggggttgttgtcgaacagaaagataaagaacgaagaagaagaagaagaatagtgaaactgaatcttgaatattcacaatgagcaatgagctctataaatacatgatacaagagtgtacactttaactaactaataacagaaaacagttaaagttacagctgcaaaaaacagagatcctagttaacactaacagtaataactaactacttgacagccccccgcaaactgagcagggacagggatgcaatgctcagtttgtcccttaagaattgaaatctagaagtggataaggtttagttagaatatctgcaatctgatcctgagctcaagctcaatgtgcttgacatgaagttgtttgttggaaatcctttctctaatgaagtaaaggtcaagctcaatgtgctttgttctggattgaagaacagggttggctgacattaaaacagtgctttgattatcacaccaaatggggggaacaacgagttgtgcaaagccaatttcagcaagtaaagattgtagccaaaccatctcagcagtggcatttgtaaggctcctatattcagcttttgtgcttgaccttgaccttgacattgttttttgctttttagaaccctaggagatcatattataccctaagtagatgcagaagcctaaagttgaccttctattattaggatcagatgcccaatcaacatcacaaaatccttttaagacctgacaactttaagtgtaatccatagtcaagagtccccttaagatacctaagtatcttcttgacaactttgaaatgaggctcaaggagattatgcataaattgtgacactttgttgatagcatataccatttctggtcttgtgatcacatcatattgcagggctccaacaaggcttctgtatagatttggatcagcaacagggtcactagcaaaacctgacagtttctctgaactgaccattggattgggaagagagtttgcacaatctattttggctatatgcaacaagtcaatgatgtacttcttttggcataagtgaagaccatcagtgagatgagtcacttgaatgccaaggaagtaatcaatgtgacctaaatcttttagagcaaaggttgcattaagagctgtgatgagattggataattcagtgagagagctgcctataacaagtatgtcatccacaaaaactaggatgaaggtaatgtgactctctataactctcaagaataaggattgatctgcctttgttgaagtaaaaccaaaggtatgcaatgatgttcttagtttgtcaaatcaagcccttagggcttgttttaaaccatatattgctttgtttaacttgcataacagatgtggggagtcaggatcaatgaatccaggaggttgagtcatgtaaacctcttcggttaactctccattgagaaagacattattgacatcaagttgcctaatagaccaatcatttaagagagcaatggttaggatgactttgattgtagttgactttataatagggctaaagg

SEQ ID NO: 45748 - DNA, 1377 bp, Cannabis sativa
ctaattagcctaaaaatatatatgagaggatacctatatagatgtgaggttaggtagttttgcttgtaatataccttcccacatatactctcttcctctttcagaccacctccttgaacttcggagagagaaatggccatggtcatggaaggtgccacctttgctgctgccgtcgctaccaaattcccctccttcagaatcatccgtacaagagccacttcctcctccgcttcttctcggaccttccgaagcttctccgcctcagcttctactctcaaagagggcgacccactcgctcctctatccgtttccctcggccaccatactcgacccgatttcccaattctccaccaggtttttctgcttcatatatttatgtataaacgttatcagtggatacaattttgttcttacctgacttcttgtttggtggttacggagaaatttctaattatttggagaaaaacagaaaaatgagactctgtttgttattaattttctgtttagttggcgtagatttgtatgtttgtgggtgttggtttattccattgctttagaattggatattgaactgtggtggactaccacataaagttgccattaaatatctgggagtcctattctatgcaaaattatgtacttgtttatatatttattgtaataacatgaagtcttgatatatggttttgcaggaagtaaatggctctaaacttgtttatttagataatgctgctacttcccagaagcctatagctgtaatgaaagctttacaaacatattacgaagcttacaattcgaatgtgcatcgtgggattcattctttaaggtacttatatatgcttaattggtatgaaattgaaaactaaaagtactagattgttttgcgaagttatagaagagggagatattaccttttttatgtgtgttcagttttaccatagtagttgggctttgcataattaaaaggaggaaaaaaaagggaaaggatatgtgttatgatttatagaaaaacttgtgtatgctactgctactgatttccattttttgtattgatgaaaatagtgcaagagcaacagacgagtatgagttggccagaaagaagattgcatcttttatcaatgcatcggattctagtgagattgtatttacaagaaatgctacagaagctatcaatctagtagcttattcgtgggggctccaaaatttaaaacaagaagatgaggtagattttttcttctactttctctatacctttctgtgtttatgcttcttcttccaatagttttatgaaagtgactttacatgctttgcaatttgcattacatttatgaatacagaacgaaatgttatcttcagatttcattgttatcatgatat

SEQ ID NO: 45749 - DNA, 1805 bp, Cannabis sativa
ttgagatagctttggtatttatattgataagagaaatactgagtacaagaattaatgagctaaaaacagttgtaacaaactttaactaactaaaataattacaccacaataatatcagattaactaactttcactatcagtgtagtcatcttcaactattccaatatcctccctcaagttgcgtcggtgaacaccaagtgtcaacttgtgcctaaagtagctaaacgaggttgtgggaagtggtttggtgaagatgtctgaaacttggtttgtggagttgacatgtctcacatccaatttgtttgctagtcacaatctcgaacaaaatgaagatcggcttcgatatggtttgtccttgcatggaagaccggatttgaagcaagagaaccagctgctcgtcgagcaatgattgcagccatattatctcagaagtggctaaagcgagtgctctatattcagacttggtactggacctggcaacaacttgttgctttttagtacaccagcttatgagatttccaccaaggaagatgttagccagaggtggattttttgttaatggaacaacatgcctagtctgcatctgtgaagccttaagatcaaggacctttgttgttgtgaatgtgaggcctagatgtttggtaccaactaggtatttaagtacacgtttgtaagccccccaatgtttagtttttggttgattcatgaattggctgagacgataacaacataagcaatatctggccttgtgtgacataggtattgtagagctccaattatactcttatattcagtgggattagttaaggcagttcctgagtcatctgtgaacttagagttagaacacataggagtatattggggtttggaatccaacatttttgttctaaggataagatcattgatgtatttttgctgagtaagaaagattgtattggattctctctgaacctcaaatcccaaaaaatagtggacacagcctagctattttagagcaaattgctttgtgtaaagctttgattacttgttgtaatggttgattgtctcctccagttataaatatgtcatcaacatagagcaagagcaataatagagttccttgattgttgttgtagaataggctagtgtcagattttgattcctgaaaatgctatgacagtaggaactgtttgattttgtcataccaagctctaggagcttgtttaagaccatagattgtcttatttaatttgtaaacataattgggaaactgagggtcagtgaacccttgtggttgagccatgtcaacactttcttgaagttctccatttaagaaaacattgttgatgtcaatttattgtacttcccaattgcaagtggttgcaatggtgaatataactctaattgtgcaaggtttgacaaatggactatatgtctcaaacaagtatattccaggtatttattggaaccccttggccacaagcatggctttgtaggtggagatggaactgtcaacattatacttgattcaaaaaatccacttgttgcttattatttgagcatcaaatggttttggaacaagaatccaagtatcattcctttttaaggcactgttttcaacatccatagcattttttttactttggatttgcaagagcagcagaaatcattgttagttatagattagtatctatggtggtgatgtatgttttgggtttgaaaattcttatttttgcttaagtgagcatgggatgcacattttgagtaataggtggagtgatggagctagaagttgaggactgatgtgatgatgaggagtggggact

SEQ ID NO: 45750 - DNA, 688 bp, Cannabis sativa
tgctctgttgggccatttgggcagccaggaatgatcttgtatggaagaaccgtgtgagaagtgtgaaagatgtggtaacgtttgcgaaatcgagtcttgatcaatggttgaatgctcaaggaaagggaaatattccctcgatgtctcctttcaaagttggagacggttcagagcagtgggttaaaccggtctcaggcatcaaactcaacgtcgacgcggccatcttcgattcactcctcaagcacgggtacggctgtgtgatcagggaccattcgggcggactggtttctgtcctggcaggtgtcttctccggctctgtggctcctgaactggccgagattatgggtattcgggaagcgttgagctggttaaaggaccggcctttctctcaagccgttattgaaacggatagccttgtttgtgctgatgcgattaggagtgcagaagcctttgtttctgcgtttgggctactggtagatgattgcaaaaatcttcttaattgtttgtcgaatgtttctattgtttttgttaaacgttcagcgaatcgtgctgcgcactttgttgcccggcactcagtctctctagctgagcgtatgttccctattaacagtgttccttcagacttattgtccattcttgcgagcgattgctcggtttaataaaagaacacttattcaaaaaaaaaaaa

SEQ ID NO: 45751 - DNA, 1243 bp, Cannabis sativa
cttcattttgtgagagatcaaattctagccaacaactctcagttcgatatatgccatatttggaccagattgataatgtttttacagagcctttgtctactaaaaggtaagtacaaacttcaaatggcctcttccccttttcgtttaaggatatgttaaccaaaataactaactgaatgttatgttagttaaacagttagcttagttgtaaatagttagttaaattttatagcaaactttctaaatttagctaattgtaatctttagttttgaattatataaataaaggaccgaagttatcattcatgataagcttctttgacatttcaatttttcttcttctttcttttctttttggtttgtaccactcagttggtttgtaccatttgccattgtttaagcttctacaatgtgtagcagattggctgatgttttatcttctctcatcaatatgaatcaaggtgctttcatcaagaatagttcccttgctcacaatgtgctcattctataagactttctttgttggtacaataggaaaggaatttctccaagatgtctcatgaatattgatttaagcaagacttatgatactgttagactataaatttttagaagagcttctaaagtattacctcttccctgcctgattcattaatttgatcatgacgtgcttaagggggtctacttactcattagtcctaaatggttatgtccaggggaaatttttcggggaaaaaaaggttaaggcaaggtgatctcatctctccattattttttgtacttgtaatggaatatcttgctcggttactactcgttgctacccacagtttgaatttcaggtgtcatctaatgtgtcaatatttaaagatagtcagtctcttttttattgatgatttgattttgttttgtaaagggacgacaaaagttgttcatgtaattcatgaaacttttttgctacttttattagttgatcaggcctccatgctaacccaacaagtatcttatttactttggcggggttaatgaaacgattaaactggccattcgggatctggttccttttgaaaagggtcattttcctcttaagtatatcggtgtaacaatgacaccaaaaaaaatgtaagtagtggatattgtatttattttcttaaaaaattcaattgaagttttatatagttggaaaagtcagcacctctcgtttgcagggagagaacaattgattcactcgatattatttggtatt

SEQ ID NO: 45752 - DNA, 1015 bp, Cannabis sativa
  modified_base (346)..(359): a, c, t, g, unknown or other
tggatttgagctattgtgcggattggattggattggatccaaaaaatgaaatccgcacttagtgcggattggatgttgtttgaccaaaaaaatgtagattgaatcggatgaacagccctctatattaccattatctcatcttattttcattactattgtggatattgtttcatatgaaataaataatagagcattaaattatgtataagaacatagactattttacttattactaattagttttaagatgaaatcacttggggctagctcaagtggtcataggtgggtgcgtgtgtgatggaggtcctgggttcgagtcctagtaaaacatgattgtaatatatannnnnnnnnnnnnnaaaaaaaaaaaaaaatagttttaagatgaaatcttataatttccaaccaacctataaagtgaagtaaatttatcttaactagagtgtgctattattttcaattcaattcaagtgcataatttgaattaatttattatatatgtacataattgataatctcatcatcacactattgcgtgttgcgtgaaatttggagtgttatattgtatatagtcaagtccttggactttttgattagtcaacaaaaacattaaaaaggcttttacaattacaatacataaaatacaagtcgaaattcgatacgcgatcttctaattcatttgaaaacttactatattacggttcaattgaaccataattataaaatttcaacgtaataaaaaaagatttgaaataggtttggttgagtttgtgccatttatgttggatttagcaaattttgttattatttatagtacctccaaacccaaataactactttctcccactctcgtgtccaattctgggtcagtaagccgccaagccagtcaaataaacaatcctaataaatcatcgcgtcaaccacgcgtatcttttcttaccttagaacccactctctctctctctctcactttctctttcattttctcgcgtcttcactttccgggaaaattctc

SEQ ID NO: 45753 - DNA, 793 bp, Cannabis sativa
acaaataagagaatattagttaaaggaagtgaatagaatttttgagctttttgagttacttgaaaaggttgtttcttagaatgaaaaggttgttagtaaagttagtgacagcaaatccgagaggcaagaaacaaagcatgacaacaaaagattcagaagattgttcaagaatatacaagtgaagctagctgaaacctgaaactgaagtgaagtacacatgcttaagatcaaatattataaatttggtggaacaacaacattggacattggctagcgctgtccatctagcaatgaaggtagaaactcaatgtactaatcaaaatgaagttgaaacttgaaaaccccaaagcaagaaagaaccattagtcaagaacagcaacaaaaacctctaacagtcaagatcaacagaggttgatgggaaataatgtcatcaaggactgcaacattatgtctcaaaatattgcatctcaatttgttaagagacataaataatttctttaagagcaggaaaagggacttaaatcctctaacttcttgtgccaaagaaaccctaatagtatcagatagagctaatgagcagctataatttaatgaaaataaagtcacttgtaagatcgagaagctcgaattctagtagttcatcaatctatgttagctcctagagtattggaaagtgattggagaagaaacaacatctttagaatcaagtacagtacatcagtcatgggaaactttgcaacattatcttaatggaggcagctaagagaacttgttttccaaataaatggtgaca

SEQ ID NO: 45754 - DNA, 706 bp, Cannabis sativa
tgtgacgtgatttgaaccgcaaattataattgcatcgcaaatgatttcaaaccatatttattatgcggtgtggtgcggacagtttgtgcggtgcaaagtaccgcaaactatgaattaaacgacatgtcgtttagtgttaaatttcttaaatttgaatttttatttcgcgctcattttcttcaccatcgtcttccccaatcaaattgaaacagttttctctctctaaactctcagaggagtttctctctctagaattttgtgtgtgggttcttcatgactgcgaagtgaaggtatataacgataaaatgtcgacgatagagaagctttgtgttcagatcttcgagaggaaatcgtggataatcgaccaggtcaagcaacagacgcttctctttgacaaacatctcgcttccaagctccttattgaaggactcgctcctccaccttggttttggaactcagattacactggtaattgtttgcactttgtccactgattttgggttttgacactttgatttgtgttttgaagttcgaatttttagttcttaggtttctatttcgagtttgagtttcatttatagtatttgactttgtctttgtgaattttcatgtctgagcaattcttgacatttttctcggagcgatgtccatagttttggtgactttgagatcaatattttgtgattagtggataattatcaatgat

SEQ ID NO: 45755 - DNA, 1066 bp, Cannabis sativa
tccaagtttttctccttcgtccgtgtttgggtcgccaatccaggtcatggtcttaggtttgggtctgggtcaaagttcgtgtctgggtttgggttcgtgtcctgagtcccagttcgagttttgatttaggtccaagttcaagtgctggtctgggtctgggtttgggttcgtgtcccgactgccggtttgagttttgatccatgtcccggtctgggtctgggtcctagtctgggtctgggtcctggtccaattccaatttcgagttcaggttcgagttacgggtctcgggcaaggtttcgtagcatgggtcctgggtcagttccctcatcaaggtttgggtcctaggtcccggtcctggtccaagtttgggttcgaatcctaggtcttgatctgagtccaggtcctagtccgagtccaagtcccggtcgaggtttgagtcttggtccgagtcaaggtttcggttccaataccaatttgggtttgggtttgatttttggtgccgtgtactactccaggtataggatcgagtcttgagttttgattcgggtcttggttctaaggctcgggtccaagtttgggtgctagatctcggtttgggtccaagatcgagttcagttcttagccctcgtttcggttcctattccagattcggtcttgagtccaggttttggtctgggtcagggtttgattccttgtccgagttcgcgtccaagtttgggtccaagtccgaatcccaatctgggtttgggtccctagtctaggtctaggtcctgacttttgatcccggtcttggtctaggtgccggttcaagaatgggtctgggttcgggtcaaggtccaggtccagatcctcgtcttgtccggggctaggatctaggtgggaatattggtcccagtcctagtcttgttctagcatcctggtccaattcctattcaggttccaatttcagctctcgggtctgggtttgggtcttggtcgaagtcccaaatctagacactgactacgggtttggtccaagccccaattatcataactttggtcaatatctagatccaagtaagaggta

SEQ ID NO: 45756 - DNA, 3186 bp, Cannabis sativa
ctacatttgtgttagtcaggaagtaacactagtagtcaattaattattggtacaatgccaaaattagtatagatctacaaaaatgactttttgctttagttgtgaaatgacagataaacattttgtgtcggttgtctaaaccgacgtaataacaacagacgcaaatagtcaagttatttgcttcatttctgaacggacacaaactgtgtttttgcttgggttgagaactggagcaaaaagtatgctctattagcgtcagttcttaaatgaagcaagaaacttagcttcaaattataaccaaagctaattagattattgcgttggttacaatttgacacataattttttgcaatttttttatttgtttactttttgtgtcggctataaaatgatacattgctataagtaagggaaaattacacatttttttacaattttctctacctgcattttcagatattagaattagcttgtataacaataacatttataatataataatgataacatttttcattgaactaagaaattgatataactaaaaaaatacatcaaatataatcaaaagtaacgatcataaaaattgtatcctaggtgtctcaataaaaaattgatgtaactatgaagtatatcaataaaactaagtatcaccaaaagtaacgatcatatagctaaaaattttacatcttacatgtatcataacaaaatataaaaaattgaaagcaaactcaaactaatgaaaaagaacaatagtaaaaaaaaatccatacttggatgctattatatatcttggcatcacagtataatattccctgcaagcacttcacatgtttgtttgcattcatcaacttggacgatctattccatgaatgaaactaagtaaaacaaatacaagcaaagtatattggattattgatttgtcaaatcataaacaaacttgatttagctttcaaaactgaaccctgtgttgttaagtaccttgacaccagaaccatgtggaataaagcaagaaactgtattggaaatgactaaactgagaacttgatccttattcatttcatgtacttgtatataatgtattcctttacctctatttgtcacccttacggtcataaactccacatcattgggatgattgatgtagactctacgaggatgaggatcaatgcttacaaccacaacctgcaacattatgtttaaatcgacatatttgagaatgaacaaaggacacaggacataaagtttacgctcagttaagctcacataaaaaactgataaagagttagaataaatatatagcaagaagagaatgaaaggtaaagcaaactgacacaaaagttgaactacagatgatccaaaaattaagcccaataaaatgttgtgtatttgttatgttcagttctgtagtcaataaactttagacatcgttccctcattttcaatacaagctacaattccgtattaaaaagaagcatggattcactagaaaaaatcttacttttagtcacaataaaattaagttgtgactaaaatattacaggggctcaaactgttttcatgttcatctggcctgcagccgaatcccaacaaatctgctatatactgttgtggtatggaagactctgaaatacaacgcattcttgattgctcgggtttctgcgaaaaagaggtacctttcaaatacctaggtatccctatttgtgcgaaacgaatatcaggaaaggaatgtatgattctagcagataaggtgacatccatgatcaaaacatggagtacaagaaatttgtctttggcggggagagctatacttgtcaactcagttctcatgtccattcattcatattggagccaagttatggtgccccctaagagaaccatacaggatattgaagccatctgtcgtgcctacttatggaaaggcaatcatgtctctcaaggcccggggccaatagcttgggaccatgtttgtcaaccaaaaactgatgggggaatcggtttgaaaagaatagcatagtggaacattgcgacaatgacaaaatatgtatgggcaattgcagacaaagaagataaccagtggattagatggatacattgtgtgtacattaaaggagaggattggtggacttatcaagctccacctcaagcaagctggtattggaagaaattgaatacggttaaaaatcaaatcaaagttgtcatggacattcaacaacacaaacaccaaatacagtatatcaaatggctacaagactctttgctctcctcaaagcaaggtgaaatggagccatgaggtatggaatagactcaacattcctagacatagcttttgcttttggattgtaatcgaggatagacttagaactagagaaagattacacaaagttaacatcattggagaagatttttgcttgttttgtttggaacatcccgaaactttaaagcatcttttcttctcttgtacattctatactatttgtctttctcaagttaaaagtaattaagcacgaatgaaatagaatacatagaaattgggagaaaataaattatattaataccataaaacaatgttaaacaatctccatctagaccctaattaagtatttagctactcatgtttatgaaagcaaaatcacacatatcaactttaagaaagggaagaaaatagagaagaaaagaatgatgaaaaccctctgaagaatgcctctaatattgcagttgatctctgaaattcgtatctgtattttctgtttatttccttctgaattgcttgactaaaatcaactccagttcaccatttatataggctttcagggactaaaaagatagaaaaacacacatattaaatgcctattcgaattaataaaccacctacacccacgtaagagaaaaagacaatttttgtgcagtttaggggggtgagtcgcaacccaactttatcatgccgcggcccgtgttggagtttcacgtttcgacggtgatttttctcctgcgtcgactgatagtattttggccatagttctctcgatattgcttggaatcggacgattcaagatgttccagaaagacaaaagagagatctagaacttttatgatttgagcttttcaaaatctaataagaagatagtagaattcaggcttgtagtttcagctatattttttttgcataattttctctattttaaatat

SEQ ID NO: 45757 - DNA, 1574 bp, Cannabis sativa
gtgttctatgttatatacaaatagatcttggatttattattaattttttttaacaatatattcttaggaattagtttggctatttccatatacatgaacttttcatggaagactcgtataagatttttgttgaaccaaaatgaattaactccaaaaactcacttaaccaccagatagagtgttggaatttggatagtatcttttgagactatagtggtggagccgctattgatggcagtaatacaacaatagacctttagtcctaactgctctaatttgttttcaaacccttaattttattgcatagttgagaatattgtttattttaagtttgggagaagacaatttttataattttaattttgatttttatggatagtttttagcttttttagtattattggatgattgtactactaaagttaatttatgacctatgcgattaaatgatgaactaacgttgaaatcccttaatgttattaagtatgtttgaaaatctatggattgtgtgcttgaatttttatgcccggttgtcatattgttataagaattatattgacgctaaaaaatggtcacattcatattatctgataagcgatagcggcaaacaaaaaaaaatcaaaactaaagatagaacaccacaatttagagtagttcactccttatattgcgatagtaatagagctacgtctacttaatacttttattgagaacttaggaaaaaataactaagtctagcttcaatttataagttttagagagagaaaatatgaagagagtaacaaatatgctatagaagcttttctctctctttaccttgcagctctgtgagctggtgccatggctaagacaagatctaagcagcagggtaagctgaaatcaatcgagaaggtgactgtgaagaagaagaaacgaggcccttcctcctctgatgcgaagaaaacgaaattgatggacgaagttctgggtgtggaaccgttcgaactttctgatgaagaagaggatcgtcaaatcgcacatcagggagccactttgaatgaattttttccagaacccctaactcccaagtcttcattgaatgcgattctgagacaagaagaggtacaacgtgatttcaatttttttctagctgctaatcatgaatgttcgaaagatgttgcaactggttctcatgctacccctccatttttaaggtctggaagtgtagtacgaaatctatcaaattcatttgagaattcaaaaaagccaggtcaggttaaagttacgattgatgacatagcagaggagatatcgtattggaattcttcattggtctgctatattatgggagcaaatccaccattgaatgtgctggatgggtttgttcgaagactgtggaaggataagattgataaggtaggattgctatcctatggtattttcttgattagattccatgaggctgttgatagagatgctattcttcaaggtggatacatctttttcaataaacgtccagtcataatgaaagcttgggatccaaatgtggatttcatgaaggagggtgtgactagagtaccaatttgggttacatt

SEQ ID NO: 45758 - DNA, 1103 bp, Cannabis sativa
aatataactaaatggactcaaacttatattatttattattaaaattgtagatggctccatgtcaactctagtctctttatagatttagtgattctttctcactcttttctggtctttcttagtttgtttttgtgagcatggcgataatgcatgagatggagagtaatacagtgaatgtttttgttgatagtgttgactcaagtgttgctcaaactctagagagagatagtaatatagaaattgaaatgatggaactctttgaagatatttccttgaataattatggcacaaaaagcttgtgtaagaaaagtaatggtagtgcaaaaataagtttgcttcggtggtaaggaaaattctgttagctatctggaacatggaggggaaatgtggcgtttgatgaagtttgatgagggtgttttggggttcttcttctcggcggaagatgactactcttatgtcatggataaattaccttagttggtggatggtgtcttgctccttaagcaatggatgactaaaggggaagtctataatgtgaaggtcgatttggctcggctttgggtccaaaaacatggacttcctacacggtgcctatcaaatggcaatgctccttgttgacctcaaaaggtggccaatcgatagcaaactcgtatgaacccaatgtttgtcacgcattacacaacaagaacaataaagtaaataagacaagaatttttgtagaggttcgacccccttggttggcgggtaatgacctactctccttttagttgtattgatacctagagataatactatccagatcactgtgggtgagatctgatatagctctctataaggttacaaagcatggatcaagtaggcagatctctaatgagagagagatatggccttagaggcatgtgagagaggaagagagaagccacttgggcatgtacaagagtgagagggaagagagactaggatttcaaacttaggcttagaacttgatcacttggaggctaggaatagacctaggttttctaggttagagttaaggctctttatataagagagcctaaaccctaatttacaattgaaaccattagatatttacatatttaatt

SEQ ID NO: 45759 - DNA, 3516 bp, Cannabis sativa
aagattgcacaataattgaaaaagcattgtagcgtgccttagcattagggcgttacacttacagcaaatgctctgctacaattgctaaaggtaattcgactctccctcctgttctcagatctgggactgtgttgaggaatttagaatctacttttgataaatctgagaaggataacagagtcaaaatcactatggaagatatcgaagaggagagcaattattggaagtcgtctatagtctgttatgtcttgggagccaacccacctttatctgtattggatgggtttgtgagacgtatctggagtggaaaatagacaaagttggtatgttttcttatggagttttcttgattcgttttgatacacttgagcatcgagatgaagtccttaatggaggataaattttcttcaacaagaggcctgtcatcatgaaggcttgggatccgagcgttaacttcaaaaaggaggatatcagaacagtacctatctgggttcaattatcggatttggagctgaattattggggtccaaaagctttgttcaaaatcattggccaagtaggtgaaccactcttggttgatgatgctactagagagagagagagataagctcagttatccgaggattctcatccaagttaaaattcatcaagaattgccagattaaatttactttgaagatgtacatggcaataatatacctgtggaagtttattatgaatgtaaacctatatgttgtgggaattgtaaaggaattgggcatgcctcagctgactgtcgtaagaaggaaacaatgaaacaagaatgggtgattaaaaatgataagaggaagactgatgaaaaaatagtgacagcgccaggagaatttcaacaggtcacgaagggctggaaagggaaagcaaaaaagattataacaggcccatctacctctaatgcatttcaagctttagcaatgaattctatagcaaatgagacaatgacagtgcttgtggaatcaagacaggagacagaagtgaagaacacaggaggagagggagatcctcctctctcaaatggataagattctctattggaacgtccgaggaatcaataaccagcaaaagaagaatcaagttaagcaatttattgctagtcaaaaggctgggcttgttggtctccttgagacgagagttaaggcctcaaaattaggggccttatacttaaacatgtttttgggatggtgttttactacaaatttagcatggcataaaggagggagaataattttggtttggaattctatacaatataatgtaaatataattagttgctctagtcaatacattcaaactcgggttacaactactgaaaacaattatcagttctttgcaaccttcgtttatggatttaatgatgaaaatggaaggaaacaattgtagcaaggttacaagatcatgttagtgctgatccgtggatagtacttggtgactttaatgacatactcaataaagaggagcgaatcggggacagagttaagcatggtaactcgactgcatttagtgattgtgttgcaagttgtcagctggtggacattaaatgctcggaaagtttttttacctagtgcaataagcaaagtgcagctgatagaatatactctaagattgatagagtattggtgaatgaagcttgggttgaattatttccttctgctgaagcaatatttttacctgaagggctttttaaccacactcctgcagttgtaaccatacatcctgctatggaaagtggaagaaaaccctttaaatagtttaggatgtggtcatctcatcccagttttcagctgaaggtttcggatgtttggaagcaaaaaaatcaaggcacaaaaatgtttcaagtagtgaccaaattaaaagctctcaagcctatctttaaaaagctgaataggaatcacttttcacatatacatgctgcagatatcaaggctagacaggagctaattgacaaccaactaaagcttcaacgggaccccatgaacgccctgctacagaagcaagagtttgaacccagggaaaattatgctgcaatacacaaaaattactgttcttttctgcatcagaaatcaagagttgcctggataaaagagggggatgaaaattcaacactctttcattgcaggatccgcgagaggaggaaccagaataaaatcatgtcagttgtcaattatgatggagtccgagttgatgattctaagggtatcactgatgccttccttgcctattatcacgacttattgggttctaccatggaggggaggacaaaggtatctaaaagcatcatggccaggggtccagttatcacaacaacacaggaagaaatcttgttagctgattttacaaaagatgaagtgaaacaggcagtattcagcatcccagggagcaaagcaccaggtccagatggatatagcagctattttttcccagataacttggagcttgttggtgatgaagtatctgaagcaattatagactttctacatactggtaacctgttaaaggagatcaattccacggtactcactcttattcctaaaataaaatgccccaacttggtgagtgactatcgacaaattgcttgctgtaatgtattatataaaacttctactaaacttatttgcagtaggctcaaaagcattttaccagatttagtagcccaaaatcagggaggattcatcaaagagagattcattgctcataacataatgatctgtcaagatctcataaggcactatgggaggaaatctaacaaggctaattgtatgatcaagttggatttacaaaaagcttatgatactatgagttgggaatttttggaggaagtcttgagggcatttcgctttccaacaaaattcatcagtattatcatgaaatgtgtcacaacaccaaggttttcccttatgttcaatggttctatgaatggttatttccaatcaagacgaggactaaggcaaggagacccgatgtctcctttgctctttgttcttagaatggaataccttagtagaatcatgaaaaagttggggaaaaggatgatttcttttttcatgaaagatgcagagagcttaaactaaatcacctaagtttcacagatgatatgcttttattttgcaggggtgattttaaaagcatatatcgactgcttcaaggcataaagctattttcaaatacctctggtttgctaccaaacaaaagtaaatcagcaatttactgcagtcctatgaatgaaagtgaaatcagaagggtggttgacatgtctggtttcagcagggctgagcttccttttaaatatcttggccttcctatttgtgctaggagaatatctaaagaagattgtaggttgctggtggaaaaaatgactgcccgaatcaaagtttggagtaccagacatctctcatatgctggtagggctgttctaataaactttgtacttctaaccatacatgcatattggagtcaagtgatgctactacctaaaagagtcat

SEQ ID NO: 45760 - DNA, 1038 bp, Cannabis sativa
tacccaatataatgttaatgttataattggagctgtgcaattattatttttctatttttaggtacagagtaaatcaattttattttattatataatacatgataattgactgatcatgatctcttttgaaacgataataattgacatcattctaaatgacaatattaattaaaattatttcctgtgtgtgcatgtttcactattcattgggactcaaagtacatatagaacatgaatatatgattttttgtgtaatattttggtgcttcataatttgggctactactaaaatttagtgagccattgaaaaaaattatttttggagtattattttgaaaaaatgtgttatttttcaaaattaataaaaaataatgtataattttaaaagaaaaaaaaattaaggtcttaagttagatagaccttaagcacagacctaccctagggccatacttgttcataccatcaacgttgagagttgaacttgtaaggtgctaatttgaaaaaaaatatattattattttatgcactaatacatatgtctaatatgccttatagatggttagtaatttttaatattaatcataataatttaaaatatatatgtgtcaatgtgtcttaatacttataacttatagtatgatatatacatatattaaaacaaaacaatcaaaataactatagattgaacatatatactaaaaaaaattaaaattgtataactccaaccattggtgcatgcaaatcacttcaaattcaaatatgaagcactaggtgtttttattcaattcaaaactctagtggaaaacaaatttgataaaaatatcaaaagcatttgtccagactagggtagtaatatcacccattcatagccattgttcaagctcatggcggcattgagtttcgagactcatgtccacgtactttagctcaaaataattgagttgaacgcaaacataaatatatatagttaagatgggcttaaccttgctaatacccatattacataaggggcgacaaatcaaagtcgcccctaatacc

SEQ ID NO: 45761 - DNA, 1268 bp, Cannabis sativa
actattagtagaaataaataaatacttattctcacacaaattgtataacgaataaaatttaaaatatatgtatatttttaccgggtattacacatctcagctgcttggccatctcaaccgcttttggtccaaagaatgcgaagtcgaagtctggcagcttgctcaaggtagcgtacatatagtcagtgaaagcctggtcataagacttctttgtgttctctttcttagctgcaagatcacgagtaagactagtgttgtcctcctccaacttcttgactcgctcattaagagtcttgacttgctcttccacctgacctttgtctttgtcgagattctcaactttcttatctttggccgccacatccagctttgcctttttaaggccctcttgaagagttgagttttgtttcttcggaagattgagatccttaaggctcgcaacaaaagcccgcaaaaacattgtcatgaattgggaggcgagttcaactgaacgaggtagcagatcctcagtaggagtcccctcgactttggaaacgaactcatcattcacgaacttgtccttcaagaccatgatgtcatgagccttgacagcaggaccgatcacaactttctttcacaagtcagccacccacgtaggcatgatgtcacttttcctattttgaggagtcgtaggtgatggcatcgcagtactagccttagacttgcgattaaaaactggagcttgtttcaagaaagtaatgtctggaagaagaatgacaagtaaggatttgatagggtaaaacaagatcgttaaagtaatatactaaattatattacctaatgttgatctcgaggtttgcttggatagacgcttgtctattatttccttttgcttctaagaaggctctttgtacattggttctcactgaagtttagtgtcctctatgatgagcttgtgttctcacaatttcacggtagtacacaacaaacgccatctgtgatcttgcacaggaaggccgcttaaaacttcagcgatttctagacgaattgggtctagtacaaatcgagccagtctatctgcaaataaggaaaataaaaattagtgtctaaaaagcaatgaaaataaatactaagtgtaaaagtacgcgacgtacgaggtcggtgattgaagtcaatcctgacccctggcatcttaaacgcgtagaaccattttgatttcctatccccatattggaaactatgccttctaccccatttatttcagaattggccaatttactaaagcaata

SEQ ID NO: 45762 - DNA, 1632 bp, Cannabis sativa
atcatcactaagctcttcgaaagtctttgatttgatcagcatgtcgtctacgtagacttcaatgtttttctccaaaacatctttaaacattttatttaccagacatttatatgtggctccagaattatttagcccaaagggcattatcatgtagtagtatacacctttatccatttagaaaatgttgtgctcttgattcgcctcatccatcttgattttattgtagccaaagtatgcatccatgaagcttaaaagtttgtatccggatgtggcatccaccatttgatcaatatgtgaaagtggaaaataatattttctccatgttccattaggctttgaaaccaacacgaaattggctagccaaactagatacaaggcttcctggaggaactctatagaggttagtttttcaacttctcatttcactgcttcaacccatactggatggaacaatcttcttttttgatgaattggatctactttttcatcaatgttctgagtgtggaaaattacatgaggactgatcccaatcatgttagaatggttccataccaacacatcatgattcttcttcactgtggataccattttctctttaatggccaaagctaggtttttttttttactttgatgaccttaccatgatcttctttgttgatgctcacttcttctacttcctccatttgtttgattattctttttacaattttcttaatgaaaataacaaaatatttactgacacttttggaaaccaataaaatatatgtgaaagctaaagaaataatattagagtttttacgtggttggggcgttaacaagcgttagcccatgaatcaatattattacgataagactggaaaatttatacaattgtgtgaaccctaggatttgcctgagcaattgaaaaatgagattccaaccctttgcacgaatggctcttcttatatttgtaatgctagggttcttatttatctgactttgcccactaatggggtaaaaacaaataatatattaacttgggcccatctggtggagctcgacccatgaggcaccaactctatgctgatgtggatgccacatgctgataattgtcaaaatcgtgtcctatttttgtggataataaagacacattaaatgattgattgccatttactatcattccatactgggaagatatgatcctcgaatgagatcttaagatttaagtcttgatatcgtgagatctaatgattaattccatgaatatgatatggagctggtgtcttccatattcacgctatgctagaggattatcttagtgggatgagtcacttttctatcatttagaagagttaatttcactaatggatcttgcccattatcttagttgggccagctattaggcctaaagtaattgagttgtagccggctttagaaagtacatgtgtcctcatctggaaatacaaaaaatagggatgtttcccattttgaggccaatagattctatcccatttaatacatctatttcggccggtaacatccttattgtaatatcaagattaaaatagtatttatttattttttttgggatattaatggtgtgaggataattatctcatttatttgtgttgttagtgagtagagactattgct

SEQ ID NO: 45763 - DNA, 1104 bp, Cannabis sativa
cgctcaagtttgggatgatatctccatagatttcatcgaaggtctgccaagatcggaaggttgggataccatcatggtagtagtggatccattgagcaagtacggccattttgtcaccctaaaacatccatttacagccacaacagttgcgcaagtcttccttaaagagatagtccgactccacgggttacccttgtccattatttcagaccgtgatcggatctttactagccacttttggagtgagttacacaaattgcaaggtacatccctcaagcgtagcaccgcttatcatccacaaacagacagccaaacagaagtggtgaatcggactcttgagacatacctccgttgctttgctaatgagaaacccaagcagtgggctaaatggttggcttgggcagaatattggtataatacttccactcattcgagcaccaagcttaccccattccaggcattgtatggtagggctcccccacctttgattcgctatcacgctagatcttcgcatgtgtccgcagttgatactttattagctgaccgggatgccaccattgatgacctacggatgcaactccttcgagctcagcagcgaatgaagcaccaagctgacaagcacaggcaccatgaggaatttcaagttggcgacttggtctacctcaagcttcgaccctaccgacagcaatctttagccaggcgtcgcttcgagaagctcgctgccaagttttatggcccttttaaggtaacagaaaagataggtgcggtagcctatcgactggagttaccagcttcctcatccatccacccggttttccacatctcgcagctgaaaagagcacatggctcgactctttcatcgccaacgttgcctcccgtgacacctgaattagagctacaagttgcacccgaagcagttcttcaagtgcggcagtcagctaaaaatggcctagatgaggtagaggtcctcattaaatggaagtccctgcccgaatttgaagctacatgggagagctttgacaagatcaacacaacctttcctgaatttcaccttgaggacaaggtgaaagtgcacccccggggtattgatacaccaccaattag

SEQ ID NO: 45764 - DNA, 4173 bp, Cannabis sativa
aaatcaacaacaaattaacaagagtacaacataaaaagactgtattttttgtaaataaaatcaaaaaatcgtaaaaatatttaaaattccgtgaaaccgtagttttgtaatttctttttattatttttgtgcatttgtgaaataatccctctataatttaattatcacacattgactatccatataattataataatattgcttttttataattctgtacaaaaaaatatagtaaacatattattgtaatattaaatgttgtagatatatgttttaaaataaaaaatattactcatataattataactttaatcatttatttatgagaaaggtagataatgaaaaataatttttgattggtatagaatgacttttgaagtcattctatttaggaaaagtaattcattagttaacatgaattacaattcctattggggtgagttttccaatgacaataaactaaccaaacacttgaataatctttttttaggaataacaattccattcctacactcattcatgtaaaccaaacactcctcttatcttctaactagaaatcaacctgtacttggcaagcgagttaatatttttttagagtttttttttatttttatacttcaaagtaatttttttttatatttttataaaattttacatagcaactcacgtaacaactaacaggacaacctaaatcacaattaaaattcacatagtaactcatataaaaactactggagcaacccaaactgtaaatttgaaaagaaaaaaaaaagttaaaaaatagtatatggtgtagtttccttattttttttttttatcttaattgtttattaattttattatatatttattgagtcattattaataattaaaatattgtaaaaaataaaatgataaaataaaattttaattttaattaaaatacttaatttattgagaatatttaaaattatgcacaaatttatcctagtaaattaagtattacaaaaatagaatgggtcaataatttaaattggatcctatattgtgtataaattatcttgacatttttaattgatatttatcataaaatttaaattatatatcatagataattttaatgaatatttattaacgaataattttttattttcttaatttatgatcaaaacacatttaataaataaaaactactatattcaaagccttgttattacaggatacatttatatatagttgctactacattaaagttattgttatcaccatatcttatttatattcgtcactacattcacaactgttagcaacatcgttgtcttcataatgcattaaaatagcatagtcattatttacaagaattgtatcttgttgacttagaaatttgaactagacttctaaatcacactcgctcgctaaattggcatgaatgaataagtagttaaatatttataagagagagagagagacagtaaatttatagtagttcactccctatatcgcgatagtaatggagctacgattaggagctacgattattttgagtttattttgagtttttatttctcacgagatggtaattacatcaatagactaaatgacagaagctcaaaattctagagatagaaaatcaagagagagaagctttgcccttgtgggtagttttctggatgtgaaaaatgagctcagggagctctccttttataggtgaaggcggccaaaaaaataggaaaaaaatacaaatattttttacaattgataatgatctaacggtaaaaattaactcttggtggtgatggccattttttggagccctgtgggtcccactgcgggtaacctagagcttatttttactctcttgtgtgtgaattttgactacgacagcttcagaattatgtctagagtgtgagacactacttgatagatcattgtattagcttcaaaagtcaagttgaatcgtgtcaatcagatcataattaagtgagttatgactgttttactgaaggcaattcatgacccagcaccgaggttgacttgtgacgtcaacttggacgctgggtaagtgtagaaatgtccaagggatgtactctaagatgcctaagctatattttgacatcacttaatctatttatgtgttttggcgaaactagtcaccagttctcggagttcttattttgcaaaaataagagactcgaaactcttcctttttgagtgagctggaaatgaggatgcaaagttgtgaatttgatttctctaacttcatagatcatttttattgtgaaaaactagacggacggtcgaaatgatattagattcggataagcagaacccagtgcactaggcctcttgtcaacctgggcgatgggtacttactcccaagctctcgagatcccttttttgatacttccacgacttctgaacttgaggacagggtctctatcctgtttttaccattatggatttaatggtcgcatcagatttgacatttgagcaattgaaggcaacgtcccaagttaattgtcaacttgggtgctgggctcaaccctaggtcatactgggcgttgggccctgtttctagggactcgagattgtggttttctctttgagtttgcttgaatcttcattatttatgatgatagaaaaaatacttagaacacttttttctaaacttgatcgaaaataaccaaggttgagaatatgtcaacctaggcgttgggcccagccccaagtgtcaacctgggcactcggtcccccttttgccccaccaaaaattttatttggacctcagaaatagttaaatctcaatattttttgttaatggagaagatgctagttatgatgactatgtcatattcttctcgcaatgcaactaatcttcttaagatgctttatcataaaaatagattatcagcgcctaagtatacttcaagtagtacttcttgcattcttctattaaatgctgagtgaggcatacgcgagacgcttatcacaatatgacaattatgaggtgaactatgctgggaatgttgcatttagtctttcaacatattcaccagtgtgtgggtcaatgagctgcgagctctttgaataattcattatctatcttttccaaatattgtcattctgatatctattttgtgtatcatgagatggaccttctttgtttttcgttcatttctcatcattcagtagttattattcatgactcgtcgttatctttaaaagggtgagtttgaatatttctaccaactgtactttccaaaaaaagttgtctgaatgtatttattattttataatttgggttggttcatattccggcttcattacacgtgtcagcaccatattgctgcgcgaaatattagtataacacttatccatgtaatcgttcgtgaaacgtagacaatccccttatttcacatttgcatcacatgagatgacaataaataattgcgacaaccgctctttgtttttatctataaacaattatgttgactatacttgttcatctcgcaatataacaatcctcttaggatgctttattcaaaagatgactttctgcgcctaaatatactctgggtagtacttgtcgcgtatgtccttctgcaaatattgagagaagtaaacatgagaaactatcatagtgtgataattccaaaattaatcatggtgggagtgtttcccttagtctttcatcatactcacgagtatgtgggtcaatgaactgcaagctctttaaagaattcattatctaccctttccaaacactgtcattctatattatattctttgtatctcgagatgaaccttttaagttgattgttcacctcgttagtctcacaaaatggtagtttttattcacggctcgcccatatctttcaaaaggtgagtttaaatatttatagctattgtatttattgaagcgagtttattgaacacatttattgctttataacaaaatagtttattttctaacttttaattaatacgtgtcatcaccatattgattgctcaaaatataagtataacaatgatatttttatcaaaattacagttaatagccatagttacaaaaataattaatagaataaggatgtcacatttaatttttaaattaataatatacataaaaaaaaaataagaatgtacattgactaaaaaaattaaggaattaaaatcaatagaaaaaagaagtta

SEQ ID NO: 45765 - DNA, 557 bp, Cannabis sativa
attggagctttcattgaagattccaaaagcttcatggaacttcacttttagacagtaattactaaactttcaaacctctgctgctatttctactcttcaaataatcaaaaatgggatattgctttgcagaaaggaaataatttgactcacaactagtatgattctcactatacattcctaaagcaaaaccacaagctaagttgctccaactacaggacttaaactacaaattaaaaatgcccaaaatgtaaatctaatggactagcagtaacttgagagtaatgatagagcaaataagtattacactcacagacaaacaacattttaaagtttagaagtcatgaaacatcactgagtagaatgttttgagtgtaatatgtgagtctacctgtcattacatctaacttaatactgtatatgtaacatataccatcttgtttttgcattatatgaaatactgaatcttctaactcctcaccaaatatgagttgaaattgcctttaacacaatctgaaaacaccaacttgtccaatgcatgaataggaggaaattcttaa

SEQ ID NO: 45766 - DNA, 3620 bp, Cannabis sativa
ttattttttaaaactaatattatgtggaccactaaaaatttgccacgtggatagtccaccgtggtactttattgtgattttttaatggaggtgtacagagcaaaacggaaccagagtttaggtagttttgctcccaaaatttcagtttttgtggttaactgttacaaaccgtaaagtttaggtaatttagccgctaatatcccttattattatatataatattattaactacaatacttaaaacaaaaaaattaataaattaatatatatgtataacgaccagttttagttttttcgaccaatttattataaaaaaattgactgttgaatgacggttttaactgttaacagttttttcagttttccgttccgccggttacgatttcaatagtgttcggcaggtcggtttgaacgattttattcaattttttatattttatgctcagccctacttgaggctagctcaaatgaccataaaaagtacgacagtgcatgtgttgggggtcctaaaatcgaataccaaattatacaactataagtatatatatataaggcgctctaataaaaattattcaaaattttcaaaaaaattataaaagctacaaataattacattgcacactatcacataaaattttcttaattacgatcttttacttgccaaaaactgaaaaatccctatcattaggaccaaaaggtatgaccctactttttttttttttttttttcatttataaatatataatttatgctaaattaaacacaactatttgatttgatatatacaatgggattaagagggtgtgtgctgtaaaatctactagctagctcatttataatatatgttaaaaagatacatatataaatttatgtatacactgaagaacagctgcagctggttgtatgttgtgatgtaatttaatctcatatgatgcagatcttaactcatgatttttcaaaatccttatgatctactttatatttgttaggttattataattcatattttgagtaaagaaacccacatgtccaccaaacttgacgacttatataatttaataataaatctaacacaagccccataacgtttttaaaaataaatattaggaattattatataccacacaaaagaaaaagtcatttgaaacatattctttcccatctaacttatttcatttaacaaatgattggttaggtatcttttactagttttatagtaatctctgttaaaatagagtatatagtaaattgaacaccaacccataattattttctcttaaaaaaaatgcaaatattatatgccacaccattggaagcatattcttcacatcttccttatttcatttaccaaatgattgacttaacctctctcattggttttttcatcatagttaaaagaaaaaaaagaataaattcaaaatggaacataataggctttaattgattgaatatataatgaatttcgtataattaaaattaaagttgggcatatgattcaatttaatatttttctacttatatgattcaatctaatcaataaatagatttagaaaatcatcacccaatctgatctaattagatctcaaattaaatttaaaattagattagatcgatttttttaattaaatattcaattacacatctaatttttaatattaacttaaaaatataaagaaaaaaataaataaaaactaaatatcacattttattaagtttaatactagaggtgttcatcaaaccgtccacactgcacaaactacctgcactgcaccacaccacataaaaaatacagtttgaatttctatgcagtgcagttgtgttggtatttttgccaaaccgagtggtgcaatgatgtttgtggttttgaatttaataaacacggttcaaatcgcaccgcactatatattacaacgttactactttttacaatataatttaattcttttgtttcatataagaacaaatatatgtaatatgtgtatatattacattattttttagagacaattcaatataatgcattgatgattagtatatatgttatgatattaaaattttaataagattttttttacattgttaaaattttattagattgatttttaaattttcattacaatgtttgataattataatagtgtaaattgctcatattctaccgcaccacactacatttttgtagtgtacgtagtttttgcggttgtaagatctcgcattgcggttgcagtttgagaaattacaaataccgcatatgtagtttggtttgaaaaaaggctacaatctgcaccacccaaccctgaacatccctatttaatactccataaaaatatcattgttaaacgtgtaatgtaactaaaagtttgaaataactaaagcaacaatattactaagtgataaaataaaacaaaacatcagcacaacaaatatacaaaacaagcaaatattactgttaggaccttcggacaccatctatctccacattaatatgatattgtccactttggacctaagctctcacggatttatttttaggcactttcccaaaaggtctcattccaatgaagatagtgtccatccttatattcctaagacccttcccatttctagccaatgtgagactttgattgtacacccaacaatcatcctctcaaataaaggactaccttacgattacagatttaaacattgagcaaccactcaagaacatatttccaactcccttggaaaattgcaaatcgaatcacttgattctaacaatcaagatattcttgagtaagctagatgaatctttttaccagctagatttgaactcccttcaaatcaaatctgaacctctgtcagctctagcaacaagctgcacctcctttgtttgccattctgaggattcattctgataccacttgttacgatcgtcagacaccatctatctccctattgatatgatattgtttgctttgggcctaagccgtcatggatttatttttagacaccttttcaaaaattctcattgcaatgaagatagtgtccatccttatatactcaagatcattcctatttttagccaatgtaagactttagttgtacacccaacacttacaaattcaacacacaaaaaaatttagtaaatatgtaatttttattatacatatataaataaaaaataatttctttaatatatataatgtaattgaattggatcgaattatttttaattaacttttaataatgatatctaataacagatctaatctaattagaatgtaatttttattatccaatctaatccaattgtcagtagatatttaattttttttataattgaactggattggatgttgtccacctctaatttaagtagtcatatatataaataaaatagactttaaatattaattattttcatcaaaacaaggagtaatacaatgagggtagccaatagacacaccactagtgttgtaaatgcgggccgagttttatgacatgggatgaaactgatacgagtgaatgaggcacgagcacgatcagatatgaaaaaatatgggcataggtatgacacgacacgatgatacagattggcacgacagggcacaaaaaatatggacacaacaagctcaaaagac

SEQ ID NO: 45767 - DNA, 2598 bp, Cannabis sativa
ctaaaatagcttctagaaatgttctccaatgtgtctagaatgtcaatttgttatgcaaagtgattacaaaagaaaaagactattttgccaaacactcacaattgtgaattgagattgtgaatgatcttaaaaatgttatctttttctttttttgaaattaagattcctatctaaccctaccctacaatatttggggaccaggaaattataacaattgctgtgtaagtacccagaagggactcgaaccttagaccttgtgggagcgaaccctcttgggtcaaaaatgtgatctttttcatgccaaagattttcttttttctctggttttaatattttcttacatgattttacagaattggtggttcaaaatcataatggctatgcagcaacaacattactatggtcatgaatggaaacccatatcagaaaattcatcaaatggttgttttgattgtaatatctgtttagactttgctcatgagccaatagtaacactctgtggccatctttactgttggccttgtatctacaaatggcttcatgtccaaagtgcctctcttgcctctgatgagcaccctcaatgcccggtttgcaaagccgaaatatcacacaccgctatggtacctctctatggtaggggtggtgtcggccacaataacaccgagcttgaaagaaaatcggtcagaatgggaataggaatggaaatggaaatcccgcctagaccatcagcttgtggtgcacaaattgcccttacatcacctactactactactactactcgttcaggtcaacaacaacttccctatcgaaatccttaccaaaatcaacaacattaccacgacgaggatgatgatttattatcatcctcatcgcccatgacaggttttcatcaccctgttgtggggatgttcggggatatggtctatgctagggtttttggaaactcggagagtttgtactcgtatccaaactcgtatcggggtctaatagggagtagtagtagtagtaatccaaggctgaggaggcaagaaatgcaggctgataagtcacttaatagaatttcaatatttttattttgttgctttcttctttgccttattgtcttttgattcttctacacattgctcattttgtaaactttgtaaagaggaaaaaaagatattgaggtgagcttattaaaaacatagatatatttatatatagatgaattgggatctattatatgtattaattttcatgtgaatttttataacccacattagatgttttagccaataataaattatttaataaactatgaagatataatgaaacaattgacatttacttaaatttttttttgagatttttgttaattttttataactagattctcaaatctcaactcaatatgtttttttttttttttttctgataaaaataaaaatgaagtgaaagcatattacattttggttgttatggttgccataaaggaatgggagagagtttgaagcttattaaataataaaatataatattttttttctagagaagtaacactttgttgtagagctcatactgaaaaaaagtagttaaactaaaaatgacatttatattaatatattttagttgtattttttgttacaaaatatcctttatttatttgtctaattgaatcaattattaaaagaattattggtgacacttgatatatttaatagagttaattgtgattcttttattttttgattttatatatttaatttttttattttttatgtggcaaatttttttatatatatatatattttttttgtaaatttaaaatatcagctggatattatcattaaataccaattgaattattactgtattgactttgaagttttattttcacgtatatacatgtgtacacaatagttattcaattggtatttcacagtgatatttaaccgacgtctcaaatttatattaaaaaataaacttaagagaattttatcacaaaaaaaaaataaaaatataaaaaattaaatataaaaaagtttcgccttcaattactctttaagaaactttcttctctttacttgttttgttgtgatgggaaatcttacaattaattttcttaatatattatatatacagataattaaactaaagatagttttgtaagagcacttccaacaacttctctactctattctttaaaataccttatcaaaactccattttctttattttacctcacacatttacattacactatacatcagcttctctatatttttctctatatcatttaaatattatatttttacatacattttattaattaaaaaaaatatgaaaatgagtaaaaagaataataaaaaattaattaatttaatgaaaaagagaaagaaaaagtataaaatatgttttacctcttcactattcatgagctaaatttagagaaaaatttcttggagttagggacgagttataatagctaagagtttaaaacatttgttagagcttaattttaagctcttaactattttttttttagcttttagctattataactcatttattgtgagtggtctaacaaatacttcatacacatactatttattttcctaa

SEQ ID NO: 45768 - DNA, 1788 bp, Cannabis sativa
catcagtcccatgaatgctcacgtcattcaacctgctcgcatctcccattcaacaaaacggacattgtggctagcagagatcgactcattatccgagcaaacttcaatagcagtctttgcatcgcgactcttatcatttttgtcccattagaaattacgaacaacacttgggtgttgtcaaaggatcttcaaaggtttaaaacataaggaagaagaggcttatgagaccttcctttccttaagaggtgtagttctcttttattcagattggaagtagctttggctctaatatcacctcctaaggctcgaatctcataaaagtccatctcaccaaacttttttaattcttgtaaaacggtttcttgtgcctgaaaaaattagatcatgcgctaccttcatctaattgaaaattaacctcttgcccaaaaaatgaactagttttaaatccatccagtatgtccaaggccttcagcccaataaaatcctttccaacaacataatgcccaccacgagaaggaccaggcccaacaacaaacaacccccgacccgtaccattagcaaaagccatgtcatcacatggattcaaaatctccaaatcattttcttcaaggttcaaaatggtcttctctaaattaggcaactcattagaaggcttttctccctctaaatttgaaaacccaacaccattaccagagacgacaatgggtgtttcacgcatgctaaatgagtttttggccctccaaaccgtcaggcaacccgtacgaggactagtacggagccctgtagtcgttgtcaacgtttgcctcgaagcacacagaggcttagaggaaggaaccctaaggttaatcgtcccagatacacactcaactgtcaccggcgacgaagaaatcaacttgggtttcgccacagacattcaaggaaaaatcctgagaaggaacaatcttttcaccagaaaagacatccacatagggaaaagaagcaaataaccatggtccgaatatgggaaaagggatcccaaaactgttcaacaccgtgtctggggaggatagagtacaaccacatcgttgatgcctcagccagccataatgaaagcataatattcctattttctcatatttgaactgtaaccatcttctaacaccatttcataggttaaagaaacatcttgagaagagtggtttagcaatatcgatcttaacctgaactttgagccatttggcctaagttgcatgattatcctcatccaactcaaccactattaccttacaagcaagggctcccagggattttccattagcagtggagaaatactcatgagggagaagatgaatctaaaaccaaagacgaagagaaccaagcgagatcacgcctgcatcactcgaggttcaagcttggagaaccaaagtataacctttaacacaccatggaccattctccagagcccaaactctatcctcatcatgttcaaaaccaaagttaaaacagttaaggttcatagagtcttcagcaaatttaaccacaacaatcaggcatttccaaacagtagccacaaaatctttcatcgaacgttcatccaccatcataggagccacctttttcctgtacagacaaaggctagttagaattttgatagaggtatcacaaggggtcaaagatataatggcatcattaaagggaacacacctacccttgttgcacacgttggaggcattaactaactccatcaccaaagacaacaaacaaacaaacaaaaccaccaaccacctaaacaaccactaactaattcac

SEQ ID NO: 45769 - DNA, 2194 bp, Cannabis sativa
aaaaaaaaattacacaaatatctcttacatacaccttcaacccacacgatccacacttcctgagatcgaaaccttcatgcgatgcaatgagatcgacaacgataaaaaaacttcgacagacgaggaagcaccattaattccagcgatgtcacttgagaagaagaacaaactcaaatcgaaaagcaaccataagtgacagagaaaaaatctacagaaaaactggtatgaaacatcaattcaaccctgatttataattcaaattccgtaaaactaatactcctaaaaaaattttacaaattcataaaatgtacatctgtaagaaataaatctcaagttccaaatcaatccaaaaataagtataatgacaaaatatatatcactataatagttaatactatgattgtttcattaacatttttttctaaaattttaacaccagatttattccgatgacctttatcattcattttgcaccacagataaaatattatttggtttttttttttttttctttctttttttttttatatagttgtattatagttggtcgtcagtttaaggaacactttaataatagacgtatcaataattacaaatggataatattacaatagttttaatcttatttacaggtattttatattaacaattcaacaaaatattctcataaaaagtatttataatatggtcaatatttttatctttttatattggtttagttaacgttggtttaaagtattgttacagttattttttcactgaatattcttaacgtagaaaaaattattcatataaaaaattgttaaatcttttttttaacgatgttcagtcgcattgttcatatatagttgcccctatgtgttaaattcgtcgcataatagttgtgctacgaaaatattattgtataaaaaattagggctcgaaattgacaatacacgactcgtattgagaaatctccattgtggtaagttttttatattacatattggttatttatatatgtgttaaagttctaaagtcgatgtctagcaacacatgcattacttttaaatgaattgttgcattttagtttctcatcagtttttgtatagttgacttaccataattgcattttgaaaatttcaggaaggggacccaattctattttttatattttacaatgggtagtttaatcgaggcttgaattctgtaaattacgaatctagtagcgaatttatctcaagggatcgcaaatatgaagaactagtacataaattgaaacaagtgctggaatgcaaccaaaaaaatactcaactgtaactgaaataccaagtaaaacaaggttaccaactgttgaggataaaggacggtccaagccaattcttttacataaaactgaaattgaaaggacctgattttacaaggcatccattgtgtgtgatacagaagaccaaggaaaagaaaatttataggtgcatgggaaacaaaaaaatagaataggagcagcaaatgtggccaaaaagatcacaactggaagacatgtcataacaaagcgactataattgagagaacattaaatttgaattctttaatttttttttgtgaacttttataggcagaaatattactttaatacattattagtttttaaaaagttgcataacaattgttttatagttaaatgccatatccaaattgttataaaaaaatgtaaagcattagcaacaccgtattaaaaacattacttagaagttcaaaaaccttttcttattacattgagtagcacgttgataattcaatagtttcccaaccgttgaatgatatttgtatagaaagtgatacacataacacatagattaaaaaagattcaagtgatttctccaactacttttctataataattagagatgttgaataaaaattattctacagttgaatcaaatattttatatatcatcataaataaaaaacttgcacaaaaatatatgcattaaaacccaaaataatacattgtctcaaacgaagataacaatctgatatcttgttcttaaacaaaaagaaaaaataatttagaatcataacatcaatcactaagtcttaacatctaacattataacaacaaacaataaaaataaaaataacattcaatgggctatagaaatcggaccagaatcaccatacccttattcttcccttgaacattcttcatagactt

SEQ ID NO: 45770 - DNA, 928 bp, Cannabis sativa
aaaatactttcaagggttttttaatcttcctgtttgttcgtagctttactatttcattgatatggaatctttggattgatggtcttgtttagattgtggtcattattagtaataatagtattggattgtgaattctttcttgaatcattaggtgcctagttctaaaattttatcttctaatttaatagataaaatgttttgtggatccaatgctttctgaaatgagataccatgatagtagattttgggtgcttgagtttatattttgcaataaagttttttgctcatatcattataggaatgtggttgaacttgatcattatttagcttgatcaaaagagtggtggatcagtggatgaattgagttttgattaattacatactacatcggatattggtgaagaatgttggatctaattttcaatatgcttattgagaattacttttataggaaccacttgatgttgtgtcagttgtggtgcaaatgatagtgattataatttgctaatttgtttgaattaccttgtcatgcgtagattaatgaagttttattattttactcgagaaaataagtattccatcagttatttattacattacttgaccaaaaattcaaattttaagtgtttgacttttatactatgttaaaggttaacatgcttaaggttttttaaaaaaataatgtataatagacaaagttatatataatttaatttaatttaataaataagctcattttagataaaagttagatggttaatataaagttctaaaggaatagtcttttaaaaaaatatcattgtaacttgtatctaaataggttgttttctataattaaaataatttataatatagtttgtagtgagataatatataaaaactaacatatttagttagattaaattgttttactatcttgaataatgaa

SEQ ID NO: 45771 - DNA, 2044 bp, Cannabis sativa
tttattatcatatataatttttttattataattttaatacttatattttatttttacaaaaataaactagtttatttttattttattaataataagtcaaattttgagttaattatatgataaatcatttatgtagctaatttttatttttgttgttattatatagtcataattctatgtatttttttaatttagatatttaagtcatgatttatattttaaaagttaggctaataatagtagttgacttttattaaatttttaattagcctttaatattttatatgtactttattaatatttaataatatattatttacttttatattagttgttaaggtgattttactttttaattaattatttaattttgatatgttttaattgtattttttttaatggaaaattaacattttattaaccattagactcaattacatgaagaggtagagagtcaggtggaacatttcctaaactgaaatagcaatcaggatataatatagaagctcttgcaaatgagtgagctaccatattagctgatcgattcccaaaataaatagacacatttctcaacgaacttaacaaaaccttacaatcattaactacttgaccaaacatgtaaatcatgataattgaattacgtatggcttgtaccacagaaagacaatcggtttctaagatcgcgtgtagccattgattatctttgatccaactcaaagcttcgcggatcccgattgcctcagcaactttaggtgccaccgaggcatgaaacatcattgtgcatccctccagtaataacccgcttgctcctctagccacatacctaacaccatagccctaagtcttgttaaacaatgccgcattaatgttaatcttaatgctattatcttttggtgctacccattactttgccccgtcccccagtataaaaccagtaaacaaaatattacctgaactttgagcaagtagtcattgattaagatagtttttagctgatgaaacaatgctatccacatccaccactttgttttgccaaactttatcattccttgcattccaaatagcccagcacaaggccaccagcaacttgatacagtcaatatcaagcataaaaaactgcctaatgcaccagtcaataaaaaataacccaggttgcacatttgtaccaatgccacccgatcccaacataattgagcaactcgataagtggcaagcgcatgtggaatggtttcctcctctaatgaacaaaccggggatatatatatacacacaagaataactatatataaacccaaaattatcataaaaaaaaaagacaacaactcaactttaatatgcaaataaattagacataatatataaagtcaacaacctaagaaatataaaaataatttaataaattaaaaacacatacaaaatattacttatgcaccataaaaactaaacatatattattttaatctttgttgaacaactaacaaacaaatagataacaacttcaaatcaactaactaataatttaataacaataaaaatttattcacggtgatacgttttaaaaaagaaaaaaagtacaaatcattaatacaaactcattacattttacccagtaaaaaatatagtttgagaaaaatcataatgatgagttaaatatagaataaaatgcggttgaagatatacctaaacttatttaaaatatataaacaaacttgaaatcaacttaaaatacacatttgaaaactaaatatttatctaaaattaaataaaaacatattattataaattaaagaacgtaacaataatacaaatatatttatgtttttacatgcaaataactaacaatcaactaaatatatattcattttttttgttgaacaactaataaattacaactgaataacaactccaaaatcaaaattaaatatataccatgtaaacaacgtaaaaacaacataacatcaacccccacattatgtcattctaatctgaaacaactaacaaacaactcaaaaacgacatctatcaatcttattttgcgtcaacc

SEQ ID NO: 45772 - DNA, 1015 bp, Cannabis sativa
taagatttattttatttttttaataaaaagtaagatttttgtgcataagaaaaaaaaatagttattcaaataatacaacaaatagtcataattaataataatttagggatttttttaaaaaaaataataagaaccccaacaaaatataataaatatacttaacacgatttctaaaaataattatcattaccacaagaaagtcgtcaaaaaggcaccaaattatcatttttgccaaaaaaagtcattgaggatttgtcaaaaatgttgttggagttttcttcgccattgaaaaagccattagagttgttatcactactgataaatcgacgtagttgtcatcatcattgaaaagtcaccagagttagacgtcgaagtcgttattgaagttgacagttggaatctaacacagagaaactagttatgtttataagctaattaaaaaatctgacatagagaaactaattacgtaaatcaactaaattaaaaataaacatacaagaatcagaaatatgtacttactcttattgaacttgtgatatacacaatcatcaataatattttatcgcaaaatcaaatgaaagaattactacttgatgaaacttgtaatataccattgacgagaagcttgcttgagttcataaataaatttctttttaatttgcaacccatattctttgggtcaccagacacaaaattttccagttgctccatataaattgtctcgtcaatgtcgctattgagaaatattgttttaacatccatctaatgtaactcaagatcaaagtgagcaacaagtgtcattattatattgaaagagtctttcgatgaaactggagagaaagtctctgtataatcaatgccttgtttatgagtatagcctttttcctacaagacgtgtcttaaatctcaccacactacttgtaataccctagaattaggaaatggattagcaaaaccctaattattaattatgaataaatgaggaatatattattatatagttcaatttatgtga

SEQ ID NO: 45773 - DNA, 761 bp, Cannabis sativa
tcagcatgctgtccttaaataattactttacaaattatattgtagtacttcccattaatgtttcaactaatgattaatgaatagttcaaagttagtatgtgatcgatcgatcctaacatgtctattaatatatatactatatataagatttgttaggtatgccgtattgaattgcatgcctttacacaatacttttctttagacaattgaaggatttttttttacattgacaacaattcaagtcatttatgcttcactttctttgtctcacagtcatccacaactcgactaaccgtcaatgccacactacgataaaattgggttttaatgacatttttttagtgatctgtacaaaaatgcatgtcatggtttagggttaagttttagtgacacatacaaaagaactctaaaaattcaatattagtatcctacaatgcgcgtcacttaaaatatggtgggtcactaaagaattactcccagaatttctattacttttttttttaaaaaaaaataaaataaataatattgacctatagtgccgtgttaggtgtgattgggtaaatatgtagcgacacaccttgcgcgtcaatatatcataacccaattttttttttttaaaaaagtatagttatatgaaataatatatttttttattcataaaatgtattttttcaaagaaagaataagagtacatttattattttcattaaaaaaatacattttatgttagacttttatttgggcttacattaaattttatt

SEQ ID NO: 45774 - DNA, 1985 bp, Cannabis sativa
ataaaatgttatttctgatctttgttagtaagtaaatctgattatattgaaatgggttttatttaggacacaaaacccaacacaaacaaccaaagactttatgggaaatattgtcgggtttggtgttaaacagcttttcaagaggagagatgagaccaagttggggtgaagacatacgatttatgagaaacccagcagatcgatatgcctcatcccaaaactttaagggtaaggatgcttgagctaatagtgtgagccccctttcagcaatatgtatgtgtttgcgttcagcatcaccattttgttcatgtgtgtgtgggcaagacacacgatgtagaatgccattttcattgagaaagcttgtgaaagcttggtattcccctccccaatcagattgaatcattttgattttggtgtttaattgaagctcaacttgggttttaaagctaataaatgtggataaagcctcattcttggttctaagcaggtataaccaggtgtgcctggtataggcatcaataaaactgatgtagtacttgtacccatttgaggaagtaacaggagcaggatcccacgaatcagagtgtagggcctgtaatggggcaatgtaaacagtgtcagaatgagaaaaaggaaatttatgatgctttcctagacaacaggcattgcacaaatctgaagaaaaattagtagctttattatcatttggaattttgatgttacaagaagtaagagtagcctggacaatccgagaagagggatgtccaagtctcttgtgccaaagagataaaaggctactgttattagctaaagaatgactgttacactgtgtagaaagttgaggtttttgtggttgtggcagctgctgttttgagggcagaaaatcaaactgggatggttcaaacttgtacagcccatgatcaagcttcccaagcattaaagtcctctgagtatcctgatcctttaacaacacaataagaagggtgaaattcaaagaagacattattgtcattagcaaattgtgagacactcaaaagatttttggtaatatgagggacatgaagtaaattgttcaaagtgagatattgagattcaaaaggagagaggaaggttgattgacctatattacttatgttcaagcctgttccatttcccatatgtatcttttggtctccatagaactctgagctggaagcaagattattggcattgggggtgaggtgatttgttgcaccggagtctgggtactagtttggatcagcaacagtttcaggagtggcatagtaagcttgcatttcagcaacattagcagtgcttgtactggtttgaaaggattctggccctgagaagtttttatcaaacatgtaaaagcattgttgtacagtgtgacccatcttatgacacagttgacactgtggcttttgtccccaaacagagaatatgcctcttccacgagagggaccccctctgaaattaccaaattgaccacgaccaggggatgtacctcgcataccagggtagggtgggaaacctggtggtccattgctggtgttgaagtaagagccagagccagttctttgcttgttttgattagatccaaaagagttttgtgaaaagtgagaaggagattgaccaaaaccacgacccatagtggacttggcatgtgcaagattggcttcatttttggtgatggctaactctttggcagctttgtccaagaaaacctcctgcgccattagaagagcttcgatctctgcaacactataggcatcgttcgagtgttgacagaggtgataaagacattgtagtcactggttaatccattaaaaatggcttcaatgtggtcctgggttgaggtagagtgtccaatggagcctaaggtgtcaacaagattcttgatctgagaagatagtcactgagggagtccttcattttggtatttctgagtaaagttctgtattggccaacgttagctctgttgagag

SEQ ID NO: 45775 - DNA, 1184 bp, Cannabis sativa
atgaattgcttcatatgggtaccttaaaaaggtaaaagaagaaaataagattaaaaagattacataaacccaggacaatggcttgaaataaaaattatcaacagaatcattacccaagttcagttattacatcctgacatgtcctagcatctgtgttcagtgcctggaaagaggcagttctttctgtagtacttggatcattttctccaagtgtagatgtctgaacagaagctcttgcatcactttcatgagcttttttatccccactgttgtgtgagaaacaaaagcgagacactactctgaatgcctcagatggtgagagaagaaaatgtgccaccttgtgaacaatatcaaatatagcttctatgaaaatctcaatagctagttgaagatcctgtataacatcacattaaatcaaacaaataaaaagaatgatcacagtgaacaatgttttatcacaaaaaatataaatggaccagaatcttcaaacaatacctcaacaactccacgtctcttgtcagttgttcggtgaaccatatgatccttgagggtttgtatactcttgcgagaacgtagactaggaacttgatcacttcccgaagtagtggaggattttgagtcaccacaagacagacgatagaaaaggcatggaatcccaagcaggaacttaatgggaaacaaaagccacataaatatatacgtgatccatccggttcgacgcctatcataccttgaaaatgagctagatctagaggctcgtgaactctgagataatggagatgcgggacatatgtcatcataatcttcttctccagatgaggcatctatgcttgaagtatcggattccactgaaagctcatgaatgaaatgattgaaagaagacaccccactaaaacatcaagtacaaaaaacaaggagtcaaaatcaataaccatctgtacagaataaacatctattttccaaattaattgtaaattctactctaagaaacgtattatcagtatgctaattcaaaatatctttcacaatagaaaaagcaaatataatgtgaaaatattaaatcagctaatccaaatacagtgacgtagctagaacttgcttatgaaaccaaactcatttccacctttacgatagtggactttacttcgtgctgcccatttttcacttgcatacaagtattgtcc

SEQ ID NO: 45776 - DNA, 2780 bp, Cannabis sativa
aaatgttagacaaacaaatcatcaagaaaccaaaatgtaaaaccaaaaaataataataaaaaaaatacaccagaatttttgaggaggttaattcgaacttcttctacaataatagagaaactaatcccccttaaactccttccaagcaatcctagttcactaaatcaatggcaaaaggtgttaagacttggacaattacaagtaattacaattcagcaccctccttgaatcaagtcataaaattgattgtgataaagtcttgaaaaccagcagagccctttaggaaactcccttgaaaatcatcatcttccctttgatttctctatctctctccctagtatgtctaagactctctttcacacccttgaatattacaagtattacacccctttatttgcttaattaatacaacgcttaaacaactatatatagtagtttaacaactaactacccaaactaattttggaaagccttattaacaaaaccgtcaagagacatagtaacagtccaacttgtcacggttaaaattttgtcatgtcattaatctaagggaagctaagttaggactgattacaacaaattccacctcagttctcactaattagtttccccctaaaaaatatataattccttggagatcttggttcgacatcacagcagtactagactttttcaatgcttagcaattccaaacaatattggaatttgctaagtgttaaaactttggttcccatatctgatggattctctttagatggaactttatcaatttttatcaacccgtgtgtaacctgttctctaatgaagtgatacttcacatcaatgtattttgttctgtcatgaaagataggatttttacacaagtgtagagcactttgactgtctgtgtagactacagcattctcatgtgtgatcttcggctcttttagcagtccttgtatccatataccttcctttattgcttctgttgcagcaatatattctaattctattgttgatagtgctacaacaggtggcagttgagacttccaatttacacaatttccacacacaaggaaacaaaagatgtagtagatcttctagaatccttatctccagcaaagtctgtatcaacatagccttccacttgaattgagttgtatcttttctaatatattataccatagtcagtagttatagttatgtatcttagcatccactttaaagcaatcgagtgtgcttttctaggattttccatgtatctgctcagtgtgcttgttgcataggctagatcaagtcgtgtgcgaaccattgagtacatcaatgatcctatggcattagagtagagaattttctccatttctttcttctcttaattctgttttaagtctctgttttgatgcgacttaaactgtccagataaaggtattgttgatggttttgcacctctaatcccaaacttatcaatgagcttattctgatactcattttgacataagcctaattcttgtccttctctgtttctttttatattgattccaagaatccttttagaagcccccaagtctttcatgtcaaattctgaacctaaaacctttttcaactcattaatttttcttttgtccttgctaatcaatagcatatcatcaacatataagagtagatattcatcttgttcaattcctgtacccttgtaatacaagcatgtgtcatacatgcttatccttgtgaaatcatgaaagagtcaaactttttattctactgtcttggagcctgcttcaatctgtacagtgactttttgagtaaacaaacctgatcctgatcttgacccttcttaacttcaaatccctctcgttgctccatgtatattgtctcctctaagtcaccatttaagaaagcagtggtaacatccatttattctaattctaaatcaaattgatttacaagagataacatgattctaatggttttatattttaccgcatgagcaaagatttcattaaaatctttttttttactaaaaccttttgcaaccaaccttgccttgtacctaggaaattcattttcattcatacatggtttaacttttagaacccatttatagcttattacccttttgttgacaggtcttggaaccataatctatgttttatttctgatgagggagttcatttcctcactcatggctttgttccattttcatgcctccttgcttgacattgcttctgcatatgtcttaagttctattctacttaactcagtaactgtaacaaaagcatatgccatcatttcagcaagagctgtaaaaccatatttatgttttggtttggatgctcttttctctctatctcttgttagtaggtagtcctgaacatcaatcataaaatcccgatctggttcatcatgttccacctgatcttgactcaccatttgttccacctaaacatgatcttattcttgttggtttgcagtgttatcttctacattactctcacttgtttgaatttgattttcaatgcttcctgcagggttagtattctttgcaatattttcaacatttacagatttcaaacaagaaaattcatcttctttaaaaataacatctctactacttattattttaaaaccaggttcattattaagccaaattctataacctttcacaccttggggatagcccaagaatatataccttttacagatcttggttgcaattttccttcactttggtgtgcatatgttaggttttatgccccaaataaaactccatttcaatgtaatctattttattcaacatcaat

SEQ ID NO: 45777 - DNA, 3163 bp, Cannabis sativa
tccttaaatttagaaataattgtatgggaatcaatactataccattcattcacattccctttaagtaaacctgtcataaaagaagaacacacaccagagagaggcaataaacatgcatatacgatactctaccaaaagaataggctcaatcactcgaagtaggtttgggtcatggtcgtaataataaccatctttgtagtacccatctttcacataaccaccatcgtcgtcctcctcttccctatcttcaaggctttggtcatcatcgacatcatcatgcaagttttcaacatcttctcgattttcagcattagcagtaccttcttctcttacaccgcctggttggagactgggggcgagggagtctacctcctccataatagtatcttgaggagctttcttgcctatgttattccaagtaaacaccatggtcgaggtggtgcggcggctagcaaactttcttcagctctcaataaaagcaccaaaatatttatcgaaatttgttgaaactaaataaatagagcttcaaaaagaaataatacagttataatagacaaataatttttatgtagtttgggcgttactgatccctagcccacaagtcagttatattgaccctttgggaatgcatttgaataatacaatgtgtatttacattataaaccctagttctttactccttttatttctcttgaagaagaagaaagcttgtaggagcttttacagaggttcgacaagtatataatttgttcaccccatgtacataaaaagtgggagtttttataggcttacatgtgggtaagggcattcctgttactcacctagggttttgtaccataacccgttacaagggtaggagaatacaacttttgatctgaccatctggccttggagaaccttcttgatcatgcggtgtacaagggtagtgactatactgtctgaattagggacacgtattgctcaaaggtttctcctttatgaattactctctagacaagtcgttgggcgaaaggcatgtcctgaggtacgtacgcgcactgccatggcctgccacgggggacaagatctgatcatgtataaaaaaaaaagtatatccatctgtaggttgctttctatataaagctgacgtggccattcgcatttgtggagtagtcatcgtccgcgaccaatccatagaactcctcacccgaaagtcatgcagccaaatcaggttccagagcttctttcggtgtggggattaatatggtcctttcgcatcctggagatgctacttaggcaagaaatagctctccgcataaagtatccataaaactcctcctggattggcaaggcatctctgcgaggaaccttgatggtcatctttgttaatccaataggttaataaatctttgtctctggttattccacgtgtctcctgcttaaaaacacagataacagacattttatataatatgattatatatgacaaggaatgatatgaatcaaagtcttcatacaaaagctatttaatataaaatattagtattcatatcataatagatgatcatttatagatcaatctaaattttgagtgtacatgaactcctattcatgttaattgaatttttttaattcatttgttcccccaccattaacatgccccctttaaacaactaaagttgtttatccaacacattcaatctctcttgtcgagtcagaaaattcagtcaacaaagttgttattcccttcatccgcttcaacttgttaggagtgtgtcctaaaagcatgtaaagaaattattattttaacttgaataaataaatacaatattttattaatattattatatttgaattgttaaattattatttgaataatttatgtagatattagaaaattctatattcattattgagaatgtgatcttatattagtacgagagagttaagatcacactaatgaataaaatagtcaacaactaataaaaattttagaattctttaattagggttttaagtgtgatttactgagtatcatgttgtacaagtaatttagattcagattattgatgtagttagtcatctcgataaagacattttatataatatgattatatatttcaaggatcaatatgaatttaagtctttatacaaaagccatttaataataaaaattagtattcatatcataatagatgatcatttatagatcaataaatcatgagtattcatgaacacctattcatgttaattgatttttttttaaattcatttgttaaggtctcttcacagaatgaggctaatgacttttgttttgaaatttaattacatgaatagttgggaacattaaataacaaaagagaatctaatccttcttaacagaatgtatattggttcccttaaggattaattcttgtatagaataattttgagctcaattctataatcatagtatatattaattatttaccagtaaattaacagtacttaaggaataagaagtaaattagaagggtaaactggtaattcttctattctaatttatgaaccaatttattggagagttaaactactgtgagatgattatatagatggacaacttaaaaaaatatttctttaaaagtatatttataacataaagagttcacatttgaattcatagtggaaaaatatcaaaactaatataattaaagagttcaattatttatctttaatttattgaagcttaatgttataggtcaatgaccaccgagatagcttaatcaaaaattgataaaagtaaatacaaacaatgggtaaaaagacttatatgatagtaaaatattttattattgaataattatggatatttaattaattcaaattaattgaaatatataaatataagggaaaaaaataggaaaatacaaaaaagggaaaaaaattacaaaattactatgggtcggcccattcaacatttatatagtctagaatcaaaaaattacaaaaataccacctgctctatacattaagccgcacggaatgaacgaagaagatgaacatacctccatcgatcaaatcagcaacacaaccagaatgaaaccaaaacgagagtaatacaaccatcaattctagcaaaatttaattgaaaaagaagaactgcaatgatctaaacagaaaattacgaaaaaaaaaaaaccagaaa

SEQ ID NO: 45778 - DNA, 875 bp, Cannabis sativa
ggaacttccatccctattgatatttcatctttagttttggataatttaagttaacgaagttatttattcttattaaaaaaaattagaaaatcaataaaatataatatagaaagaaaagagagtttaatgatgaattattatgtagctatgcttgaaaagtaaaggctatagggttagctttatgttgattgttggcaatgccaatgaatgatagtgatgcccaacaatacatatatatatgtctttctttcaaatacacttttttatttgtttgttgttaaaaaagtaattagttatttaaatttaattgctaagatgtttgtgggtttgctttatccaatgttaatccactttggaaattgctatgataaatcaattaaatcattatgagattagaatcttttgcaattgcatggtattagttatttaagttttattataggttaattaaaattatgactacttttccaatcaatatccacaccacaaagtaactactattactttgattccattaattttcacaaaaataaatctattctttctatatgccaactgcatgtacattcttcttcttctttctataaagaagctttagctaattaataaaaatgaacttaatcaacaatatattatgtcattctcaataaataaataaatttcatgtaatttataccttaattaattaatagtgtaagaacataagatgaaatgccttaaaacaaagatagtgatgaacaattatcaagagagagagagagagagatacatagctgtgggtgtgttgtatttggtatatatttaatttcttggtgtgatgatttgttttgtagactccttgaatattatacatgacaagagaagatgattatatt

SEQ ID NO: 45779 - DNA, 2766 bp, Cannabis sativa
tcttcattagatgtttcttcacatgatatcatagtactaacaacaaaaatgttagccaaaatattaacggcgtcaaacaacaaacaactactagataagtaacctagcaaattcatatatccaagtgcagaattcataaaaccaattcagcattaagtacaccagtactaggattcaaggagtgatatagcaaacttaatacgtgtcagttagtatagaaggaaaatagtttcaaacagattaacattattctcaatctgcatactttcagtgtacttcacaaattaactaataataacacttcctgcatgagacttacaaaagatgcttctcataaatcagtaagtttttttcttccgtcaacacaagatttgaaataataatacataactcttcataaaccaattaagtgagataaacagtaaaacgattcacatctcctcatacaagttccaaaattctatttgcagtcataaatttaagctaaggctgattcagcatttacctcttggctgaactctcgatacttcagcttccatcacaatcacatcagatgcaccttcagactttcctgaagcaatgacaattgaaagtaataaataaataaggtttctggaaaagaactgatctaaatgcacttttgagtctgcactagccgataattatggactattgtggatgagtgcatatcagcacacaaacacatgtcctagaaaaaagacagagaaagctttctacaataacatgtcatatcataccatgaagttcatcgttcaaaaaatgaaaaatataaaaaagacatgtcatatcatgaaatacgatgatcatatatcatcgtacttgaagatgataacttatcatctttcgtaatttgtcccactgtaatagaattttcgtttcttgtccaaaagaaatcatatcacacaagtttcttcagaaaaatgaaaatcatatcacacaagtaaagcaaggcaagcaacatagactgtgaacgataaagaaaactcacagaataaacaagtattacccttctatataaagacccaagtgacaaatttatcaatatacacagaaaatatatgtttatatatatgtgtgtgcgcgcgcatatacttaaacacattcttttgtatacaaaataatactcggtgttaaggttttactggtaaaagattcacttcaacgaatgatttaaatgaaaaaaaggaagtatctttaaagagtataactaacaccatggggataagaatatatcatgtaacgaatccgatccaaataattaatgctgccaatcccataaatctaaaatgaagatattcatatcaatcacttaattgggataaactagttcaatatctatcttttcaacaataagcctaaaaatatactagttattataggccaaaaacttacagagccaaacaaatttcttgaagggattcctaggaaaataaaactcaagaagctcttaaacaatctttccaatctcgttactttaaacttaagtgtcaataagaaaaaggcaactgtgaaaaatagttaccgagtatccaaatagcagagaatcaaaattcatcaaattacacatttgaaaacttactctgagagacagatcctttcgttttcttgtatgcaaattcttcaatgtccggtaggacagaaagctgttcacatgaagctggtggtcatatcagcagtgatagcattgttgaaatttaattttatcaattacaacaaaccttggtatatatagcataaagcacacaacttaatatataagtatatatataacagtcagaattctggtaataagaaatcacacaagcaaaatgaaacccaactttcaaaaagttataagagaaatccgagcacatgaaatgcagtaactaactaacaaatgaaaagtagaacaaaatatctttatccaatcaccaaatcaatatcatggggttatggcttggtagcaggcaagccaaagctgagataaaccccgatttcaaaattaaattaaaaaaaatcattttttttcccttacatcagttgtttcgagtagtgtctctttgaatttcttttttctcctggagaacacacgaagttctgggggcgagacgccattgaacgacttagaacctgaaatgttacgtttgggcacaaataaataaaggtacagacatatatattgaagcaagaagaagaagaaaggttatggtgagaggacctgggtttggatttgggtttgggtttgggtctgttttggaagagaagttggtttggttggacattctgattctacataaagatctcagtcccaaattcaacgccattctttcttccactttctttctctctttaaataacgatcaccatgcttccctttcccgctaaattttggtttctgtgcctttcttccttatattattattattatatattattagggtttatgtgtgcctcattaatcaagcgtttggtattttacttttttttttttttcaagcaatgaataaaggaagaaattttatagtcaatataagttttgtacttgttaggaatttttaccaattatgatttatatactataatgtctctaaatttttaagtctgtcagttgtaaacaacagttgctcattttatcgatgatgaattaataccaaaaagttttgtttttgagttggtgagcttcattctctctctcaactccattggtaatatacaatttattttagggtaaatatcattttggacactctgttttacaaaagttac

SEQ ID NO: 45780 - DNA, 3056 bp, Cannabis sativa
aatcagtaagagttatgcacgttttagagctgaaaaaataagattttgccactgcccttttttcggtctatcattttctaaacggcataccatttttcacagaaacagcagcccgtctggataacgacagattgtttttcccaaaaactttttgaaaaacgtgctaacagctataaatggctagtttttgtttgaacactatataaactcgatttttactcaaaaattcaagttggctgagcatttatttcatacacctaacatattcaagtgagtttaatgagctcccaagtctaaaattcaacaaatacttttcacactttgagccaaattttgtgtttaattctttaaagtatgcttgctaatcactctaagttttctattgtttcatcatctttctagagtgagtttgtttgtaatttcaaacacatttttatattgtgattgagctgaggctagcatcggtattataaacaacccggttagagtgagattatcactacaataattcgagaaaaagattgatagtccttggtggtgtaaaactattataagaggtttagaaactacacttagagtatcagaatcagttagggaatttgcatttgaattctgttcacgtggcacttattgaatggaataatgtttaagatgggctagtagatctttattagctttgcttaagtatgttatcatattcggacctcgggcccggtattcactgagaatctgattgacaactagctgtgaattactgtagatcttgagtgattcatctttgattgctagtgccaacctaagtaccgctaggagtgcctcatactctacgtcgttgtttattgtagtgaacttaaatcgcagtgcacagtgggttcaaaattcttgaggagttactaatatgagtcctgcaccaaagtcgtgctcattggaggatccatccacataaattttctaggaaggtccattgtcttcctgagctaaagtctcaggcatgttaatctggtttttgcagaccttgggggcatcttcttcgaggccagtgcattcaacaatgaactttgttaatgcttgttgtttgattgttgtgcaaggttggtaggtgatgatctcaagctgatctagttctactgcccacttgagtagacgtcctgatgcttctggtttcatcataatttatttcaatggttggtcagttaacaccttcactaaatgagcttggaagtatggccttagttttattgaagccaataccaagcagtaagttagcttcttaatggggtgatacctagactcagccccaacgagacacttgtttatgtagtacacgaggtgttgtatcccttattcctcatgcaccaaagtagtactggtcgcatgcttagtgatagccaaataaatgaataattcttcgtcatctattggtttagatagggtaggaggtttggctaggtgatgtttgagagcttggaaggcttactcacatccatcagtttattcaaacctcttatttcttccttttattagattaaagaaaagaacacacttttcagtggacatggagacgaatttgctaagtgtagcaataataaggctttgcacatctcttactcgtgatggtgattataagccttgcaatgccttgatcttttttgaatttttttcaatccctcttgagttgataattaatccaagaaattttcctgattggatgtcgaatgtacattttagagggttaagcttcattcgatattctcataggttgttgaagtattcctttaagtctttaatgtggtctttagatctctttgacttaaccagcatgtcgtcgacatagacttccatattgtttccaatcaattcatgaaacatacggtgaccagtctttggtatgtagcacctatattcttcagtccgaaggacattactttgtagcaataaagctcgatgtctgtttggaaactagtgtgctcttcatctagtgcgtgcgtgaaaatttgattgtagctggaataaacatccatgaaggtgaggagttaatggctgactataattgatctattcggggtagaggaaaataatctttaggacatgctttgtttaggtcagtgaagtcaacagaagtctttcacttaccattcgacttaggcaccagagcagtattggatacccaaactaggtagaaagctttcctagtgaaattgttctcctataacctttcaacttcttccttgaaagctttagagcactctttgtctatgttgagggcatgacaaatgacttgggggtcgatctcgattatgtcctcatgcgagcaaggaaaaatgtcttgatttctcctgaggcaagccatgagcatctcactcatagcctccatcaagtttgttctaatcttgacaactttggttgggtccatcgtgttgaagggaagttctttgagttccttagttggaccaactcctaaggttatttctccaaaatagggctccatgtcatccccgtcttggacaaaccttcaagtggctttagatatcatctccatcttcttcgtagtttcaactccggaggtcttctttgtctctctagctatcacgagagaggccttgttcatccccctagtgtcaaagcaacagaggaggtcttcttggtaagagttgacgaagcgttataacactcgcgagcagttccttgattgccaatgagacaatcgataccatatgccattgggaatctaatggataaatggtatattgacgagatagcttgaatgtcgtataaagctggccttccaagcatcacgttgtacgaagactttacgttcaccactatgaacgtggccatactggtgctctaccttagggtagtgtcaaaagtgagtgtagtttgatcttaccacattgatctatgcctgctccattgaagccatacattagttactcgcatggctctaggtctttaagtgacaaaaccatgcgttttaaggtttgcttgaataagatgttctaggatgctctgtcatcgatgttaggctatttttagcctacattttgggtcacttt

SEQ ID NO: 45781 - DNA, 3223 bp, Cannabis sativa
  modified_base (3175)..(3197): a, c, t, g, unknown or other
ttttatttttttgtttggttgtatttgagtattaaaatgtcattctaatagaataacttttttatcattttagtggaatgactattccattttacaatgaaaagaatgatcattctaatacaagatgaaaaaaaatatatatatatattttttatcaatttctttatatacttaaaatttaattccattttatttttattcctattcttattcttatttttatatttttattcctctttaacaaaatcacaccaaatagtttattttgttccatatctcttgaagtctctgtggttaatgaggctaatgatctgccacattcgacgttagctcatttggcataaccatcgcgtatgacagacatacaaaaagctaaaaagctgttaaataaacaacaccccccactatatatactctttactatataggactcggttgtatctttttttagttcctctctggctacgtttgcaaaaatggttgatgcataccgcgcatcgcgcatgcgcatcgcgtatcgcgtaccgcatacgtcttgaggagaggtagtgaaaaaatatattatttatgcaatggttattatttaccgggtttgtagtttgcttctttatttattttaattgttttcatttattagaattgaccttttattttctctgcttgtaatttttttttttaacttattatctgcttgttggttgttgtagggaacttcttagtcatactagcagtagctgtagcattaatggttgcattggattggtctctcaccaggggcggagccagaacttacttactaggggggcaactattaatttttttttcatctcttcacttaaaaatcttttcaatgtatttcctatcaattttgacaaaaaaaagcttttcagtccaatattttttattatcgtgtacatgacaattttcacaggccacttgtaactttttaaaaaaatctaaatagtttataatgctaaaaataaagttcacaaaattacttatcacgcatataaaaaaaataatcacgcatacaattaaattttttaaccttatttttagcattataaacaaattagatttttttaaaattttacaaatgattccaaataactagaatgtacataataataatgaaaataatttggtgtaaaaaatctctcttagatgcatggaagaaaaagttatagagtgtaccgaaacgaccctttaatagaatgtactatagaataacctaataattaatttgccaaacatgtaatatacataaaaatatcttgtttaatatatagtacactccttaaaaaatagttataatgggacacttctatctgtttcaatatccaaaaaaaattgttgttctattttgtttttatgttcgtgtacgtttgtaattatttcgtatcactagtaagttttttaaaaattccaaattatagtgtcaaaataagatttaaatttttttattgcactcataattatttttttatacgcgtgataaataattgtgtaaactttattttcggtactgtaaattattcaaaaaaaaattaaaaccgatggttaaaaaaatgaaaaagatattttgtagttatagtagaaattgcaaaagaaaaattatattatttgtgatctaattttagttaaattaaatatttaattatatattttaattgagaaagataataataagttgctaaagataataataaattgctaaatatatatatgacggtacattatattgattcgttatacaaatctaaattaatatttatttataacagtagtgaatttagctatacctatatattattgattgatttttttggaaatttcaggggggccagggccaccctatctcgtaaagtacgttcgcccctgtctctcactcttggtcttccttttcatgaggtggagtcagattgtttagccttggtctcagctctcccgaagtgtttttccttttgtaatgaactaggttctttattggatgatattgctagtttgctttccagttttcctgaggcatccctaattcatgctcgacgtacagctaataaggttgctcgtgaattagctgtgcatgcacttagggtggatggtgaattggcttggattgaggattttccttattttctcattgatgtattaaactctgattattgttaataagagtttaatttcaaaaaaaaaatactataataagtgaaagcgtaattattttattattgaaaaaataattacttttgagaacatctcctattccaaaaaaaaaaaaaaaacaaagaacttgagaccatcttcaatatataatgtaaattttgtgctaaatttgtctaaaaattaagttaaatgttagatttaggccaaattttataattatgctctaatgcactaagagtaagataaaccttattttaataaaaaaaattaacaaaaacattaaatttttgttgaaagtatataaaaagcacattgaatatgtaaatacaaatataaaaaatgtattagttgcattaatgagaggcaaaagagtaaataaaataaatgatatatatattgtagagtaaaatttggcccatgttattttgtgctaaatttgacacaatttttagcatgtaacaaatttagaccacattatacaccaccattagagttcattttatgagcatggactaaaaaatacatacacaccacttttatagcactccattatagatgatctgtgttatcccaatttccgtacagagtggcgtggcatccatctgagtgacatgtggaaaaaatttcataacctgaacagacagtacactccatggtgtaccgtccaaagagatttattacttgtaaacaactgatttgaagaagaagttggagcatccagacagtgtatgttacactgtccgactagcatctactttacagttagctcgcatgtaccgaccagagtagaagcgactggaatatctttagagataccttctctaaatgttcaagcatgcaaatctcaatcacgtccctgattttgtgagactcacaccgacaggagagaagaggaaacctacctagtttccctttttatttctcttgatttaagaaagtaattaagtttccttatattattcttatttatttcagaaaactaaactagtgtaattgttggaaatattttacnnnnnnnnnnnnnnnnnnnnnnntatgtttcattaacatcttaatatga

SEQ ID NO: 45782 - DNA, 2212 bp, Cannabis sativa
atctataacttttgcaaaacacagtgtctaaaatagtatttagcctttaaattattataaaacaggtgtaccataaaattacctatataaaaatatataaagtattgttttaaaagaaattgacaaaaaaagagagaggtattattgattttcactgaatgtcttgtgttatatttatccaaaataaaaagtacaatatgtaatatgtgttcattgatgggacccctatgcacatggtgaatataatggcaacaaacaaatttccacttctatagtcttttcaatccctcaaaaatatcttaatataagtggtgtgtcacctctaactagttaacatttatttttaatagtacatattaaattaaattataataaatatatatttggagtacttaaattcttacacttaaaaaatatttttttttatttttacaaaaatttacataaaaattcatatagcaactaataaaataatttaaattacaaataaaattcacataataacccacacaataactaacagaataacttaaattgcaataaaaatctgcatagcggtccacataaaaattattggagcaacctaaacagtaatttaaaaaaaaaaacttaaaaataatatataaggtaattcccctaaatttaatttgattaataaaattttataaatatgattaaattacaaatacttaattacatataatttttttttttaaaaaaaagtagattagtcctattaataaaattttgtatactaaatttgagtcttagttatactacagaatatcaaattagcattattaaaaataagctaattaaaatttttgtaactgtgacacgtattaaatcatgcttttaaatttgtttagaccgttgaaattttttcgtaattattgaaattgttgaattcaagaatttttatctaattctgttcagttttactaatacaacgactatttatgtacgaaatcgtgccccccaaaaattttaatatctaccaaatcgtgatccctaaactttggcaattaacataaaccaaatcgtaccccataaactttcatttacgtcaagtttccgtttataaaattgagcataaattattgattctaacaattacattagtttacaaaaaagttttaataacctgaaaagttaaagagatatgatttgaagcaaaaattccaaatagcttgtaacctaaaaagtacaaaaaactaagtattttgattaaaaactgaatactaaatgagatcctatttaattattaaaataaataaaattcaatattaaattatacaaataacgatactataaaactggtcaagtggtgtatggagtggtaccatttagtaattcttctccattcggtttctcttattacccaataagggctcaccattatgaccttattttacgttgcttcacaccccaccacattagctactacacattttcaatccataatttagtaccaaattctgttttagtgttttcccatatccaaaataatatcaattctccactcaaaacaaacaaccttagctatgggaaagaaccattcttccattccacaaagagtgctgtgttgtttgtttcgagaattcattctcgagcaacaatacaacttaagagtgttcgcggtacgggtggtacggattgtaatcatttttttaaactaaactgcatatgcaatttttgtaatttctcaagccgcaactacactgcgacatcttaaaactgcaaaaatcacactgcgaaaatacagtgtggtgcggtgcagtttgagcggtttacactatcataattatcaaatattataatgaaaatttaaaaatcaaactaataaaggtttagcaatacaaaataattttttttttttatgaaaattttgacatcataacatgtataataattatcaagttattatattgtattgtctctaaaaattaaagtaatatacacatatatattatatatatatatatatatatttgttttcatatgaaaaaaagaataaagttcactgtaaaaattagtgactttgtaatatatagtgcggtgcaattgaactgtatttattaaattcaaaattgcaaactgcaccgcactacgcgatttggctaaaatacaaactataactgcaccacaaaagattttaactcgcatttttatgcggtatggtgcaatgcagacggtttaatgaacaccccta

SEQ ID NO: 45783 - DNA, 1401 bp, Cannabis sativa
accggacagaggacagaagggatcaatataaatctgcttatattgtctctagttaacagctgatcattaacaatttgccatccaatgaatttatgttttggcaaaatcatcctattgcgtatgttttttgcatagccaacattgtgagattgaatgaacgaaaaatataagagtttggctttaaatttacctcttttcacagcttccttgacttcatcttcacccacgcctgatcggagctgaagaagtttcttgaaataccagcttgcgcctttttcaaaattagctacccaaaaactctgacccttcaagtaaatggcatcaatccaccgaacccataggttgtcttgtttactcgagatagccgaaatatacttggccataatagaaacattccatttcttaccctcccgaaatccaatacctccaaatttctcagggaggcaaactttctcccatgaggggatgtgcattttgcttccattaccattaaagcccaagagaaagtctctgcaacatttatcgattgtcgttgtgactttttgaggaagcaagaacagactcatccaatagtttctaactcccaaaagaactgaatgaatcaattgagccctacctgcaaatgacaagttcctgctagcctagttatgcaagtgtttatggaatttatcaatgataattccacaatttgaagaacgccattttgttggtctaagataaactccaaggtatttgaggggaaagcttccctcatccatctgcaggacatttaaaagcttttatttgccgtcattttggattccctcaaagtacactgtggatttgtctttgttacccacaagacctgcagcttcactaaacatttggaaagcctcattaacaacctagacaaatcctacattacccctgcaaaaaatgatgagatcatccgtaaagcagaggttgacaaggcctaaagatttacaaagggggtgatatccgaaccccttctccttggacttctgaataagtaatctagtcagatactccatgataagaacaaaagaggagcggggacattgggtccccttgaccaagacccttctcacctttaaaagacccttgaatccttccatttaaaatgagagagtaagaggctccatggagacaactttgaatccaagaaataaacttggaaggaaaacatagaccttttaaaagatcaacaacaaagcaccactccacagtatcatatggtgtgctcaggtcaatcttcatgatgcatctagaagagatattcttctgagtatatccttctagcaagaatgttgtgagctaacagcatgtgtttaacaaaagcaccttgattatcatgaattagacaagggagaacttctaagagtctcgtacatatcatcttag

SEQ ID NO: 45784 - DNA, 1201 bp, Cannabis sativa
tatcactaattttcttttactttagtataactcttgttgacacaaacacaaatcatgcttaaatttgctttactgtatactcaattctataaactttattatcccaaagcattacatttcgtactttctagatgaacattgttattgggcaacaataatgctcaacatctttcataggtgtcaccttataattggttagtgatattccttaaaatttattttcttaagttgtatgtgacccgctatttaattacatcaatagcggtatgacactaaggaaagtactagacactagtggtatcctttaacaattctctttccaaatctagtaaacaagagaacctaaacttgccacaaacacacctcttttaaagacaactccttcccatgccccaaccatctcagtaaagtggtataatttattgctgaagtgttccaatctaaccactgcttaatctgaatctaacacaactgactatttctacaagaaaacaataaaaaaaaataataataaatgagcagcatcttctctttcataaccacaaatcaaacaatttggagcctccataactctaaacttaaacaatctatgacaagtcttcaacttgtccaatttagccaaccataagatgaaagaatgtttggagatactcataatctttttaaacaacttgatgatatataatactaatgtgatgcaaatgtagtgtagtacaagagtggagacaagttttgaaatcaatatctacattcttactagaaataatagttgtatgttggtgctcataaattgaattttgactaaagttataaatagattcttcattaatattcacatatggcctatgatggtataacatattgtttttttaaaaaaatgaataaagtttttctaaaaatgaataaaatatagctataaggagacatttacaagaatttttttggttggagattttttaaaaaaaaaaatgaaagacaaaactctagcagagttataatttatgaaaggaaaaaaaaatatttgctttattgtggtttgtattaattaaattttatttatttaaaacttcttttatatccttttaataattaataagtatgattaaattgacattctagattaaatgtggaaactgttttttcaacgaaagatagtaaattgactcagacttagaacattcttaacatatgagctaaaata

SEQ ID NO: 45785 - DNA, 2477 bp, Cannabis sativa
aaaagtatagtttttttatagtgtaaatttttggtataataataaatttttttaattatttaagcatataaattcaaatttcccataaagaattggtcgggtggtgtgttagatttggtgttgcatctgaacccaaatagctatgttgcttactcgctcctcttcgttggtcattgccaccaccgggattctgcaaggtgagccgggcttctacggtttagagatggcattatccgggcaatactgtgatccagtattgattcagtttgtcaaaatgttgtgactagattgaataaaaagacctgcttgattcttcttaaccatatttgatgttaggtttatcctacttgtattcataacattctcatgccaacaatggagaatggaaatgtactatgtcttggtccccattttccaatttgcttttctatgtaaaagtaacttagaatattttctatttataaacttgctgatcacaacttcatgtttactgactattgcagtttaaagcttaggcttcacaatgaagtagaattttcatcttatggtagaaaatggattggtgagttcattcttgatataataatccattacccaaataaattcaaaaaaaaaaaaaaaacatacatatagaagtaaaataaatcattatgatgatccaaaagactcatggcataacatttgcaatataaatccatactcaaaacttatgaaaaattccttcaaaatcttaatgtaaaactgaccccaaaaataaatttaagttgtttcatacgaagaaaaataaaacagaagtcctactaaaagaaacatcatttaaaactggagttgcttatgcctcaactctctcaggtgcctccaggtggagaattttaccagttggcttggccaaaaggtctgtgtgctcttggaatggagactttgtgaaacgagtttctctccagaactcaggtgtcaagaaaccataggtcttcaagagacactcaaatgtggcctgtcaaagttcacaaaaccaaaatcttaacactaaataaatgaaaattcaaataactaatcaatttttggctcataccctgtttataaaatgatattcagttcataaaaaagctaaacttgtctcaatttgattatgccataaatattcatttgttacaattacttcccaattttaataattgataaccataatagtcaaaacaattaatcaaattttggttcataacccagttcagaacatgatagaaatattcattggtcaaaacagcatccaaaccacaataatcgaaacaacaatatatcaaattttggttcatacccagttcagaacacgaaattcagttcataaaaaagttaaacttgtctcaatttgaacatgctaggaatattcaattgtcaaaaactgcttcccatttttaataattgataatcccaataaccaaaacagcacaagtagcaatatttatcaataagaatcgtaaaaagggtaataaatcatagaaaaattaaccatgtaaacatcaataatactaaataataacataaatatataacagaacatacataaaaattaataaaagttgagaaagaacaaaccttgacgaagttaccaagagtctttgtggatcccctggatgatgtgaaaacatcatcaattccagcaaactgaagcaccttcttaggaaccctagcagcaacaataccagcaccacgaggagctggaaccatacgaacagtaaccgaaccacactttccagtaaccttacaaggcacggtgtgaggctttccgatcttgttaccccaataaccccttctaacagggataacagagagcttagccaaaataatagcaccacgaatggcagtagcaacttccttactacacttcacaccaagaccgacgtgaccattgctgtcaccgacgacaacgaaggccttgaacctagttcgctgaccagcacgagtctgtttctgaacaggcatgattttcatgacctcatccttgagacttggtccgacaagtgtgtcgatgatttgatgttccttgattggaagagaatggaggtagatctgttctagggaagcgatcttaccttccttgacgagacgaccgagcttggtgaccggtacccatttctcctcttcctcacgtcgaccagcacgtcggcgaccacggccgcggtctccacctctccaccgcggccacggtctccaccgaaaccgcgtccgaagccacctcgctcacctcctctttctgccattgttggggattggagatttaggggaagggagagaaaccctagtttgtaagtgtgtgaaagaaaataaactctgatgaagtgagtaagataaccggtggctttaggagtatagagatgaaaccctagtaaggtttcgagatagatatcatttttgggcctaattggttgggctcttcatatgggtttctccaggcccatattttctttagatatttatta

SEQ ID NO: 45786 - DNA, 2589 bp, Cannabis sativa
tttttttttttttttttggatcttgctaaaattaacaatttcatgtctttttttttagggggaaagaaaaagattaaatttttttttttggggtttaggaaaatgactcggcagaaaatagagataaagaaaatagataacataacagcaagacaagtaacattttcaaagagaagaagagggcttttcaagaaagctcaagaactttccactctatgcgatgctcaacttgctctcattgtcttttcttccactggtaaactctatgagtattccagctcaaggtaattatatatatagattttgttagtttaattaagtctaagcttttttttttttggaatataatggagttttatctaataatttcttaatatataaaattgtattgtactggaaaataagctttatattttctatatatatatttatttatagatatatatgtaagttttgatagtacatgtacgtatggctcagcacttctgatatgtatatatatatattctttttctgttattattttaaagaatatttttttgtatattacttaatttacatttatgtatatatacttgggaaaatatatatgtatatttagtttttctttttgtctatatgagatgagatattattacatgtacttcagcaaaaaaaaaagggatttatatgagatgagacaataacttttataaaatggaaattttagtactatatagtactatgatttattataggtaaatattgtaatgtttaacttaataacttaataatattgtaataatgtttggctctataatggatatgttatgcttatttgatataagtctatatttataagtttttttacatttattttcttagagtttatggactgatattgttatcaaaattagtaattatttattgttaatttattgctgttaattgcattaaaatggtgacattgcaattgatttgacagttagctttcagatattttatatttggggttagagagattatatataattttgtagggatatgattttgatccgtgattgtacttttacggaatgcattccgtaatgtacgatagccgtcagataagggatttatttgatctgacggttgagattgatctagaggtaattatggttaaaaagtagaaacgtatcctgacactcatttaatgtaccccgaggcctatctaatgtaccacagaatacattccgtgaaaatacatcacgggatcgtgtccctaattttgtatatgtatatcatcagtgtattgaggatataatatatacattacaaatatatattttatgcagcttttagtttggttatcttgagatactaatcacgaattataatatatatatttataatttcagcattaatttgaatatgtttaatgtgttaattacttattatatacaatacatgtatgtactagtgtatactcttacataattcatgatgagttgcttaattttctaactatacattctatatttcatgaaaaaaatttcaatttctcacctaaaaataagctaaatatgtcataaaaaaatgctatcaaaggatcaattatgatatatattgatcagtacaaacatatatataaaagggtttcttaattttcagctttgcatgtcttcattttctttatatatattgttatttgagtatatatatatttgtgtgtgtgacatttaattttgtgtattgtttgttgtttaaagtatgcagcaagtgattaaacgacatagtttgcaatcagattatcctgaaaagtcgaggcaaccatcttttgatgagcttcaggtaataacatatatagtaatacacaaatatttagttacatttttgtaataatatattaattaattcaaggatgggaaataatgttcttactttttctttctttctaattttacacatataaaaccatgttgttgttttatatgaattagaagaagggtggtttgtgaaagtagatctttttttataataaaatgtttttttttcttttcttttaataattttttacaaaacatatagtttttaagattggataatgtcaaagtgtgtagtgttggaaatactgttatattatgtataagaatataatatatagatttaatatgtgtaataaactaataataatattgtaacatatgacaatatatatattaattgtcattttttttataacatttggggaagttacttgttacacatcaccaatattatcaccaatattaagtgtgttacacattttaatttaaaattcctaatgctataagtgttatggtgtgtgcatgagttacatttgagtccataacatccatggagttatgagtttgaatttcaaatagtgatatcctaaacactatataaagaggtctaagatgcttatattggtatgagaagttttctatcaaaaaagcacattaattgttagaaaactctaagactcttgttgatataattcccaaaactattttcatgatgaaagtgatctcaatgcttagagatagggaaaataagcttttggacaaaagtttaataccttgttctagtcatagtgatccccactaatct

SEQ ID NO: 45787 - DNA, 3518 bp, Cannabis sativa
tgtgtcttgactccctgcatttcagctttgcacaaaaggtcttgaatgtatttcttttgagaaaggatgagaccagtttcggttgtcaaagctttgattccaagaaagtaatttaatacaccaagatccttgagagcaaaggattgatgtaatttggtgatcaaggatgaaactaatgtgggattggaacctgtgatcaatatatcatcaacatacactaacacatacaagcaacaagaagaatcaaacttgacaaagagagaatgatctgttttggctgaagcaaacccgaaagcaattaaaacagaggataatttttcaaaccatgctcttggtgcttgctttaagccataaatggccttttgaagtttgcacactttatgaggagcagtaggatccacaaacccaggtggctgcatcatataaatttcttcatgcaagtcaccatttagaaaagcattgttaatgtctagctgccttattgccaaccttttgttaagaagcaatagttaacacaattctaatggtgacaggcttgataacaggactgaaagtttcattgaaatcgtacccttcttgttgatgatagccctttgccacaagtcttgctttgtattgaacaacattaccttcctcatcctctttaattctataaacccacttgcaacctataggttctctgccttcaggaagattgacaagtatccaagttttgtttttgattaaagcaacccgttccacatccatggctctaagccatttttcattttgcatagctgcctttattgttttgggatataaagaggccattaacactctcggttttcgaatcccagacttactcctagtacacataggatgttgatttgtgatggtaggagtaatgctaggaccgggtactgttgagtgtgttgtatgaggctgagttgtgactgctgtagcaggtaaaggaggctcgggctgcaatggcacagtgactgcagaggctacagtagtagcaggtggtacaggtgggacacatgagggaataggacatgagagagagtcaatatgagtaggggaggaatggtcatttggagtgggacataaagggggaggattaggcacggtaggtggtccaggaggagtactttgggttaaaagttgtatggcagtaggtaaagtaggtgagtgagtgtcattttttgtggaaaaagcagcatgtgaaaatgggaaaatgtgctcatcaaagagtacatcacgtgacacataaactctaccctccttagacaagcatttgtaccctttatgagataaactataaccaaggaaaacacatggagtagacctataattgagtttgactctattataaggtctaagattaggatagcacaagcatccaaagacctttaacattgtgtaatcaggtttaacttgaaaaagtgtttccaaaggggtactaaaatggagtttgggtgtaggcattctattaatgagaaacacagctgtgcgataagcctcatcccaatatttgagaggtaaggatgcttgagctaacaaggttaaaccactttccactatgtgcctatgtttgcgttcagcaaccccattttgctcatgagtgtgaggacatgacaacttatgaataatcccatgctcatttaaaagttttgtgaaagcttgatactcaccaccccaatcagattggagctttttgattttgtatccaagttgtaattcaacttgtgctttgaaagtgataaaggtgggtaaagcttcacatttggttctcaacatatagatccaagtatgtcttgaataagcatcaatgaaactgatgtaatatctatagccactagatgagacaataggggcaggaccccacagatctgagtgcaaaagttgtaaaggttcattatattcagtagtggaattagagaaaggtgatttatggtgttttcctaaacaacaagcagcacatagatctgaaaagtttgcatcagttttattgctcaatgtgatattacaagaagacaaagcactttgtacaattttggcactaggatgtcctagtctattgtgccatagagagaaaagagaatttcttgtgggtatagtagtgctattacattgatctgttggactaagagaagtgtgtggtgatgactcggattgggtattaatactccttttggtgtgtgcaagactttggagttggacagagtcaaatttgtagagaccttgatcaagcttcccaaccaacaagatcttctgagttacctgatctttgacacaacagtgagaaggatgaaactcaaaatagacttggttatccttagcaaattgtgacacactaaggaggtttttggttatatgaggtacatgcaaaagattactcaagacaagttgttgagaatggaaaggggaaagaatgaaagtcttaccaatactttgaatgttgagtcctgtgccatcccccatatgaatttgttgatctccaatgtaatcatttgagtagatcagattgtgagcatttggtgtgagatggtgtgtagcacccgagtctgggtaccaactgttgtcttgaacaacttcaggagaagcatataagtgtgaacactcagcaagattagcacttccattgaagctttgaaaagtttcaggaccagtgaatgacttatcaaatcggtagaaacatttttgtgccgtgtgacccaacttgtgacacaattggcactgaatcttttgtccccatgcagaatactgaccacggccttggccactccctcctttttgctggtgcatttggccacggccaggaggaccacgaggctgaaaatgttgctgatgagatccaaagccagggggagggtaatttgcagcatatgaaccaggagaacccctgaacattgaagattgagatgtaggattagaagatggataatagtgagtggagaaagtacctctgcctcctgtgaaaggttttgtgagatgtaggtttgcttctggtttggcaatatcaagatcctctgaatccttttccaatcttacttcttgagccataagaagtgcctcaatttctgccactgtgtatgtttccaatcgagtgttaactgaagtaacaaagacattgtactcactcgaaaggccattgaagattgcctctatgtgatcttgagctgacattggatgtccaatggaggcaagaagatctaccagagtcttgattttcagcaagaattcattgagagaacctttcatctttgagtttcggagttgtgttttatacttgccaatattagctcgatttaatgctgtgtagtatgtacgcagagtatcccagatttgtgcagccgactcacacccgaccattcttgtgagaatgttttcagacatagaagacagtaaccaagaaactaagatgctgtcctgttgatcccaagattcatattctggtgagaggcgattctgcagaagatcttcattcgtgaggaatttgagaggagtcttggttggatcgagatgatgctggagac

SEQ ID NO: 45788 - DNA, 1796 bp, Cannabis sativa
ttaccgccaaaaattaaatttaggtatttatttacaactgggagttaaacttaggtatttatgtcgtaaattacttaacatttttttaatataattaacttacgaacaaatgcagaaatatacctagttttgtcataacaactttcgatcggattattattaaattttattttgacaaaaaattagttttggatactctattttgtatcattttagaaataaatacagagtctaatgtgttattttacaaaacagaagcccaataatcagtaactcttgcaaaacataaaatctaatatatttctatttaatattattagctataatctctcaattagaatatactttacttagttactaagtgtattcttaaatagaaattttactgtacatgtacagctaaaactagtgagaaattttgtttctaaccatagccgaaataaatataacacacaaacacaatacttacttgcactacaagaaaaaacatttatgataacactgaaaaagtgtattaaatgtattttataacaatttgacagcccatgtaattaaaaattgacatttaattatattttttacatgttattaaatagtatattataacattattttagtgttatatattataaatacttatcattaatttagtgttatagttcattatgttacatttattaataacactttcaaaatgtaatcatataagttttaattacattattattatgttatatatagagaaatattacattttaattttgttataatttcttaataataactattttttaatgttatcattcctcttatgttatattcattgaaaaacattttaaaaatgtaatcatataatttttcattacattattattatgttatatattaagaaatattacattttaatattgctataattctcaataataacacaagtaccaaataacatgataaaatctaaaaaatatttcttatatcatcaaaatattcaattcatgtatcaaaaatgaaatttgctccaagtacaaaataacatgataaaagctcatgaatgtataataagtctaataaaaatctatttgtaacatttatcatcaattactaattgcacagattcatgtcacttgatcgtgtcactatctcgatcacctatagcaattagcagcagaccttgaaagaaataatgttctggatattgactttttccacttagaattcgccattgaataccatcctctgcttcatcaataaacaatcatttatctacatgcttcttaagtttcacataatgaagctggaataatcttgggtccaagtgatactaaattttgtagagctataattggacagtcaaaataccacatttcttctcgggctggcaccaactttcctacaacaaagctcacgtcaaagttgtacaaattgagcttttcaagttcagcatctgcgcaggcttcaataaaatcaacaccacagttgttgcacaaaatctcaggctcaaccgacggtgttgtagaccacttcacctgctatagaacagaaccaacccttgagccatgctcttcttcaaactaccaataaaatcgtgcggcactagtagaactcggtgggatttttgtagcataagatactcacgtagttggtttctggtatcatatgaagatcaaaaagttgaacattggcactacaacaaatttaatttttaggggcgacaattttgaggcgacaaaaaatcacctctaatagtaagactattagaggcgacaaatcatggtcgcccctaaagaaacaggttt

SEQ ID NO: 45789 - DNA, 4584 bp, Cannabis sativa
taaattatttaattttttttttaagaaaataataatctgattctgaacttcttttaaaagttttaaaacaaattcataaattaaaaagatatattttattacgtcaaaaaaatctatattttaaattcaaaaaagttaatattttgatatttatacaaagaacaatgatatttatttaaaaatatatatctattgattttaaattttaaattttaaatatatctataaaattatatatataaatatatataatccaacacctaattaaacccctaacgaaccgtgaaattttatctactaaaacacacatactcttctctttcgatactcaatcatggctactaatttcattgttctcattattattcttcttttttttccaacttccatgtctatttctacacagaaaatatgtaaccaaactgaatatccctcctattgtcaaaacatattcaattcttcatcatcggcagaggataatgatatttattattatggacgacttgcagtacaaacatccttagtcagatcagaaaggtttgtaaactcagttcagaattatttacaatattcatacaatatcgacaacaacaccaaaaactcaggagatggccccacacaaaccctagctttaaagggttgcaaagattttgcttcttctaatgtatatatgcttgataatatcatagcaatgataaacaacactaaccaagtccttccattctcacaagccaacaccttacaagacaagctcactgcccttttgcctaatctctacacttgcttagatttattggaaaccactcctacatctgagaacattagaaacgacttatcgcagatgatagacgacgatgttaaggttcatatgatctctctcactctttgtaccgaaggttgggtgtccaaggataagaaaaacattaataataataataataatggtcaacaatctcctcctctgctaagtaaattcaagttagcatcagataaggcgaataagaaagcgattttggagtcgattttgaaaggggtaaaagtgaatgtggatcatcaccatcatagtgaagacgagaatcagcaaggttttgtcattataaacgattttgttgttgtgagcaaagatggtagttgggactttacaagtatcaacgacgctatcaacgcagcacctagtcgtagttataatgatggttactttttaatctatgtcaccgccggtgtttattcagagtacgtcaatgtaggcgccgaaaagactaatttgtttttactcggtgaaggtattcacaagactgttatcactggaaaccgaaataatgctgatggattttctatttcaagttcagcaactctctgtaagtaatataaataatgtgtttttttatttatttatttatttatgtgtttatatattataatgtataatttggttccttgtatttaaggattattattaattatgctgttaaattcatgcattgcatcatgtaatataatattactacgtatgattctagttgaaattaatatatataagagtatactagctattcatattggaaaaactaatagacatattttttaagttgttattattaagtgataggataaatttcttaaattttaatgttataataccatatttctgtaatttaaactatatttttctttttgataagtgtacaaaattaacaattatgttatacttactgtttaattataaatattaaggtaagtcgctataatacaccctctaaaaagagtgtagattatagtttgattttttcaaaatatcttaaacaacctttcaaataatttatattaatacataaatattcgttaatatattattatagataagttttcatatattaattgaagtataattaaactaacttgttatggtggtatatatatggtgtgatagctgtgtcaggtgatggttttatgggtgcaaatctatcagtagtaaacgcagctggactacacaaagaacaagcagtggctttacgaaacactgccgaccactccacattttatagctgcagcttcgaagggtatcaagacacactttatattcattcacaccgtcaattttacagagactgtgatatttacggaacagtagatttcatatttggtaatgctacagctataattcaaaattccaatatctatgtccgaaagcctcttttaggtcaatctgcagtgatcacagcccacggtcgaacccacccaactcaacaaagtggaatctcaattcacaatagcaacattctacccacaacagacttgacaacctctaatgctagactcgaaagacgtagaagaaccaaggcttttctggggaggccgtggagggattgtgcacgtgttgtgtatatgcaatcttacatggatggagttattgactcagctgggtggcacagatgggatcaaactgattttggtttgaatgatgcatatatgggagaatataataattggggtcctggatcgcatactgaaaaacgacccaagtggtcagcttttcatattctcaacaccactgatgctcaggattttactgtgtctaattttatagatggtgattcgtggttgccacagacgggtgtaccttacactggtggattgatttagcttaaatttattatgcatataatgatatatgcatagattaacattttattagcatacatgtttagttaatgtatttttagttgggtggaatcgtaagctacccctacttttattttatttttaaactattttaattcttttagtataaattggaaaataaaaaaaaaaaattaattagtgcaactagtatttgaaatttatttttgatataaagttatagcacaccaaattgggatttaccatacacatgcattggaaggcatgcacatgcacgtgcatatataattaacttttcttaattactagattttttataacctgtttcaattataggcatatatataattatataattatatataccaattccattaaaacggttctaagaaaaataagaagatatgaacagtataccctagtaagaaatcaagttggagatatatggagatctgcttctcatatatatatttatcggtgaaggtagtgagtaggtaaaagggagaaaagagaagggtatgtaatgtaatgtgtaggtaaaagggagaaagttgtagagatctggacaacggaaatgctaaaaaattaaatctgttacaagaaggtgtggctttttaattaattaagctgacgttgttaattttaggctaattagtaattttctccccaaattttgacatgtatcaaatcatgccccctaaacttttttggccgttaaaaattcccctgaactattgagattgttagatttaaggactttttgtctaattttagggggatacagaggatagtaaatcatggtttcacttgactttatttgctacaatagatttttgatgctttcaaaactttcttacacttcaaagttgaagctaaattataaattgggaaatctattaaagttttgcaaaaagactggggtgagaaatttagatcattcacaaagttcttaatattgagcaaggaattcaccacagacattcctgtcccaccacacatcggcagaatggcttggctaagaggaagcatatgcacattgttgaaaatggctttacccttttagctcaagcttcattacctctcaagttttaggatgaggcatttcgaacaaaacattgttatccctagcaaacttagaaacactaattaatcaagttctttgttattttaggacatggagaagattatttaagacaagatgttgagatgagtgtttaggaagaataaaagattgaccaatatgtttaagcatcacctacatacatttggtcttgatcaacataatcaaaacagttagcaagattttgggcttgtggagtgcaatgatttgttgctcctgaatttggataccagttggcatcactggttcctcctgaagtggtgagattagcttgatttggttgagcctgctgtggtgcgtgtactgctggttggccccaaattttgacctgtgaaagacttgtcaaaacgataaaagtaatcatggacagtgaatccaaacctcaggcaaagctgacattggaccctattattcactggcatagctaatctaccacctctatttgggttaaagttttctcaatataatttgactcatttttttagctcaaattatacacaatctattcgagatggtaagaaaatgctaagggaagtgctaattaaataccataaatgatggcatactattattggtgtattttattatttggtcttattacaaattttgatttagtgaataatattttacagaaacttctgtagggttttcttataatgatctcaaactctacttttttatttattttttaaaaaaacatttaatgtgttgttatgaatgattaaactaaagagctcttaagagtttttaaaagttttactactacactaaagcactagttttaagttttgataataataaaactatatataaggaccccaaaa

SEQ ID NO: 45790 - DNA, 3194 bp, Cannabis sativa
tccgtatgtcacctctgccactatgggtctcgaaaatcatatggtgagttctcttttggatattcatgatatttcttgggatcattctcttgtacatgacatgtttaatccccgagatgctcatttgatccttggaattcccttgagctctacccatgttgaagattgttggtcttggaagggtgagaagtctggccatttttctgtaagcagtgcatacagtatactgcaggttagtaaatacgggcagcagaggcacccgaatactggtttttggcacaagttttggcacctcaaaattccaccgaaagtcaagaattttatatggcgtgctgtcatcaatactctccccacttgccttgagttggtttctaaaaatgttgacttttcttctctgtgtcccgtctgccataatgcagccgagactgctgctcacgtgttgttaaattgctcttttgcactcagctgttgggagcaatgcgagttcactttgcaatccgatgcttcttcaactattgggcactggcttgagtccacttttgagaagcatagtgatgacatatcatgccgtgctatcatgttatgttgggcactttggaagtctcgtaataagcttgtttgggaaaagaaatcctcctctccaactatagttctaaattcagcatggactacacttgaccactggcgttctgctcaagacaaatctagtttattatcattgtctctcttacataatgataataacattgagcgttggaccaaacccgattcaaatacagtcaagttaaatgtggatggagctttgtttgaggaagaaaatgcatatggctatggaattgtggctcgtgattctatgggttgccttgttgattttaaagctaattatcatggaggtacttattcagcggaggtggtggaagccctcggtatcaaagaggcgcttagttggctaaaagataaggaatggaatcatgttgaaattgagacagatagcatggtcacggtccaagcaatttttagtaatcaacacatgacttctatttttggtttggttgttaatgattgtaaaagtttattatctgttttgaataatgtaagtgttcgttttattagacgatcagcaaaccgcgtcgctcactttgttgctaggcgttcccagtttttctctgatcgtagcattcataggaatgtcattcctaatgagctttcatgctctcttgtatgatgaatgctaaatttcaatgaagttgatatttcattttcaaaaaaaaaaaaaaatcttaagttttataatattttaatacatcccatttaatcttattaatatcatttataatgacatactcgattgtgttgagttattaatgttgattatttacattttatcaagcaaattatgataatcttagaactcaatttagaaggaatcattttgatcagttgggtatagacagacctatcgcttacatattcaaaatccacccccttagattaaaatattccatgattataaataaatttgaaacatcaaattttcatctaaaatattgtaaaacaatcaaatttcacaaatattatatcataaattatacatgacataaataaaacatattaaataaaaaaaattatcttgaatatgatcattatataatcaagtaatctattaaattattaattaattaacatgaaaaaattattttgactcaaaagctacttgtaagtacaaaatgttgttgaaagctaatacatattaatatcttggcaataaaaagatggaaaaaattatgtcttcaattagtaaattgattcttaggcaaaacaagaataatagtgatttgagattatacgtagacaaccacttgtatcttatgagaataaggtatttacattgtgtaaaaagaggtagattaatttttcatacttcagatatgatgtttgaagttgctcgtttgaagctttcggtaaaaacttctcacaagcttagatatgatgtaagttactaatttttttttgaagttgcagtactatcatacaatatatgttagctttatttgttagaattttatataaaaaattatttctttagtaattaaataaattaatatatatgtttgaatataagtattctcaatatgtaatttataaatatattaaaatattttatgattaaaaatgaatttgaaacatcaaaatttcatcttaaatattgtaagataattaatttttacaaatattatatcataaaatataaagtacataaataaaatatattaaataaaaaaatcttaaaatatgatcttaaaatataatcaagaaattcctaaaatcatgaattaaataacatgaaaaaatttaggcatgatgagtttcgtattcactctaacagaaataattttacttctttcatttttttttattttttatttataatgaccatatttaattttttataattactttaggttttttttatttgggttgtttgttactatcttatctcaaaaatttgttacattacataatttttttttagcaaagttaataatttttactaataataattgcatattgtttctagcaaagttaataattgtagaaaagacactaaatataataagagtaaataacgacataagtacttaaaattttatgtttgtaagcggcataagtacccaatgtttgtaaaactataatttttttctaattttgtcagtacaaactctgttattatcttaaacatgacacatataaagcccgaattctaaattattgggtctaaatagaaatatgtagtatcagttacttctaaatattcttttaataaattcaaaacagagtctgtactgacgaaacgagaaaagaattacagttttacaaacattgaatacttatgccgctaaaaataaacattgaatttatgccgcttataaacttaaaactttgaacatataataataaaaaaattatataataataaaattgtaattgtctcaatttggtggtgttgaactaataatgtccatagatattattgcaaagaaagaatgttaaaagagccttttctttcctctttggcaatgtcctaaacaataagataagctctccattctctctctcttctctgaatgtaaatatctcacttccagttccagtcgccataaccaacaccaccaaagcttagtggttcacctctc

SEQ ID NO: 45791 - DNA, 3321 bp, Cannabis sativa
aaatacgtacatatatacagattggtcaatacattattagtgcaacataacataaatgcatgcagtaaagaaaatgtctaaaagggattagaacaagaaaatgtatagactgtataattccttgtgtgtgtatgtacgtataaacttagttgatgtacagatatatatagtggatacaatcattattattattattattattattattatgctacaaattaacttaacattgaagtattaattatattagtctcagtagttagctagaggtccattttcattttagttgcttttaaaatacatcttcatattgattcatggagatttattaatttaattaaaaataaataaagccccaaataatactgcacgtgatttaattcggtaataaaataattccatagctaggtagctagcaagtgtgttttttattatgcagggaaattataatcaagagaacttgttccaaattatacattaatttatagagatgacatggataagttgatcagattatatatatatatataatcttaatgttgtgtttaattaatgaatgaattaattaacctgttgccaacaacgccatgaagacttattatcaacttttcctcctcgggagtgaatctgcctcttctaatatcaggcctcaaataattaatccatctcaaacggcaactcttaccacacctttgaagccctaattaattaattaaaattaacattaatataaaggatagaaaaatcaatatttacaattgctataacgattcaaacgaaatattagagaagaatagaatcaatataaaacacatattaacattaattaatcaataatcacctgctttctcaggaacttcactccagcagccataaccatgggtagtgatgtatctaatgagtttttcgtcttcttcaggtgaccaaagacctctcttaaccttttgttggttgcagcaagagtggtgacccatgtaataatacctcaattatattcttgatcagtaattaatactatatataagcttcaattaatgtctctttgtgtaatatatatatatatgtaatatgttaattaagtttgtagagatattacagagaaataattattatgagatggagaaagtgaagagagaatttaaataggaagaggtgataaattatatggggttggggcataataataataataaactcaaagtatgatgatctcctaaagcctcctttaaaagtaatcacaaacacaaaagtagaatgtgagccgacatttacaaccggggtttgctattgtatagggagccctaattggtgggtccgcaaaacgacgggacccagatctccatctaacccaaaaacgacgctctatcaacttttcttttcttttcttttctttcttactatagatactattttctacgtacatctatctatatatttgtttgtagtattacgtaattttaccaaactcatctcttcacgtcctagcacttcttataacattgccggtgggtttcccacaccatgtatttcctcccctattactgacactatgacacgtcctcaatacacgtggacaccacacaccccaccctaacattggcatgcacaaaaatagtaatagtaataaattattttatatatattagtttgttatatttttaatttttattttgattacatatgcttgtataattaatcttttaattaaaaaattatttcatttaagcgatgtttataaataaaaaatacactaatattttaaatttgttgttaattataattttaatttcatcgtaatatttttaattttatattattagttttacattttttataaatgttaatacaaattcaataataataaaaagatattatttttataactgcaatacacttaatgatgttacaataatgattctttaagaaatataagtactttttttttgttttattttttaattaaaagaacaataataaaaatattttcttaaaaaaattgtgaattgggtaaaaagaaaataatagaaatatattttttttagataattacaataaatttaaatttaaattgcaatgttaaaaacaatcttttatattatataatcatatttaatataaaataaaagatgagagatatgtgtgaatttaaaattgaatcataatattttgaaaaaaatgaacactacttttaattatatatggccacattttttataacatatatatacgagagctctatagtgtggcacaaattttctgtcacattggtgcaggggcggatgtaggttaagcttcacaggggccatggcccctcatctttccatcgatatattatatattttatttaaatcatgagtttttaaatcttttttttttttttactttaggataacatatatgagtaactactatatgtaatatatattaattaataaaaaaaaaaggtaacatagtgtacatactgaatgctagacctctacctgaattatttcggtgcatttcaagggaaaaatcttcacaattcaggaagaaggctctaatagcagctcccgtgagttttgtttaccaaatatgggtgaacaaaaataattgttattattggaatcaaaaaatgcaaacaatttcaggctgcatacagactattaaaaatagtgttaataagtatagggtatctaatattattagaacaacaaatttaaacagaaaaaggaagcatggtttgatgccttctactttgtctttctatagttaatgagcaggccaaaagttttagtgctaatagtatgtaaagaagtttgtagcaataaaaaattactctacactactacaatatgggcttttagaggctgtttttcaactattttcataaaaagagaagctaaagagtgtgacaatatcagcctaattcaaaattgatatttagaggcatttgtttttggtaaaaaccgtagctataaaaattaactataccctttagagtcgtttaggggttggaaaatttttaggattattgattaactctatgtcgttggttattaggaaataaccgacgccataggatatatatacaaccctccgacttcatcttccccacttcgtcttcctccttcagcacgataagcaaccaccttccaaagcagaaccaagaaacccatgaaacccttgccacctaccactaaaaaaaattctatatctgcctcatttttaccctattttctgttaaaatattctattttcaatacctacaactgtacactaaaaacgtttgggttttttctcctctatcactgtaactaaaacccattaaaaaaaaggttgtgt

SEQ ID NO: 45792 - DNA, 1984 bp, Cannabis sativa
aaataaacccagatttcatctaaaaatctagaaaattttcaaaatctcattcctaaacaaaagaatatctcataaatctttaccaatattaatcttacccctttgctgttccttctaattgataaatttattgcaacccattgtgattttaaacaatgaaatctttctcattctgctaataccttcaatttcaatttacattccagctctagcactaattcttaacaagttccaaaaagagaaagttaaggagttacaaaacaattcaaagccctgatcgttcttcattttccacctccctaaacctaacaaaattgatctatcatacaaaacccacacaaatatttaaaaccagcacacataaacaaattcgagatggttattttagttgagactagtcgttgatgaacatttgggaaattgaatacatgtttggacttattcttatgagcaaattttgagttgctaagaaacattatacgagattcctcaatgtgaaaatgatgtattgctgactaacatatgttggtgttgcatagttctaatcgggtacttggtagagtcaaatgttagaataattgtgatgggaagttggcagtaaaaatttctcataaacactcccaataatattagatttacttcaagtgatacataagcatatacagtacattttgttgaattattttgtactatcgagtttaggtcaatgtttttggctagtttctgtggtttggtggggatttagtgtttgtggggcattagtagcaagggagttgaggcaagcatatttttgttatggaatgttgagcttcttatgttcaatggtggcctaaatctctcctcagaacaatcaaatatttgcaaatttaaacgaaggagcaatgaaagcaatacgattataattaccagtgctaaattatgtaggttgatgcagcagatgcagagaaattttgcaagacatttcagagaattcataatcaacttgtaagtattgtttgtatgatcattttcatggaccatagctactataaatgctgagtcctctatacttgcaaattaaattagattgtactactgcctaaggccttttttttatccacacatttcaggttaataaagaactgagttcagaggccgcccaaaattttctaaacttgtcaatttctgacaaataggctaaagtacgctttgtacatttgcttgttccttttttttcttattttcttaaaattataaatggcataattggatttcggcttgtgtgaatgcacacctgcttggatcaaatttgttacttttagaacaagtaatggagaggttaaatccatggagaaagagagtttatatagtccattgtattgtttgatgtaggtctcacaatttagtgctctgaaactgaaactgtgtataacaatagaaagagtacttcaccattgtcaattctcttgcgtactcgagataatattttgattgaaacatattcaaacttcatgatttgtagtttggtcaaattttgtgtttcatggcttgagcgcttatttaatggcagagttgatcattggaccacataaatttacagttaaaaaaaacacatttggtaatcgtagataagaacgcgagaaatccaaactcaaatccttttgtttttttgttatgaatagggtgaccaactaaatagatttactaacttttttcagcaaaaaacttcaatatatatttcttttgcaactagatttattgtttagcaaaaataaataaataacatgaatagtgggggaatgcagaatcttccgcatatcctagcaatgtcattatacaattattaactcaaattattcaatgtacatcgcatatacaactagcatttaattacaatgttaacactatttgtaaagggaaatttcactttttggccttaataatacaagccatattaaaatttataccctcccttaatttgtacaaatttagtccattaattaca

SEQ ID NO: 45793 - DNA, 1712 bp, Cannabis sativa
  modified_base (47)..(52): a, c, t, g, unknown or other
  modified_base (1434)..(1442): a, c, t, g, unknown or other
aaatagactattaaattaaatatttatttatattttattatttgatnnnnnnatctaaaaaatacaatttgagagtgatacataaatatatatattacatttttatttgtaccataatgttaattttataaaacaaaaattatttacaagagtaaaagatattttgttcaaaataataaaaatttcatttcattccatcaaatatcacaattcttatttagttattgattccacagtctttactaaataaaagattagaaattccatttcattctattcctattcctattgttattcccattattattccatttttattttgtaactaaatgccaccttaagaaaatagttagtggtacttatagaaggtactgagtactactgatactcaatgacaatgctcgacccatattcctatatatatatatatacataaaaatggctaaaagacactactagagtttagtattctcctcgagatcataccactattggtgtagtgaagtatcaagtttccatataacttaaaaaaatagcttcgaaagaatatcgtcatttgatcgtaaagtgttacctataaaaaatattaagcaccactaattcaactattataattaatacaattgtttttttctttctttttaatggacacccttctcctttttcttcttttctataaatttttaatttgttttcaaaaaaaaatatgtatatatatttttgaaaaaaatatgttgtatatttattttgtaaagcatattttgttcaaaacatacggcgagattaacggaggtaatttgattggattatctagaaatttatactttacacatattcataataacaaaaataccctacaaaacaataaatctttcaatatcaaaccaccctctgataatgtatttatattaagtggtatatattttttacatgaaatttgagaagtacacacctttaaagagttgttctgatagattttttatctgtttcggtacttttaaattttttttagtccaatcttcttttatgattacattcgttgtaactatttaagacaaaatgtaaatttttagaaaattctgaataatttacagtaacaaaaataaggcttaaataattacttactgcttgtataagaaaaagcaatttcacgtctaacaaaatatataaattttactgtggttattgtaaattactcgaattttttaaaaaaattcatagatatataactataatgtacgtgatcataaaataaattggactaaaattctattggtgatctaacaaaacacccatttaaggagatatactgtagtctcattttatatatttatttttttttaatacaaagtgatatctaatgttttagagatatatctgttagaatttgagataagatgaatgagatttcatttcaaaatcaattggcaatgnnnnnnnnngctcattcatcttatatattctattatatctttccacacattacacacattagcaatgtggaactctctaatattgcctctcaagatggtagctattttatttgctcactatttttgacaactcaatcataagcgtctcttttttggctcactatccctgatcacaagtggctctttttgctctactttttggatcgatatttttggatctatggtgacttttttttttggctcactattcttaaatcacaaggggatttttgacttttg

SEQ ID NO: 45794 - DNA, 2114 bp, Cannabis sativa
ttgacgtacggtattgtttgatcaatgtatttatataataataaatataagataaatttacgtggaatgtttggactttggatcatcttgtttggaattatgttacttttaaatattaattaattttccttggatgccatgaaatatgatatattatattttattagtgcaatttaaaatcgtctttttgttgaaatatgatgtattatgtttagatttttataagtttttatctaaaactcaaagaatctgatgtgataacattcctaaacaaagtattaattttaatttcctttgcattccttttctgatcaaagaatttattaaaaaatatgaataattaaaattttcataattaaacttcaatcttaaatatataataaactacataatttaggatcccgttaataaagttacataagtttgtaaaatcttagtactacaaaagtcatcggcatcgactatcaaaagtgagcctaagctgtcctgaagaccctaaacactccaagtataaccgtcttgatatgtacaatcttcatccttaactttagactcatcttgattcgattctagttcttacctgcacatacacgtactaactgtcagttgacaaactcagtaagaaaatcataaatataaacataaacgtatatccagactgtaaccaagcactcatacacctaatcacgatcagataactgggtcaagaacgttctcgatgaaagtatgacaaatcatgaatccaacctatactcagtactctagtcgtactgatgtggtagcaattagttcatattattaggaagcctagcatatgtctgttgatatcttagtgcaactctatgtatacttcaccaatatcctaatatgctaatttgatggctactgattgcctgacatatatttgtagacatcttaatgtaactctatgtatacctcactgatatcctgatatgttattctaatgacaaataatatgacgctaaacatgcatacacatatgcaactattatcctaatcttaccttgattctaaatgcaagcgtgtcggtaaccctaagtggaagctgctgctcgacgatttaagaccctaagtcacaatttatataaaactggtacatgatctcctaaatcacttttggagacttaaacttgaaactaaaaatttctctatcggtaaatagcgtgactaaaccctaaatcctgagaaaacactaaaaattgagatttgggaaaagtagcccccaaaaaatggcaggttatttctataaaaacggcaggccattttttgggttttctacctagaaaaacagtagaccattttcccggacacgacctgctatttttacagggaaaatggccaaaaacctcaaaactcaaccaaaacgattccaatatttttcaaactgtctagaatcttaaataattcatcaaacaaatccaaccaaaaagccttgaatcaaaaactaccattaatgagctaagcttgagctcaaagccctaacctagcccaaaacacaacaaaccagcctaaagcttctcactaaagcttaaacaaactcaaaaaaaaatcctaaaactttgctctaaacttagcaacacaaaaaagaactaaaatccccaaaatcctcaatgaaatcatataacaaccttaaaattaaagatagatagaagaggaattagtttatcttaacattgtcaacaattaaccttaaaaccttaacttccttagattttgatctgaatttgagagaaaagaggttgggtttgcttatgctttcttgtggccgaacccgatgagagagaaaagaagaagaaaggtgttgataagttcggataatttaaacttaaattttgtttttattcaaaaatagcataacttatttgacatagagatttttctagaataattacttatttccatctaataaataaaagccaaaagacaattcttccctgctttaataggaagtaacatcaccttctaggggcaaaatggtccaacattataaccctaaataagtcccgacattccaaatgtctaactatcatggtttgctaattctaagatattttttttttttaagaaaagcgtagatatattagattcagaag

SEQ ID NO: 45795 - DNA, 1202 bp, Cannabis sativa
tataatttcataacctaattataaagatcaatattaatattatttatagcaaataattatagattatatatacatactgaaagccaagtctttccccaagaaggtatgtatgttgcaccaccatgattaagaatccattgtcttgctttttcacaagtattgttttcaccattattggatttttctcctaataatattctcatacaaatatagttgagaactgtactaaacatagtgctttcaccttctacatgcaacccccatccaccatcttcattctacacatgagaattgaatttaaaaactaaaaatctcaacatataaataaatatacaacaacaaaattataatttatattataatttcgtaacctgatgataatatatgtaacgaagaatttctttgcaatgctcaggactcaaaataatattaagatggcctgtaatgtaaagacacattacctgtacatataaaaccaatattttaatagtactattggaagttttatataaccaattcattttctcaaaaattataacataaattcatcttataaaattgattgaaagagtaaataaataagtgactacatatgaactagtttaatcttttttttttctcttaataagagtataaattaaggaattaattaatctgaccaaaggaggaagaaagaacaaagggccagcgttctcagcaggccaatgtccatcatcggcctgcaaagctgcgacgaattgaactgcctttcttacggacgcagtcgccttttcataagtaatctcttcaccatcttctatcttaactctaccaattcttgatttgaatcttttttctgccaaaaactacatgcatgcatgtatacatcttcaattaatcaaaattaatcaatgtaaataaaactatagtatataaatatatattatttgtcactacaaaattttttacttttagtcacaataaaacttgtgactaaagataaaaaagttgtgactaattattaattattattcctatgttatgactaaaaggtccgtggctaaatgtattagtcacaaaaattataatttttgttgtgattaaatgtgattttagtcgtacactacttgttgtaactaaaagtaaattagtgacaacttatatctaaatactatgttttagtcataagtagttttttattatgaccaaaagtcacatttagt

SEQ ID NO: 45796 - DNA, 1474 bp, Cannabis sativa
tttcgtccatacaacatctcatatggcgtcattttgattgtggcttgatagctattattataagaaaattcaattactggtaaatacttattccacaagccagtgaagcatcgtgcacatgcttgaagcatatcttcgagtatttggatggtacattcagattgtctgtctgtttagggatcaaatgtcatactaagttttaattgcatccccattgccttgtgtagaccctccaaaaacttggaggtgaatactgaacctctttggaactccatgcaaccttaatatctcttgcatgtacaagtcagcatattgctctacattataagtagactttaccagaacaaagtgagctgactttgtgagtctatttatagttacccaaaccaagtcatgtggcttggttgttcggggtaatcccgtcacaaagtccatgtccatatcttctcctttccattatggtatttttaagggttgcaacattcttgttggtctctgatgttcagccttaagttgttggcatgtgagacattaggatacaaatttagctacatcattcttcattcctggccaccagttcatggtttttaaatcgttctacatttttggtttaccctaaatgcatcgagtagggtgtagtgtgtacttccattatgatctttctttaaactctatgtcgttggctatacacactcttcacttatacttcaacatgttgtctgtacctacagagaaattctctacctccttatctggcaagcttgctctttttcttttgtaagatttcatcaacaacttgtgtatctttaagttcttgtagcaacgttgagacaatagtaaggtaagctagtctttttgtaatcatctctataccacttttttggagttcccgttgtaatggcttttccatttatgtcagtatttccaagttgcataattgcatctgcttagcgcgtctggcattacattggccttctttgggtggtaatagattttgcaatcaaagtccttaacaagctctggccatcgtttgtgccttgtgttgagttccttctacgtaaagaagtacattagactcgtgtggttggtatagatttcacatttcttctcgtagagatagtgcctccatatctttcatgcaaaaattactgctgccaactcgagatcgtgtatttcatacctttgctcatactccttaagttatcttgaggcgtacgctactactttctcattctgcaatggcactataacgcctttacttaaaataaagtgcaataaataaactgacgttaagatactaatgttgcctttatttaaaaaaaaaaaaacaattttcaaaacatgggtacccagttgaaaacaaaatattactatttaaataaatgtaaagaaaatttaaacgacaacatccacaatatgttttataaatttaaaagtgactttcagcagaagatgaccaagaccacacgcagtt

SEQ ID NO: 45797 - DNA, 1055 bp, Cannabis sativa
tttttatttttatttttatcactccttttggtaatactaaattactaattccactcatttcatgatagactgtcgtcctctatatccaccaaaaataaaaaaaataaagataatttaattagtactaattaagaccccaaaaaataagtgtacttgttttatttccctccttccttgtaaaaaataaaagttttcatcaattttcatgtactattaattattgggtaaataatattttaaatttttttgttaaaaaaaaaaaattacctactatatttaatatatgaaatatatatataactagtctagtcgtaatacaattatcatattattattatgtattattttaattaaaagtgaactttgggtactattttaaaaaaggaaattttaataaatatgcataaaatactttaattttttttcccttaatccatatgtattaaaattgtctatatatgatcacattaccatattcctcatgatacccctcacatttaaaatctcaaacccaaactgcctcctctctctgcctctcgcccaaacccacggtgaatttatcccaaacccatccaatcttaaacccacagtgacggcgccccctgctcttgacactattgacggtggacccagacatcatcttttttaggaatgtcatatcccacaaatattaaatgttatgtgtttagggaaaaaatattaagtatatgtaattataaaaaatcaaattttcctttaaaaattacaagacctaatttttcatttaataaaacagcgaaccaagtcgataacttttacaaaacacaagttttaaactaacatttactcaaaattaatattttcctcttaaataaaacaactactctttttcaacacaataacttggatcacttttctctttccatgggtcggggaaaaaaggaaatttagaaaccaaaaatttaagggcagcagtagtggtggctcggtggtggagtggcgacaatggtggttctcgcacaacgatggtcgagagaagacactggtgtgactctcgcatgacagacacacacaca

SEQ ID NO: 45798 - DNA, 1548 bp, Cannabis sativa
acatgttgtgcaatgaaaaatatataagtaaatgtgctagttattttttgagccaaaaaattaaaattttattaaatcaaatgaactaccaagatagcttccaaaccagcagggacaaaactcctgcggaaaacacagccagcaatagaaccagaagaacgagctaaaaaattagccgcctgattcccggaccgtttaacaaaactaattgaaataggaaataaaagagaggattgcataagagcaacacaatccgaaatcaaatgccccactggagacaacaaccgcttcttctgttgcacgacttgcaccagcaacagtgagtccgactccacaaccacaccatcagacataccccctcaacccaccttcccttcacccaactgaacgcctccttcaacgccatagcttcagccaaaaacgagttgggttgaccataagttttaacctagcgaatatgctagttattaattactctactttaaaaatatgtattattttctattaaaaaaataggtattatttggagatgaatgatggagtgagtacagtgacattagagatactttgtcctattattaagtttgtccttaaaaataaatgataaaagaaaaaattattatgtttgtagcacacttatatatttgtaacacttacagatacttttaaatatatttttaatgtagtactaatataatgttaatctaatgcactttaagagttcaaacaaaaaataaattgatagtctaatgataactttgttaggaattgcttcctatgcacaacaaaattgcaaaattgatggtacgctgaacaacactcacacatataaataatttatatattcataaagaaaagacaagatccattaacatgtcatatatattgttaattatgtaatatatatattaaaaaaatactcatgaaatatatatacacccatacatgtatacatacacacatacacaagtaaatacaaaaaaaaaaaatcagaatacgttgacattaacaacaacctcaacaagcataataaacaataactaagaaataaaaataaaacaaccacttgagttaggagaatgagtgtgtgttagaggttctgggttcgactcccaaattatatatagttgtaatatataaatgcttaaaagaaaaaagctcaatcatagtatggaacaccaatttttaacatgggatcttaattcatagttatcccagatgaagctatctcctttcatcaaaagctcttggtttatcaatgaagtgatgaacgaaagaaattaatctcgaccattagcgcccattctattcgaatcctacagaacaaaattgacatcacctaagattaatcacggtccccgaaactgttttcccgtctccataagctaagatcataattgttcttttttttttttttgataattataaggaaggccatatatacgagagagcagccatgtatggtaacaaggatcttggattaaaatcgtgggcacatatgtataatgtatatattattataaagtgtgatacaaaattaagtgacca

SEQ ID NO: 45799 - DNA, 942 bp, Cannabis sativa
ccagaaagcttgaacagttataagactatccgattccacagtgacatgagaaagctttgactcctttatccaacttaggacctcttttacaccataagcctcagcaagggtcggattaacacatccattccaagatcccgttctcgcctgcaagacatggcccccagaatcacgaaggacccaactgtacccatatttatttcgatccgtaaatgttgctgcatccacattgatcttgagtttattaacctctggtgcaccccattgctcatccccttctccactctgaatcaaaagagaagagggagtaaaattttttccttaagcaaaagaccattgttcaagatcaccattagcaaatgcaataacatttttgaccgacttggttttcccattccacaccttgttgttactatcttgccaaatagcccagcagagcatagccccatctgcctctccctcaaatcccagttgctaaaatgatcttgcaaccaactcccaaaggatacatcaccagggctatcgccatacaacccaactgatctccaacaagctgtagcaaaagaacaagtaaccaggcaatggataactgtttcaacacccctactacatctagggcaagtggaggaaattcgaacatgcctttggacaagtgatccacaggtaggcaaacaatttgacaccgatctccacaacatgtctttgacttttggaggacatttcaaagcccataaagcacgccaaaagtccggactaatagaggagccgctggaaggtttcaaatcttgaataagcttataagccgacttaactgaatagatccccgaaacctccttactccaataccaactatctgtcacatttgtagcacatataggtattttagaaatcaactccttatccctattattgaataagtcagcaataacttccacatcccat

SEQ ID NO: 45800 - DNA, 2285 bp, Cannabis sativa
ttgctctacaaccttaattctatcacttaataaactattcagccaatgaatttttttgttgtaatattataattttacaattggttatatattgcaatagtaaaatttataattaaaattgtaatttttcaatttattttgcgaaacaaactattattaattaagttacttgtgtttggccttgaattggaagtgagaaaaagtaataaaatttttacccctttagggtggcactcaatttttcttttagataaagtcttattatgcgccctttttcaaatactcattaccttcctttttctccaaatataattcattaacatgtcattgtaattatacatttgtataactttggccggaaaaagttggaaaatagctagtcattttagcaatattttggggtttttgtagccataagtttgttatattattaattaaagtgtaaattacaatttcctattataatgtattagtcaactttcatagctaaattacgtgttggagtattttttttttttaatttttttttatagttgtatttattatagttacggtatcatccctgtaaatttttgaatttttttgaatagtttatcaatccaaaaatagagttcttaatattccagtttactacgcgcttttaaaaatttcaaacttatttttcacactataatctattcgaaaattttcaaaaatttacaagaatgatgttgtaagtataacaaataccgccataaaaaaattgaaaaaaatattccaacaagtgttttcgaacacgaaaattaattaagaaaaattgtaataaaaaattataattagcactcttcttaattatttatcttcttcgaaataaaactcaataattatcatatttataaagaaataaattaccattgagaatgcattaatatccagctaatacaaatttaccataatggaagagaagaattgacttgagaaataaaaactcttgaattaagaattaagtgcatgtttggcatcataactaaaaaaattattttttgtttttaaaaataaaaaattattttttgaaaacaattaggcatgtttcaccttgctttttgaaaacagttttcaaaaaataaattaacaaaaaacaagaatttcgaaaacaataaaatgttgttttctgtattaaaaaataattcacttttgatcaatattgtttttagaaaacactaatcaaatgtcacttgtgttttgaaaacttcaaaaactagtttttgttctcatttttttaaacattttttttaaaacaaaaaaccaaaaacaagagaacatactcgtttagtaccttatatttttataaaaaaaatatatttggtaccttgagtttttaataatacttaattgatacctaatttggaattcataagaattcataaaattttttactattgattgtattgataaaattttattaaaaaaaattaaatttaaagtactaaatatgtatgattttaaaatacaagtaccaaataagcatcgttcctatagacaccccaaaaacaataccaagcatgttcttctaagtctctgaccagtgatagagattgaacaactcactgaactctatgacttttgagttatgaacagaagttatcagaggaaaaaacaattcaaacagtgaccaaaatttatatgtggcgttaggcttcttacctattcgttgaaaagtattctcagctatgacttttcttttcctcttctccttgctccatttgcattcgaaactgctggtaattaaaaacatataaatagcgagcttttctttgctttatattatatttaattatttatatattgatcaaaatgtacattctacaccactatatagtgtagcttatatatttttgcaagctagaagagggcaaaaaggaatcaatataacatattacatacactaaaaaaaaacacatacatgtagatgaaaatgtaaaaaataagatatagatcaaagtgttcgtgttaattaacaactgaatttttgtttctggtgttgtttcagaacccacacttaacataaatccaacaccactggctgtctttgcagagcgggaaaacgttcaagcgcgataacccgaataaaactcactcaaatataaaaaaattagtacattatatataaatatttacacaaaataatagtaccaccctccactcataacatcttaattatttaattattattattatttcctttatcaggccacgcggtattggagtaacattgtatatatatacatgcattaaagaaagaaagt

SEQ ID NO: 45801 - DNA, 964 bp, Cannabis sativa
tttttacaggtatcttgttctctacgctgagtgataattaagcatgtgtctttttttttttaattacactcaccaaaaggttatcctccaatgccatcaccaagtacatcttgattttaaaatagctgatacgaaaatccaagtatataatttccccaaaataaagaagacataaaaaattcctcccgaacccacctaatctaatcctccaaattgcagaaaaaaaaataaataaataaaagaaaagaagaagaataaggaactaagaagagacaacatatagtgtatgtgagatataaaggaaagagagaagaaagttttgcagagaaaagagtaattctgttattgattgattagaaaggaattacaagaggttatatatacacagtgaataacaatctaactgtcaagacaaacacaactcaacaatactaatagaattaactaactaaacccccttgacagcccccttcaaattcagtgtggcaagagaaataacaatgagtttggacctgaaatcaccgaacttgttgttgctgataagcttggtgaagaaatcagcaagttgggcagatgcagggacatgtttaacctgaattttctgttggagaactttgtctcgaacaaagtatagatcaatttcaatattctttgttcgagcatgcaaaacagggttggcagccaaccaaactgtgttttggctgtcacaccacacagatggagatgcaggtattcgaatttgaagttcttgcaatagtgattgaatccatacaacttcagttaatagcattggcaaggcttcaaaactcaacctctattgatgatcgagatatggtaacctgtttttggaatttccaagcgatgagattacctccaaagtacacagagtagcatgtagttgattttcgatcatctaagtccgatgcccaatcagcatcagagaacacatccaaggcaaagtcgt

SEQ ID NO: 45802 - DNA, 3068 bp, Cannabis sativa
tttagggcataaagcccaacaaagattccattgtaggaaatgttaggcttgaaattgctagtttgattaattcaatctggagtacgccatctttatttgtgaagaataagtatcgtttgtcaacgatagatgttatgttgaacaattttcaggaaggattatcttctctaggatcgatcttcgatctggttattaccagttgaagattcgaaagggagatattcctaaaatagtttttcgtactgatgagttcgtagttgtctcgattaatggtgttgtaacgtctttggaagcataagttttatgctaaataaaagaaatgtaagttttgctgacccaagtttgtagtgaaggttaaaggttttctggaactaacgagatgctacgaaatatttgtttggggttgtctatgcccttagtagaattaaatcgaaagaattgaaacagaggttaaccattataccaatgttaacatcgccagtcaatgagggaaaattgtgattcaatgtgacacctctaaacaaggactagattgtatttgatacagttcaggagagttattgtctgtatttataaacgattgaagaagtgtgagtaatagtatttcggttatgatattgaactggtagcagtgacttctgccttgggagtttggcgcttttacctgtttagcaaaaatacgaagtttatatgaatcataagagccttaaatattttatcgtttgaaaagatgtaattaagaggcagcgacaatggttagaactgattgaagattatagcagtgtgatttcctacctttttggtaagaaaattattagtggatgctttaaacgaaagacgcctaggacaagtttgtaaaacaaaagatcttgccaaactttgctaggaatgccatcagaacaggattgagtttatgacgggggaacttgttaatgttacattgcagtttaaactgttggaaagaaataaagtagcccaacaaggtgactccaaactttagaagttcaaggaaaggcttgaaattggattaacaaaggaccttttgaatttgtttgaaggaattttataatataaaaacaagcttggtgtattagtcatataaaggtactgaatagaaggttctaaatgagtttcatactacaccatactcattatactcgggactaaccaagatatataagatcagtacagtttctttgtcagagtggaatatgtttgtggaaaattagtgtgctaatctatttgtcaagggaatagttcaaccctgtggtgttctgaaagtaattatctcagattgagatttaaagtttacattcaaatgctgagtgagcttgtaacaagcaagtgtaataaattttgggagttcctgaaataagcatagtctgctaagttttcatataataacagttattagagtactattaatgtggtactgatgcagtttagagatttaagttcgtatattgcttatatagtggatgggagagctatgctgatccaaagtgtatagatattaaattctatgttggaaattttatctttcttcaggtggtctcaatgaaagggaaattcagaaattggtaagaaagggaagttaagtcccaagttaatcggtccgtaggagttcttggaaaggatatgttgggtagcttattagctagccatactccttgctttaactagagtttctaatatatacttcaatgcttcagaagtatgagatagaagcgatccatatacggagttacaagaatattaaatttcaaacacacttgtcatatgagaaagaatcggttcagatttttgaatagaaaagagaaagtattgcggaataatgactatatcgctaattatagtgctgtgaaagaacaacaagattgaaataagatttgggagttaaagtcgcagttgcgggagctgtgtcccgagttgtgtgaataaatttcgaggatgaaatttctataaggaggggatagttgtaatatctcggaaaataatatagtatttaattgaacatattttattaaatatgtaattattttggtaatggagtaagattatgatcttacttagagtaattagtgtgaatttattaaatgattaaataaagcataatttattaataacggagaatattttcgaatatgtggatatcatgaatactatttttgaattaaaatattttcaggcctggtgactgtggaaatttgacagtgtggtcagtaatgtcacgataatatggggatggattattttggaattattatggactagtttagaattctagaatatcacttttgtggattagttaaaattaccaaattacccctaggattttattttatgtttaaaggtgtgaaaagggcaaaatggtcattaaagtgtttgttattagtcttgtattattggataaatgctaaatataaggtttatttaataagaatatatatatatatgcatagttattagatgaataaaaggaaaattagaaaaatattacgaaacctctctcttcctttactttcttctacctgaagcctaaggagctgcactagggttgattttctttgcttgattcttcaatctgaatcattttggatggagtacaggcttggctaagtatggaggtaagttcttgatactttccctcttcaaattcttgagttataagatagtctaggttaggttttacaaggaattttagggctgtagtgtttcattgattttaaactgtgtttatataattgaattatggaatccttgtgcataggttatgcaattgttatggatgttggaattagagttggaactttggtttaagaacttgatttttggttctaacatggtgttttgtataaactaatgaaatatggtgaattgatgttttagatatgttatttggtgggattatactgttctggaaggtttcattaggtttggaggagttttggttcgattttggagcaaaaaccaagcttttcccatttctacagcagggaaaaccagttaaccggtttcacagcacctgtgaaaccgatcaaccagttttggtagcaggggaagaaaac

SEQ ID NO: 45803 - DNA, 1315 bp, Cannabis sativa
caataacaatattcttttctttaatataaacaactttttctcaaatttatgtgagccattcaatagaggagaaggccatggttggccacatgctctcactacaccactcccacttttatttttatttatttaaaaaatatatataataaattattttccaacatgcaaatcagtacaaaaagggcaaaaataaatacataaaaaaattgtggcagagggatttgatttcatcattttgtttttctgaagaaaaaaaaacaatatgcatgatgacactattagacccttttcttttaaacaagtaccattgctttttcttttttctttttcttttataacttttattttttggtataattttctacataattacaatagtactaataagtcatttagtcaccgaccttgtgtactattttagatatttgttttcttttttaactgcatttatttttctcttttctatgagagcaataaagaaaaaaaagattcacttaaaaaaaagaaaaaaaaaaagataaatacataaataaataaaagagagagagggagagggaacatgttcatgtgtgaaggtacattattattatttaagaggactagtctcaatcaatacatgttgttattatataaaatgtgataatttgttttttttttttgtttaatgctttgataattttaaacaaatacatcattttgatgagtacttatcatttttttgaaatattgaaaaccaaagatgatttgtttctttcaattttgttacatgtctttggaaaatcattgatgctttttatatggagttgaatttataaaaagtattcaattttagaaacgtgtttttttaattatgattccttaggagggtaggataaaataaattgttaattttttttgacacgataaatagagtcatgattaacaatgcagtcaattacaatcagcagtggacttcttcgacctaggatagtttatcatctaaccgaaaggtatgttttgccaaactatgagctgtaaaattcttatcgcgagtcatatagaacaaaactatcccaaaaatttagacaataaaattacaacgtattcaaatagaaccccacacattagaaaaatacattctcattattaatagttatcgtcaaagctagcaaaattgaaaaaatattgcaacaccaaactaaaaaatataattattttataaattagaggatgtattattttaattttttttttttttatcaagaaggaacaacttcattaatcacaaacaattacaaacaaagccaagcgaaaaacataatcaactgctaaagaa

SEQ ID NO: 45804 - DNA, 880 bp, Cannabis sativa
agttcaaaactcgaatggtacaggggctacagttgtaaacagcagtgccactttcaccccaaacttcactcaaccttttaatactctcaaccagcctttctctctgaaattagaccgaaacaattacaccttatggaaaactatggtgtcgaccatcatccgtggtcataggcttgatggattcatcaatggttccaggatctgtccaaccgagtacatttcaaccactaaagaggccactggtgcagatggaccacctgttgtcgaagtaaccatgaacccagattttgagcagtggatagtcagcgaccaacttctcatgggatggatctacagctccatgacagaatcagtagcaacagaagtcatgggctgtagcacctctgctgcactttggagagcccttgaaaacttgtttggagctcactcacgggcaaagatggatgaaaccagaactttgattcaaaccactcgaaaaggtaacactcctatgactgaatatctaaggcaaaagaaaatgtggtctgatagtttagccctagctggagatccatacccagaagctcacttaatttcgaatgtcacatctggtttggatgcaaggtatttagccattgttgttcaaatagaggctagatctaatatcacatggcaggaagtgcaggatatgttgcttagttttgacagcaagctctctagactctctatgacagaaggaaacaacaaagggggaaacaatggtactgcaacatcctcaatgaatcccactgcaaatcttgctgcagcaagtatgggaaacaaaccgtatactccaaatcgtagcaggggcaactacaacaatttttctaatgctcgaggaggttcatcctcaagcaacaac

SEQ ID NO: 45805 - DNA, 1819 bp, Cannabis sativa
  modified_base (1784)..(1785): a, c, t, g, unknown or other
tatgtaaacttgttttgtttcaatgtcaagtagggtataggctttcatgccatgaggataaccaataaaaatagatgccctactcctaggtgtaaatttatgtctttttgaagtaagagtggagccataggttagacacccgaaacttcgcaaatgatcatatttgggaggtgtaccatgtagaacttggtaggatgttaaacctttgaacaatttagagggtgttctattcatgagataggtagccgtttgaactaggtatgaccaataaaccaagggtaaattggattgaaacgctagtgctctggctatatttagaatatgttggtgttttcggtccacaactgaattttgttgtggtctttccacacaagagtggtaattaatgatgccttttgaggaaaaaaatgattgtaatttcaattcttttgcattgtcggagcgaattgctttaatggacaaggagaattgtgtacaaaccatattaaagaaattgggaatgatgctttgaacatcggatttgtttttaagcatgtaaatccaagtgaatcttgatttatcatcaacaatagtaaggaagtatttaaaaccttccacactagtgatgtgaaaagggccccaaatatccatatgaaccaaatcaaatatgttgttagagaaattgtgattggaaataaaaggcgaccttttttgcttggctaaatgacaaatatgacaatgtaattgggaattaatgtgtagagaattgttgtcttgattgaaaaaatttgaaagacacatggatggatgtccaaggcgattatgccattgagttacattggttttattgaaagaaaaaccagcagtaggaagggaaatggcagctgctgtagtgaagttgtcttgatgaagcaagtacaattttccacattgtttagctgtcccaatcaccatattcagagaaggatcctgaataatacaaggattttgttgaaacaagattgaattaggagattgaagcatgaaatcggatattgaaaaaagattaagttcacgccgtgggacatagagaacattctgcagtaaaagatgagggtttatttgcacagtcccaatattttcaacaggaatgttttgcccagttggtaaagaaacatatttggggaaaggtatgttagaaaatgatgaaaaacaattgatattgcaacacatgtggtgggttgcaccactatccacaatccaataagttgagagggaattgttacctgctaaattcgaggcagcaggggttgtagcagcaggatcagtggagatgttgttgctgagttgttggatcaacaaggaaatgagatgttgacattgagatgaaagatcagcttgaaccgagctgttatcaatgtcaatcttcgggttgtttgtggctgcaatgttggcttttgcttttcctttttcttgtttgcgtttgtccccataaccaggagggaatccgtgaaggaagtagcatttgtcaacgaggtggccgggttttccacaatttgagcaagagggcctaggtttcttggctcttggtggattggtggagcttgatgcaacaaccaaaggaattgattcagatgttcctagtgatctttgacgttcttcttgaacgatcatagcaaaaacacgggacaagttgggaattggttcgctaagcaagatttgagctcgaaccgaggcatagattcattcaaaccagtcaagaattgaagtacttggtttcggttgtagtaatccaagaaaattttcattgcaccacaagtgcaagnngttataggttgaaattctttcaactcatcccata

SEQ ID NO: 45806 - DNA, 4654 bp, Cannabis sativa
  modified_base (1486)..(1491): a, c, t, g, unknown or other
  modified_base (2078)..(2085): a, c, t, g, unknown or other
attatgtcttatttatgaattttcactaagcaaggacttaattgtgaagaaaagaggttttgagatttatttgttaattaagagacttttttaagtaaaaaaataaatggaaaaacatatatctatcgattaatgaacaacaaatgtaaaataactcaagcatttgttgttgacataagtagagaaggttaaataattcaagcttgcccctagatctatagattaatgaacaagttatgttgctaccacaacaattacggtgatgacactaatgagtgttatcagttacaggacgagatagaattcttgattcaacaaaagtatgttgccctccaacggtatgtgaggccagaagcgccaacagaaggcaatgctcttcttgcacctcataacgatgcaatgatcgtatacttagcatacacaattactagattcagagattacttgatcatgaatttaagaaatgctagaattgctaactaaggtttgcatgtttgatagctattctgaagtgattaggggtggatcatcctatggtcattaagataagaaagtttttgtgtcaacaaataattattttttaagaacatgactaaatctaaaaacaaagtagcaaagtaaaggaaatactatttgattcaaacccaaagtgttccatcatcttatactatataagatggtctcactccctatgttgtattgacacaactgaagaggataacaccactgatgttcctgaatagaaagtcacagtacctcatcgtagtgggagggtttcaaggaacacatcctgttatgacttggaagacactagtgatgacaatccattattagtttaaacaagcaatgggtcctaataaggaagactcgaagccaagagaactatggtttaaccactcacatggattaaccaaaagtttcaaatacaaggacaagaagggaaactctgctaattaaaatagctctattcaatggacttaagcaaacttcccgttcctagtattatgggtttgatgagatcatcaaaaccaatggcttgtggtatacctggtaatttacgtacccttgtgcaagaaacttactttagtaatatactagagcactatctaatgactaactctaaaggaaatcacttgatttctagacatagagtttacttatctaaggaacaattttaactattccagaatagataaatgtcaagaaaagagttccttaagcatcaatagtgagaggttttaacgcagattttcattaaccaaaaatagtaagcctttacgtaataaatatgtcacataaataataagaaataataaatgtatatataacaccagatatttttacatagttttgcagttaaatttgcatactccacgagtctatcttatttaagatattttttgaatacaagatacaattgataatatcttttttttctccctccaattcttcgtccccttatctgtggaatctgcccctatttatnnnnnnataggttggcaattatttacattcaattcaaaatataaccataaatgaaatgtgatcaattcccacatttcatttaaatcgtatgttggataatactagataatcgcttaactgcctgtcattcttatccttatagatgattaatgctgatttggacaatcgtatctcgcttatctctgagttgttatctttgtctattataatgtggaaaaatgctaagtgttagcagatgattcatctcattgagtttccttagaatagcggggtgtctgtctcattattcgtaacccaaggtcactttgcataactgtattcactcctttgaataaatgaattatcttcttgaggtcctgtacctcgaggcgagtgtgtgtctcatcaatataagttctaatagcctttttatctcgcttaagattatgtagtcagggagttatgaataagttccattaatcctttatcaacgagttattctttttctttgtatttaatgatataatttcattatatcaagtgatttatattccactgcaagatatgtgtcactctctaaagtgtagctaaattttgggtataacaattgcccnnnnnnnngttcttttttaataaaaagagctttttaaatgattacatgggtatttacgtcttaatcccagtttgaaaaattacatgctttgagttttgacggttcatgattttgaggcacatcattaggattaaattcccttcttttccaattctctctagttcttatccgttagatctttcttcttttaatcttacagtaatcagtcttaaagtataaaactcaagagaaaacacttatttgccatttttgccttttaaatcttcgaacccctctgaaaaaccatcatcatttttcattaccttgcatgccctctttgtccttgacctattttctccgtatttcctcagatttcatctttaatcttagaaattcttagagcccatcatcgcattcatcacgattccaatcgcgaagttattcgttgcctagaaatctttagaaacagagtaagtggtttatttcttactctctattattccctttttcctaagttgatacttttatttttgcttctgattgcatctttttttattgtgtttggtttaagtatttttggattttgcttttgggtaatttctagggctttgaggagtgaacttagatttattaaattcccaagtttctggtttaagttgaattaactccgtccaggaattgggattattattttattctttatcaatatgttccaatctggttttgagttttcaactctagatttcctagaaatcgaatgtcctaaagaattagcccttccattcaaacccaaaatccaaagacctaaatccaaacttgagattaataatgccaaaattagggataatctaataaaaaccaatcaagatgaaattgctagtcgctataggcaatttttacaagagataactgagggtaaacgttgttattttcaagacacagcttggcctgatcctcaaactttattttttattcctttagcgagacccttgtttttaccctgagtcactgttgctttttcatcaggtgaccttgattttgaaattatgtccaccaagcctcataaatcaaaggccccccaacatcctaatgtcactttcgaagttgagcttattaaatcaaaggtgagggccattggagaatatgttggtggcgtattaaagtcttgcgacatcaagcaaaggtgtggatgtcgcattagatctattgctcctggggaattcagctgcttcccactagaaagagtaatccacgaggagtgcagtggcaccagtactagtggcttgtctaggataggcgcttggagcctcgagcacattaaggctgaagcagttctccccttgagagagtactacaaagaattttgtaattatcttggaattgaccctttttcagttaattccaagttcttacaagattatagcaggtttaaaggttttgtaccatattttaggctgggagtgccccactcctcttgagatagtttatttttattctgtcaaagttgttcccgcgaggaagcggtgttcaaggggcttttattatctcagtacccacacaaatgatcgtaggatcattgtgaggttgccaaacaagacagagttcaaggatgacttcttctagactactggtctttctcttatcaacacaactgcattttgcattatacataagtaatttctgtctcaaaaacttggttttgagttctttttatattatgactttgaggtcgcttacttattacacttattatgttgacagtggttatcaaaagaccaaaccccatctttgagatggtcgagcgccataaaatcctgctgggtcttccattcagattgcgatcagcagatttccttttgaacgaggccaatctgaggtttgtcaacctccttagcttggacgagttcacttgtgactactaggttctaaagtactcttcgtgggagaaggtcctagtcccagccgatgtggaaagccaggattatgttgctcgcgtccattatctctggaaagtaacccctcaggaagctaaagaagaagaatctcgaggtaatcaatgtggatggtcacccaccgtacttaggactgcacgtacctcgttagtcacctttagggataggcaatataatttttatacatgggaaaaactttctatagatcgcataacccataggtttgatagttggtaccctcaattccatgtccagctagctgcactagctcatattacgggactggtaagcagtatggtagcaacttggatagagtgagctatccagattcaaattgggatttatctccaataaactcttatggtatgtacatgatcacagggtctagggagtttagtaattattatagttcttcctcgtcatcttctgataattatggtaacttcctttaagtgggagtttattccccattttctattatctgtttctgggtaagtatttgatgtatcacttttgccttacagatatggatctcgacttggaagacatgctcaatagcccccctctcgtcgataaaacatccaaaaaaatgtgttgcccaagcgaatgaagcctcaggttctaccaaagaacccaaaagaacaaa

SEQ ID NO: 45807 - DNA, 1937 bp, Cannabis sativa
  modified_base (123)..(128): a, c, t, g, unknown or other
agattttggacagctgtttgggtttataaaactaaaagtttcgagcagttttcgttcttagatttgaatagagattggagattgttgtgtaacgtggtttaatagtacatgaattgtttatgnnnnnntggtttggttttgtttcaaatgttttatatgtttgtgatataacacttgtaataatggtattcctccgccacaagtgaggctttctatatatttcgggggaggggtcagtctttgacaatggcctctttctctttttcaataaaaaaaaaaaaagatttacaattttttctgtggttcaccaacgcttaacactcatattcagtaagatatgactttaaataagccagaaattgtagaatagctactggaaagcaaagaccattgagtacctgtgccttctaaacagcatcacagctccgttcaaagagcttcctttaactggatcctccattccaatagaattgctaagtgaagatagtggtttcaaaactatgatatcagaatccagatataatccaccatatctgaaaagaaaaagacataaatacataattaatatccagctaaacaaggcgcaattgatgttgagtcacaagcgtttagtatattccatgtacacaatacatagctgtaactaacaaaaacacatttatacatcaattaactggaccagattcaaagcgacgcttcatttgagacacactacaaagaaacagaggagttcagctttacgtgtgaaaactaaccaaacctcgttttttaaaatacacaagttttcatccagaaattcgaagcaaaagaaaagaaaaaaaaaaatcagtgaataaatggtttcctcagaaaataaggtctccaaattatggttgcatcaccaaatcatatcaagaagctaatgtataataaactgcacagacaaatctggcttcaagagtcatgatataccatgtatagctcaatagaatttgaaaaccgaatttaaaagttaggttagaccatactgtagaaggtgaagttaataaagtagtagataaaaagaaagagtgagtttggtagtataagggttttgtggaggctttattgtacacatttcaatctatcgtcgccaatatgcaaaccttaagaagttaatcaaggatcattagattagttttcttaaacttcttgagccaatgattagttttgctaaagaaaagatccgcaggatatcgaagcttgcaaatgttaaaaaagggtggtctacgatcagaaaatgcctttattgttaaagagaattggctgtagagagagcacctatctctcataagagaagaagaggtaccacttaaaagtatattttcaactatagttgggagactttcccgaagaatgggtaaaagaaatggaaagatgaaaacatgggaatagatttgataccgctatttcaattgctgtgctattaaataactgtacaacactacaacagattgtcgctctttagcattgagtagtacttaagtagctaagtttccaaaggtgaacagccagccctctgtcctttatagtcataaagggcttctcagaaaacgaaatttgaaaggtcgactcgaccactatatcataggccttctggtgggaggccgatgactacacgaactctataccaggtcatgagcaatagcaaagccaagccaccaatctattttctttctttctagcagcaggaattgtgttctgccaaccttctccatggaagctatagcagcagacaacagtaatatctacgacagagtgtctagaggcatgtcttttaccgtatgttatgcactcatgaatggttttttttttcctgaaaaggagaaagggacctcttgtcttaagacaggaccctccctgttatgtattaagaatcctaacttgtggtggcagaggaaagccttggttacaaaaat

SEQ ID NO: 45808 - DNA, 2156 bp, Cannabis sativa
agagagagagagagagaggtagctgttcatgctagcgctgctctcacgcaccattccatgtcgttaagtgcataggattgggtccaccgacctgaggcccttacctagctaaaaatatatatatttaaaattaattaatacatatttataatttttcaatattattttgaaaattacttaattaaatataattgaagggatgaaaaagaattctatgtgagaattaataaataataaaaatatattatatggttgtgtatatgtgttaatgtaactgcatgacaccaaatcacaaaacaaagagcaaatatatatgaatttttgtgctatttcactcaaaaacaaataagaaaaaaaaaaaaaaaacaaaaaaggcacacacacagagagaatagagagaaagaaagaagctgagtactaccaccactatagcagcaccagctgatgattttcaaagctagttctctttctgtctatggagttattattattattattattattatgccctataatatttacacctccttctttggttgatgttgttctagctcatcatcatcatcatcaattttgcttttgaaatctcttctcatctttaggttatcatcttcatcttcttcttattatattattattataatataaatttatatataatcttaggatattgaggttctgccggcttttggggtttatatagctctatagctataccttttttcattcaccttttatatatatttttgtgttttgagataaaatttttagaaatgaaagactgaaaaaaaaacttgcatgtgggattgtgcagcaacaaacagcttgtttctagaaattcagtttttttttttatatataatataatttgcttttgggagctaaaagtaaagtgattcgaaagaaaaaggagagaaaatcctaagaaacccagaaagtaaagaagagatatatatatatatatatattatggcggctgcttcttcatcttcgataccaggttttggaatcaatagcaacagagaagaagacccaaataataatcagatgatgatgaaacaacattcttcatcaactccaactaattcatcttctctacctctacaacaacctaatccacctcctcctattccagctcagaagaaaaaaagaaatcaaccaggaacaccaagcaagtattcctaaacccattttgaaattaatcgaagatctatatattaactcaattttgaaatacaaaaacccattaattaatttcccctcttttaatttatttgtttttgttacagatccagatgcggaagtgatagcgttatctccaaagactctaatggcaacaaacagattcatatgtgaggtatgcaacaaagggtttcaaagggaacaaaatcttcagttacacagaagaggacacaatcttccatggaaacttaagcagaaaacaaacaaagaaccgaaacgcaaagtctatctctgtccagaacccacttgcgttcatcacgacccatctcgtgccttgggagacctcaccggaatcaaaaaacactattctagaaaacacggtgagaagaaatggaagtgtgaaaagtgttcaaaacgctatgctgttcagtctgattggaaagcccattctaagacttgtggtactagagagtacagatgtgactgtggcactcttttctccaggtaattatttaattaatcaatttataatcaccccattatcattatcattattattatgttaattgaagaatttttagttttgtttcagtactacacagtagcagtagcagtagtaagcatattagtgttagagtagtactacaaaaagagtttttatagctttttaatggggatgatttctcttttgctttactactactacttctcagtctcatatcatatatctcttgtttttcttctctataatctttctcttctctctattttgttttctttctctcttttttttttgggtgtgtgtacggtttgagaaggaaatatgcagaaaacatgctcccacgtgaataatctctggaaactgccatggtcgtatatagagagagagaggtttcagaaattaaaataaataataaaaatttattcaaaaacaattcctaattttgtattttcctcgggaacaacgccttctt

SEQ ID NO: 45809 - DNA, 1838 bp, Cannabis sativa
gcttgtacttgttttcttgtggtgtttagttgtcattttataaccgtgtcatgattttctgtattacagaaatgccagaggccaaaatgttgaaattaatagtggaatccatcagccagactttgtcttaggttgtcagaagtaaagggaaagggcaaggccaagactagggaaaatagggttggtaagtcgaggcttccaagccctccctcatatatcaagcatcactgaacttaaatctgttttggtactttaaattaactattttatgcaaattattagatttttctacattaataaagtggctttctcacgaaaggttaggcttccgtgttccaggcattgctttattttttgtatttaaacgtaatatcaattcccacatgcaccaaggtctgttaacttaaactctttaagaaaaaaggttcaatatgcaatgaaattcagacgatgtttttgagaagaaatttttttgaaagagcatcaaaatttaggcgatattttcattgtttaaatctccaaagctgacttcgtgcacaaataaatttgcctttttcagaatgtggtacgaaagtagctggaaacattaaagattccaaataaagatttctactcttaccttctccagaggactgcaaaaacttatttcatacatggtaagagaatggctgaaaaatgttaaagatttaaggcaaggttttctactacaaagattccataaatttttaccaagaaactaaaaaatttaagtaaacataattaaaatgataaaagggcatttgtacatttttgagggcacagacctagatatactacccccaagtgagctaggaattttggacttctacgaattccttgtcacttttttaaaatgcagcttaaagcttgaagcaaaaatgtattctttttgtaaattacttctatttttattttatttttcccataggtgtgtattaggaagagaaattataagaaatgcaattcaataaaaagaaaatgtttcaatctaatcaccctcagttcattgataatattgatgtaggtgatttgcattccaagcgtctagattttctgatccatccattcgtttttagttggtaggttccgttacccacttagtgttggattttgtaaggtccttcccaattttgctctaagacccccactccttgttcttgtgaagctgggaacactcttcttaagatgatctctctaacctcaaatgttcgactcttaactttggaattaaaatgcttaacaattttcccttggtacattgtgagttggacttatgactgttctaggagctctatgatcaaatctaatgattcttaaagcagagtatgatttcgggttgagtcataagtacctcgtctataggaagggatgatacttactactgggatgactgcctcacattcgtaagtcatagagtatgtcgtgtgtttggttaatgtttattttgttgttctatatacccaaatgaatcgtgaaagctcctctggccaatgagctttataagctcgaagtttcttcttcaatgtgatttttaggattttgtttacgacttcctcttgaccgttatcctatgctcttaccacggttgagaagcttttatgattacatgttggacacaaaaatctgtgaaatgtacactatcaaactgcttcccgttatcagatatattttgtgtggaagcccaaaatagcacacaatgttcttgaggataaagtccaaggccttcttggaggtgattgtgttcatgggttcaacttttaaccatttggtgaagtagttaacaaccactataccgcatttcactcctcctttactacttg

SEQ ID NO: 45810 - DNA, 1291 bp, Cannabis sativa
ataaatttgatggttcagatgattaagaatttggagaaggaagatcaaatcatttgctagcacaacacaagttactaagggtgctcgaagaaactattgaatggccagagaacacaaccatgattgaacaagaagaataactaaaaactgcaattgaaatcatcatcttcaatctgggtgatgcaacactcaatagtccaactattcttgcaaaaagaggagaaggctagaaaattcttccacagatggttcttccaataagcccaatgttcataaaaaaaaaagaagactgttgctaaataacttctactcctcttcctcccccacccaatgtcaagacagtgcctgtcatcgagatccattcttccccaaagaaggttgttgaggatttaatttaggacaaaggaaaacacatggttcaagatccacgcaaagttgctttcaatcctgagtacctcgaggtgcagcttcctgatcccatccttccccttccccactaggcacgagtttcgggggtaaaggcttgctctagtttcagtacatgggcaagtcgttacttccgtaactttgtgaaggacgactgggagctcatttattatggctcgtctttagatcttctcaattgaagtgaagatctgatatttatatcttgaagacagtttctatgctgaggtattattctaaagtgctccttgcattcttctctaacattattagatctgaatgaatatatttatgcgagacactatcaacctatgtcatttgttattattccagggtgaatcaccatttgtgtatatctcttagtttttcaacatactcacgagtatatgggtcaaagagttacaagctcttaaagaactcattatctatcctttccagttaactattgtattattatttactttgtgtatctcgagatggactttttatattagttgttcatctcgttagtcttataaaatagtagttgttattcatgactcacccttatatgtttaaggagagacttaaatgtgtctaccatttgtatttttcgaggtgagttattgagcatatttatttatttataatctgagctggttcattttttagctttcttacacgtgttgtgaccatattggtgctcaaaatatgggtataacagtttgtgtgtgtgcgagtgcatgtgagtgcgagtgttttatgtctttttcgtgtgtgtgtgatttgtgagatcgtatttatgcctggaaacctaggcttttctcttaaagaagaagaagtgtcgagacttgtgtctcgatctaag

SEQ ID NO: 45811 - DNA, 1409 bp, Cannabis sativa
taaaaaatattaaaataaatatagtattattattaaaaaaaaataaaagaataatgttagataaaatatgtacctttggatgatttttgcattgaagcaggaatgctatagatgagattattatatgaatctctaagaaagtcttcaacatattttttatccatgtgtgtagactcagatgatgagtttgggttaggaggtgtattcatgagattattataagaatctctaagaaattcttcaatagacattggtggttcatcaataattgatgatgaagaagtttcaacaagatcactattttcatatattggatataattcatgactagaagaatagtcatcaaaactccttttcttcctattggatttcttcatcataacatgttctgatttcggttctgattctggttctggcttttgttccaactgttctagcattacctatttaaatttaactctatcaataaattaacgttttgtataactatattaataaatcaagttatatatcttactgtagatggatcagattggattggatcagattttctcgggagatatccataagaatggaaactataaacctcgaccaatgatcgacacctttgacccgatgctttatgatagtaatactgcaatatagtcacaccatgcgaataattaagtaaaatataattaattaatgctaatttaattatcataataatatatatacacatacataatcatgtctaatgccatctttgcgaggtctagcttcaataatccaatcttggagccaattgatttctttttcaagtttagcaacctttgcagaatgttgcatattctttttcttcctcatcacataaggtcttggtgctctccatcgcttcatcatcattattatcatacataaatacatgtattaaagaacaatattaaaaaaattatttaaataaaaatactattattacaaagaaaattatataccttgccctttcgaagggcagttgggatcggaggaggaggcgccattgccactggtagttgataagatagcgggaatgcttcaatcgcatagttttcagagtactagttttaatttgtacattaaaaagaaaaaaattatcattagtaactacatcttttgaatagttgttttggtttatttttttggaaatatattaagtttaattttttattttataattgtatatgttacaattatttaagagtttcgtaaatttttagaatagaattaaaaataagattcaaacagttgattaccatatgtatgagaaaaaatagttacaagtgcaacaaattaaatatttgaaccttatttttggtactgtaattgtttaaaaattttaaaaaatttaaaggaagctagtcttaattaactataatatacataattatgaa

SEQ ID NO: 45812 - DNA, 1257 bp, Cannabis sativa
tatgtaatttggttaaaagataggagaattctatttacattaaacttaaaataattttttaaaatcactttgaatattttttaaaattttttttctcatattattttgtatgaattttattacctttttttaaaattttattttagatatatttttttaagttatttacaattttttttctaataaatttttttgttataatatgtaaaatataatttatgtttgtttgataagtatttttaaagaatgagaattgttcgttgttaagtttttgtttcttgtttagagagtgtttatgaaggtgttgtgatttcttttcattcttttttagaggatgtctccgagtggggttgctgttagatcttttaggtttttgttatctgtcttttcagtgtatgtcttcaacatgttatatgaaatggtaatattgtagcatggtgtttatgatatgcactacagatagaaaacaaggtttatgggttggaagaaattcctccttgtttaataaccgatgtattgtttgactctcagtaataaaattagttattatatttaaaaagaaaagaatgagaaaagaaaattatgaaataaaaatgattaaaaggagatgcaaataaaactggaaaggatatctatatctgtatctattctatatctatacacgtaataagtacacataatgtcttacaaatttgtcaatattgtgcagaagaaaatctggcgagacaatgacttggacacctaatctttcctttttcatctaatctttcctttttttctttcttcccttttttaatataaatttgtacatacttttattgcaccgtccactatttttgtagcatctattgtcttttccactctatacatctttgtattctatgtgttgtaatggtttaatggaccaatcacaatttactttgcgtactcaaataccattcattcaatccaaattttcttatttggtatccaactactcatggattgatggtaattcgtgctttatattttgttgttaaatttaaatttgatccataatatcatcctaataagattatataaagaataaagtttaatttttgtcaacttattaatctattatatatttacaatcattttaccatacatttataatttttgatctattttaactaaatatagtttttttaacaattgtagtgtttggttgggaggaatgaaaatataagaatgagaatgagaataaaaattagaatatgaatagaataaaatttaaaa

SEQ ID NO: 45813 - DNA, 1455 bp, Cannabis sativa
aaagggattggcaaatcaacgttagtattagaacttttgccaacacaaaatgaaaagcgctggcaaaaatgactttttccagtgcgttaatgcgctagtaaaagttagattttagccactgcaaatgtgtgtgggtaaaactttgactttttgccagcgcagtttgtaaaatgtgctggtaaaagttacttttaccagcgcagtagcgaactgtgctagtaaaaatgatatttcttgtagtgacattttgttgtgactaaaaattacatttagtaacaaaaaaacttatggttgtgactaaaaagttgtcactaaaaataacagtttttttatagtgattgattcttatgactattctttattgattcattcatgacaaaagttgatatggagatactttatgatcttaattgagattgtgtattttgcctttagagaatacttaatttgtcttttttttctgacaaataatagaaaatttatttgcggtattacatcttcgttaatgaatatttttcttttttttttttaaaaaaaaaacaatgaaataaaataaacaataatttatattaattttttaaaaataaatgaaaacaattagtcaatcggtttaggtacataatcttaatttaatacaattcactataagaaatgacacttttaccagcatagtttgctactgtgttggaagtaacttttaccagggcatttcgcaaactgcgttgacaaaaaggtcaaagttttaccagcgcacgtagtggttaaaatctaacttttaccagcacatttacgcgctaggaaaagttatttttgccagcgcttctcattttgtgctagaaaaagttctaatactaacgttgatttgtcaacctttttgccaacacatcataagtaaattttattttaccaatgcaatgcaaacttttaccagcacaaaaatatgcgggcaaaaatgacatttcttgtagtgatccaaatcgttagaattatttattatttggacatataaatatatatatttatctatatatatctatatattcagggctagccctgaggtgagacgaaggaggcagctgctttaggcccccgccgatcaggcctccattttgaaaaaaaaaaaattataatatggtgatgaatggttagacatgaaataatttcatttgggaattggagttggatttgttgaagtttgtgtcaacatcatgacatcttggagactttatgtgaggatttcaatcaaaatggagaaattcaagagaatgttttcctcaaatacttaattatcaggtactaatgaattatatatatcattacgtttttaaatcagctaattattagatgaaagtgtttttaatcatctgatcattacgtacatatggagttgtggagctatatatggtagtttgcatgaagtttcaagagtttagagttcaagtgctgaagcaaatt

SEQ ID NO: 45814 - DNA, 1302 bp, Cannabis sativa
ccttttaggttcttgattacaatcgctgaatcactctccaccaaaacaaaaggataatgcaaagaaaccgccgtctccatagctaaaagacaggccgcgacttctccagcaagtgagtcagagaagtgtagcctttttgctgccacccacaaaactgatccgttatggtttcttgcaatcgcaacaacatacatagttttacctccgactttaacatcacagttgattttaacccaatcttctggcagcagagaccaaccctgtaagattgatcaatcatacataatagtatacggtaatattaaattggtgagagatatttataaaggttacttttcctcacattttaattattagacattatgtgttcaatatcaatgatattcttaattattttcaattgagtttttataatgtgattttttttttttttaaaaaagccaatttaattaagctcaaccccagtacccaaagcgttccaaattaaaccttattttatttattaattaagtagaaaagcatatagattattattatttttttaaaatagtttcaattaagttgggagaatttaattagttacctagggtcctttggcaaccttattagatgttagaagattctaaattgatcttgatatcgatagattctgatatgatatatatatatatatgttgtgttttttttttttcatatttaagaagtaaaattaataaaggatcatagaaacttacaaaaatattaacatttaggttaatttttacaaaaatattgtcacacgaaaatgttttcaaaaatattgtgtttttatataaaacaccattaaaacacaaaatagaacaactcaaaaaaacagtagaacaactaaaaaatatcagtagaacaccagtaaaaacttataaaacttgagcagtataaaatttataaaaaatacagtataaatgtaaaaatatcgcccgatgacaatatttttgtaaaaaataacaaaaggtagtatattattgtaaattttgttgagaaagaaaaactatatagtgattataatattcaatagtgataggcacataggtaattataatatttttacttaattttttaatcatattatatgtactttgcagttagtactatccaacaattttttttttaaaaaaatcattagtaatttattatatcaaaaacaaagttaaagtgataggcgtttggttgggaggaatgaaaatataggaataggaatggaaatgggaatgggaataggaatggaatagaataaaatttaaaatggataaaaaaaattgataa

SEQ ID NO: 45815 - DNA, 2863 bp, Cannabis sativa
atttccacttcttctagttcttttaccagtccctacatttgtatttgattccccaagtcagagatccatgtcctcgtcccccccttgggcaacttcatattgggcaatactttttcccttgcccgaaccctggttggaggtactttcctttatgacctcagttagagggaggttataagattcccgtgcaattatttggcttcctctgagacacgccactttgttgggaacttgatgcacaagtggaacactgatgtaccagctttcaagtcatatagggtaagtttgcctaacatgacattaaaagttgatggaacatcaattttcaagaattgtgccatcacagttatgctcctcgaagcatgcccaacagtgaggggtagatgggtttatcctagaggtgcaacgctttggctagagaaaccatatacgagtttggtacaagggatcaaatcattaagttggagtcccatctactcataagttattttaaataggatgttcgaggaagctccatcaagggatctttgtgtggaaaatggacgtggctggcatctgcttcagtgaaggttattgttggttcccctacgcatggtatttttggttttctttcctgcacgaccaacattgtttcatttcgttcatactgtaaggttccatacttttctaagctttgcccgaatctccagcaagatgtggacccccaataatgacctgtaaatgcctgtccattggtggaggcatcaactagttctgattattgtctgctttggtggccctctaaatctggttggccatgacatatttctgtaagtgtgggttattccttctgatcaaaaactcaattttccacttcaaattattacattcatacgtgtcgtcgccgtagtctccatgaaaacgacaaaacttggatgtatctcttttacttacatctttcttcatgggagaaggtttcttgtatgggaccatagacttcgttgtcctgtagattaaatctatgtcatctgttaggactgagaaggcagtaaattttgaggcatttttgctaggttgctatttggcatatccagtgaattcgctgttcttcccattaccctgcctattgccgttgttagacctgttcccatttgagtttgagctgcttgggtattgtggattctcaacggaggctcctattgatgtggcatgttgttggcttttcttttgtccgacaatatccacgcggcgaacaactttttcgagcttaatgaatccatatgcttgatctaaaaattcagcacttgactccacagtcagcctcttgatatccttctacagttctccaagtggctcaatgccccccaatatatcggccaaccttccttcttcggtcaaccccttaactttggtgtcctaagtcatatatatacttatataggctctaaggggttctcctggcatctgctttactttgaacaagtctacttgatgcgaggaaagttgacgggaggaagaaaactatgtgtggaattacaaggagaaggcattccatgagttaaacctccttcgatgcagcttgaagtaccactactcggcggcctcttctagtgtggtaggaaatattatgcattggacataaccttttaccccttgcacatccatttgcatctcaaaatacttctgatgtgataagggatcctctttccttgtatacattttctaagttggcattttgaattttgggggtagttcgaggacttttatctccggggagaagggtaatctacgtgctcggtcaagttcgagatcagtgagttttgggctggttagtccttgtaacatgtttttaagttgatccaattgtgctttcacaaatggatgaaattgtttggcttgttgatcggcctgtgtcacattacgatctctttgaactggatcctgaatacagatacttggctggacagttggtgtaacgtattgttcgtctagaccccttcttcggtttaaatcagtcctgatgtcatgtgcggcactcaacctatcaaatactgaagtaccaggtggtcttggcgtctgacttgtttggtcggcaggttggccaaaaattttagttggggtgaagttgttacgtctaactccaaccaagtgagaatcaggcaggatctggtaatctactgtttggcccataggttaaacctgtggccgtggattggacggctgaccgttgtgactttctgcattatccctagctgcatacccttctgaaacgcccaaggggatactagacgcaggttgttgattggtgacttggtaggaccttcttaacagtatagtgtcctgccttgtgcgatcatcaatggctgcttgctaagccctcagagtttccatctctctatccctccattttataaactgatgtcttttctcatcgaacgcaaggtttatagttgcacggagatcctccttgtcatggtgaaaagcgttattatgaccttgcatgagtgcaagggctgctcggaggttttggattttagcatcatctccgacaggcctctgaacattggtcgttgatgggacctcagtgttgggagtggatttgttagctgccgaactagtgttccctgtctcttgcacgcctggtgtgatcctagccagatggcccacaattggaggttgtgatctgacctgctcggggtttgaccctggtggtcctctcgtgtttctaggggtctgcacgttaggatctatcactgtcgggtcgccgtaatcaataaggcctctatgagtttgtaccaccatcatgtatgcctattgttgtggtattttgcaacacgcaagtttacgtatcgtttgaacaagtattactcacaaagagtgaggt

SEQ ID NO: 45816 - DNA, 1867 bp, Cannabis sativa
aagataaaatagaaggaaaaaaaaaatagagaaattgatagattttttttttttttttttgacgaggtaactccaacgaaagaagttacagaactggaacagaaccattccagcatttctccttgtctagccctaaagccttccttgccaagcagtgagcattccgattaaaacttcgagcaatgtatctaatggaagctgtagggaagtaagacaaagagagtctaatgtcctgaataacatcagagagagcagagaggtctgacttttcacttcgaattttctccactaaaactttcgaatctgtctctataaccgccagcgggattttaatgttgtaacaccagaggagacttgatcgaagagataaggcttcagccattaaagggttgacattgccaggaactggagtagaaaggcctgctaccattctgtttttccaatccctgataactgctccaaagcctagcttgcccgattgcacatcctttgctgcatcagtattgagtcgatagaagccttgggaaagtctgctactaccatattggtgtggagaagagggctgctggactaaagcagattgtttctttaattgagcatcctgaaaatctgtgataaaagcactagcccaagaaacaacatcattaggaagcataaaaaaatcagcaaataatttcctgttcctattatgccaaattgcgcagaggagtcccaagagatgcataaggtcctctttggatagttcagtaaaagcagtaatcataaaccatttgatatcttggtgacggttggaaagaaaaaaggatctgaaaggtgataatttccaagttttagcagcactggaacaatctagcagggcgtgacttacagtttcagtagaacagttgcagctagagcaactcggagtaggaagtgttttcttcaaaaagaggttgagagagacagggagtatatggtggtacaccctccatataaacgttttaactttaggcgggatgttcaaagaccaaagagtagtccaccatttctttgagagggaggagttcgaagatgaaggagggagggagcctgcattagtaatgtgatatgcagatttgacagagagaacacccgagggatggttgttccagattaaaaagtcctccttgtcacagccaccgatgggaacatgcaaaattgaagagacagtaggagggtcaaaatatgtgttgagggcttcacgattccagtatccctcagggtgaaggaagaaactgactttatcagatgggggggagcaaccagctttatactgaagtttcctcacctcaggcacccagtagtcctcaacagtacgaatagtttccccattacccactttccagagtaaacccttcttaaggagatcccttccccaaagaacactacgccaggtaaaggagggggagtgaccatgatcagcatcaaggaaggtactatgattaaagtacttagctttcagtacagcaaaaagtaaggagttaggattagaataaatgtgccaggcttgcttagcaagcatggcttgattatgatgaacaagagacctaaaacccaacccaccaaagaacttggatacacaaagatgattccatgacttccaatgaattttagaaccttttcccatagagccccaccaaaattgggccattaatttctcaatttttttttttttttgtggttgatttagttaaattgtatagaaatttttattctttcatttttagtagttaatttttttttattattatttatttgtttattttaaaaatagtatatggggtaattcccttttattttattgctcgatgagaaacttttattaatttattgaatttttgggttctga

SEQ ID NO: 45817 - DNA, 1860 bp, Cannabis sativa
acttttagctacgaaccttttagtcacaacataagaatgatgatttataattaatcataattttttttttacttttagtcacaaattttattgtaattaaaattaaaaatttttgtaatgattgtgaataatcttaactcattataaaagataaatatatttcaaaatgatgaaaaattctcataataaaaaagaataaaattaaacttataacatgtataaaaaattattaaacttctaataacaaaaaaataaaataaaataaaaaataaaactaatgattgtagttaggcatagcctaaaagtacactagtactctacctctaattcacactaacaagatcccaaatttaaattttcctctatcaaaaaaaaaaaaaaaactacaaattaattttagacttgcatatagtttgaatattcttatcatcaattttaaacgaaatatcacaatagctagaagccgtagcatgtctcttgacaatattaaacaagttcactttcccatgcaaaatagctattgatgtcaaattcaatcttccatctataaaatcaagcaaaaaatttggatttgatataacttttccaatcataaaatctgttgaagaagttatattcaattttccatgtgcagggacaatattttgccctattggaatttcagcaacaacgtctccacgatagttaacgtaggctgtcgagttcttgaacttgaagcttccgtagttttctttattatcgattgttacaatcatatctaaatttattgtcatgttgggagtgaaagaataatcaattttttcaagaccggtaggattagccatgatttgaggctcttttggtttgaagactgtgaagcacaagataacaaataaagttactatgattgtgaaaagtaacgttgttccgccacaacagaataaaaaactcttacgatggcgagtatgaaaacttgaagaagtagtactaattggtaaagattccataattatgattacgaaaaagatgaatgttgaaatattttttcgaaattaaaagatgaagaaataaaattatgatttgatatgttaccgaaagtgagattagatatgaattttggaagaataaaattgatttatacgttatttatatagtatacgtgagagcactaattattgtaggattaggattattgaagtttcgtaattaataatataatcatatcaatttttatctttattttcagcatcatatcaaataatacaaaattcgagtccatttaaattaaaagatctttttctataatattgatttcacaaaatgagacagaattcaaattttaaaataaaaatatcaaattaattgatttgcttataaattttatcatataatatataaaaatttacatttaagtctttatttgaataaagaaattatattgtgatataataatgggaaagttacacagactaccgattttttttctttttcttatttttatactgtcaggcggtataatttacatttatactgtatagtattttaacttttatactgttgagcttgaagatgtatttttttgtcacttcaagatatattttttcttaaaaaaaaataataaagattgatgaaaaaattagttgtcacgacagtcaatgacatatatattttaaaaaagttaattataaaattttttattgtattgaaaaagttttgatgtgatgtgttgttacttttgtatatttttttaaaaaatttaatcatgaaaagcttaattcctacacgttatctttttttttttttttttgtaaggtttaatagctttcattatttatcttcttcttcatttattttctttttttttttttcattgtatttggg

SEQ ID NO: 45818 - DNA, 1163 bp, Cannabis sativa
ttttagggtttgagtgtttcaatgatgaaatttaatttgggttttttaattataattattattgactgaaattgattataaatgaatgattctccattattttacaatgtggttacatattttaatttctgattaagtcgaaaattaggagatttaatgatttttttttgttttaaattttcggattaaatcaatttgatcaacggttgttttgggtgtttttccttgaattgaatccataagtagattagattttcaaaaataatctaaacccttcctatttccgatgattgggcgttgttattttggcttgaaaagcttcagatgcgttgggcgcaaaccaggtcatgcgacccacattcagacacggttcaatgttgaagatgaagtccaaccgcaaagcccactctcacaggagccgcatggggtcgcatagggccactctcgtcgtcattttttgacgtttctctttttttagcgtgcttagaattttatttctgatttttttatgatttttaattaatttttttgcctttgtttaataattattattaattaaatgataattatgcagttcaaaaaattattaaaaataatttgtgatgattttttaaaatatataaatcatagaaaattttttaggtttctttccattccatatgacatagtcactctcttattttgatttatcttgactatgtagtctccactaatattcttatattcacatctttccattatttgttgttctaaaattgtaaaacttgattgtttgatacaaaaataatgtgttatggtagacactttattttttattatcaatatatcacaagcaattaatatatctcttttggaaatttagttgaaaattattaaatttttaatgattattcttcaccaaatttcatatgttgtagaaaatatttcttttggttgactatatgtataattacttgcccaaaggtagtacttaaatatattagttcaaattccatgaagtgagtaaatattaaatgtgtatattttaattatttacccaaatgtaataatttaaatatatatatatttattattatttttggtttgaattaatatatattttctaagaaatttatttgcccaaaggtaataaattcttaattgatatgtatttttctttattg

SEQ ID NO: 45819 - DNA, 1702 bp, Cannabis sativa
cgacaagcatggtcgaaaatatgtgacataagccggagagagtttgataaagtctaccaacgtcttggagtgaacttagaagaaaaggtagttagtttaaaggctcaactttccgctacttgaagatgaagtttttagattttctcatcattggttttgtttttattacagggagaaagcttttacaatccatatattccaagagttataaaggaattgagcgaactaggattagttgaggaaagtgacggtgctcgtgtgatctttattaaaggggttaagattcccctcattgtggtgaagagtgatggtggtttcaactatgcttcaactgatctcgcagctctttggttagttgtttaagattcccctcattcactttctttcacttaatccaagtatctattgtgcactctcttttacattcttatttgattgcttgacatgtgaaatttctataggtgattgcccaagtaaatagagtactttgtgttttcgtagtcttttttgttattgcatgttttttttaatcttgttcttagtggatcatagtcgggattagttatacggattctttttgtaagggtagcttggaattagagaagagtagactcttgcgaagagatcaatccaatcctctcgaaagattggaataggagagatagagcctcttgatagctcgatttgttatactttgtgtcatgatttggtgtgcttgacattgatttgagtacttagtgtttttgtagtcttttttgttatttcatgttttttgaatcttgttcttagtggacatagttgggattagttatacgaattctttttgtatgggtagcttggaattagaaaagagtagactcttgcggagagaccagttcaatcctctcgaaagattggaatagtagagagacagagcctctcgaaagaattcttcgagggatttcactatttgtgtcttgattttgtgtgtttgacatcgatttcttgcaatggataggtatcgactcaatgaagaggaagcagagtgggtaatatatgtcactgatgttggtcagcagcagcactttgatatgttattcaaggtatgtgttgtatcaaaatttttaccattttgtatcaaaatcaagattgacagtcttaaatgaagttgtttttttttctttttcgttccaggctgccaaacgtgcaggttggcttgctgctgatgatagcaaatatccgaaaaccagtcatgttggtttcggtttggtacttggacaagatgggaaaagattcagaactcggagctcagaggttgttcggttagttgatttgcttgatgaagccaaaagccgcagtaaaacagctcttatcgagcgtggcaaggccaaagagtggagtgaagaggagcttgaaaaaacagctgaggcagttggttatggtgcagtcaagtaagtgtgatcaatcaagtacttgaattgaatgaacatgttgtttatggtgatgtgattaatctaaattaatctctttcatttaataattatgtgtggcagggatgctgatctgaagaataacagactaaccaattatacatttgattttgatcagatgttaagtgataaggtttgtgttgcttgtgatctcttctatgttgtagttgaagaaagaaaagaattactctttagtatatgcggcgaaaccccctttaacatttgtaattatt

SEQ ID NO: 45820 - DNA, 1274 bp, Cannabis sativa
  modified_base (1235)..(1236): a, c, t, g, unknown or other
ctggcaggtgacttgataggctcttcaaatcagtacggttgcttgtttggaacagttgttaatcgctgcctgttgggccctcatgacttccacctcttgatccctccactcttcgaactgacgtctttgctcatcaaaagcgagatttatagctgctcagatatcttgctagtcttagtgaagagtgttattgtggccttgtattagccccgatgcagctcgcaaattctacagttcggtgtcatccccaactaatctttggaaatttgtagtggacgagattctagtaccatgagtagtttgttcaatcgcgatactgacagttctagtttcttgcgctcctggagtgaacccaagtagaggggttgttactccttgacctacatttatgtaactattggtggctaaggattaatcagggtagggtttgtcctggttggatctcctgggttcacaggtgtctgcacactcggatccatcaccattggattggttatttcagtctgatttcccctcctaagttgcacaaccattatgtgtcctgaaaaagatttaagacaaaaacttgtgtgtctttgctctttatgaaatcactaaaatattgaccttacttttagccaataatagtgagtcaaataaagcgattgcgactaattatatagcagaaaataaataaaataaagtaaagaaaacagtagattttattgaggttcagctccttatagttggcaatagcctactctttttttgttgtattgacttgtgagatgatgaataaggatgatttattctctctcgaaagcacttacaatgatctctaactaatttactcttggatcgagttttctctcttaagtgttttctctctgaatgaattttatgtccttgaatagtgagatgagaccactatttatagggattaattacatgaaatttgtttctctaaattaataataaataaaatagaaaactagtttatttctataattacaatgaagaaaatggaaaacttagactgattgtctttattctctaaagacacaaattcatctcgtgaatgtaaggattgtgtcgtgacttgcaagcttggaaatatacgagatatatctcagagattgttaacttacatcccctggtcggtgcatgcgagctacatgtgccatggaagctggtcggatggatatccatgatctgttcggacatcttgttgtgataaatccaacacgcaactatanntatcgttttaataagtaatactcaggtaagtgagatcg

SEQ ID NO: 45821 - DNA, 1941 bp, Cannabis sativa
aaaatttttaaacacacgtaataaactaaaatatcaaagactctattattagtactgtaaattatttaaaaaatttcaaaaatttacaaaaatgatattttaactataacaaataccgttgttgatcccaaaaatccgctaagtaaaatattaaggtcacgataaaaagtaaaaggaaagcaccacgagaaaaaggccccatgggcatcgcgtcgcgccgtggcgcccgaccactatggctaggccgcggcccgtgtggatggtggaatgtggcttttgaatgggcgggccgcggcacccacttgttgggccacgtcctgtgtgctctaggtgtctccgttttccacgcgtaatattttttttttcttctggtcaggattatgatttttcaccttgatatttttctgcgatcttttttttttttttgttgatatttttaaatcttcttctattttaaatttgtaaaagtaaaagataacaagcgtaaaattgcttcaaacacacgtaaaactaaattaaaaatatactaaaattaatctaaatttaatactaaaaataacctaacagtgccgtaccacacctccaagcgagacagggagccttgctccccttgtctccgtgccacgttgcgcgcctccaagcaaaatggggagccccgctcccgcctttgacttcgcattgggattttatggcctaaataaagcctattttaatataattagatttactaattatataatatctcgataagtctaatggtaaataattagggtttatatttatattatctgttaattaggtaataagtgagattatgatcctactaatctatttcaacataaaatttaaattttgctataagtaagtaaataagcgtaatttataaattacatagatttatttgaaatacatggatataatatgagttatttgtgaaataaaaatattttcaagttcagcaaccctggagacctgatcggaggccaaaaatatcacaacagttttagttaaaaatattaataggattattgagataagttgattttaaaaataccggagtattttaaggtactcaaagttgaccaaataccctaaaagtagagatttcttaatggctaagaaatgataagataactattaataataaaattttattaatattattatttttttattattaatataatattatcaaactttcaatttttcaaaaaaaatatatatgtctgaaattattagtaaattagtgaatttttttaatttaatttgcagatacactttgaaagctaacggaagcaagctatggccaaagatttatgaagatattgaggaaattaaagactaatttgtttggtggaggagttcatttaatttgataggataaattatccttcatgtcttgaactagctagatttggctagaaattttttatgatgagttgataaattatttgttttactttattttatatctttattataaaagtgttttgctttattctatatctttattacaaaataagttttcatgaaatacgtgaataattttttttttctaattcaattttgacattatgctatattttaaaaatttatagttaacgatgtatattctttttacgccatacattatattgtattctatttaaatataaaattagacctctcggtcgttacacaaaatattgttaggtacaaccgaaaccgggatagacccaaatacctgatgagcaaacacccatctagccacattatgagcggcaaaattacaagttctacttataaaagaaaaattacaactaataaagagtggagcagacttagaacaaaatgagatatagttttcaagcgcccagcaagaatccttcccattgaaagcattgatgatcacactcgagtcagtctccacaatcacatacttagatccgatatctaaggcca

SEQ ID NO: 45822 - DNA, 1027 bp, Cannabis sativa
ttttttaaaaaaaaaaccttaaataaaactaacaatacgtggctcgcccacacatctacctagtatatatatatgtaaaaactataagtgtaatgcattaatgcaactaaaattatataaaaacatcatgaaaataaaactaattacacaaaatatttaagtgttacaaatttaatacaaaaaaaaaaaataataataacaatataattaatattgagcgactactcctaaggttcaccactgcaatttggtattgcaagttctctaatacaagtgattaaattatgctgttattttatcttttagcaccttcatcctctccatttatctaaccaaaattacagttagagaaaataatatgagcaagagaaagaagtaaaacaattagaaaatcaaaccatcaaaggcttggaaaattaaggaacatctaaaattccgagcaccttcatcaactcaaatgataaattcttatgatgatcaaataaaagcaatactattagttatcaatggtattcagtaccattggattagtctggtgccctttaaaattttcctttatataacataacaatcctccaatctaatttttcaaaggggatcattagcattgaaaaaataagtatgtggagcaaagagttttggctactcaagccacactgcctagaatatcactatggttggttggtttgttgtgcataatgttgttatataatagttcataggaagctttcaacaattgttatagtgcctactcatttttaccatctttaagatcaaatgtcaaaaccataggactgagtaaattggtagtcaatataggagataggagacttcattcatcaaatctaaccaaattttcaatttctgattgtgtagattattaccaatgacatcttcaaaagtgtaaagtacaagagttttagctttactcacaatttctctaatgcagttaacaatggccaatatatgaagtaaatacttaaaaatccaaaaagggtatgtctcaaactcagtccttacatatttt

SEQ ID NO: 45823 - DNA, 1759 bp, Cannabis sativa
aaaaaaaaaaaaaaacttagatttattagtgcacggtgaaagatacaattttagagtggttgtatgcgcctgagactgttgccccggattgcttttgtggatatctgttgtttatagtactattctggttttgcacactagtcttatttagattgttcatttcaggcagtggctaggttacaccattgcactgatgctcatctttacagcgatctttatggtgctgacaagaatttttagccaagagaatcctgttgatgaggtaaaggtgttagctcccccaccaatgaatacagtggagcagcttttagccgtccaaaatgcaatttcacaagcggaagagttcatccaggatggaaacgtagtcctcctgaagctacgtgctttgttgctggtgattttccctcaggtcttccttctttccttttctatgtccttgtacttttcatttgtatattattacgctcttcggaacccaggaatgaaacattctgaaataaggcaaagcagaaaagataaatcacccaaacgaaattgatagtgactattgagatgctttacatgttgatatttgttccatttcagcctcttaatttgttagacttgtttttggtaatgatcaggccagcgagaaatttgcgatagcgcttgtgttagtggctttggtttttgccttgctgccaagtaagtacgttattttgttcctgtttttggaggcatttacaaggtattcaccaccaaggaaggcaagcacagagagatggatgagaagattgcgggaatggtggttcagcattccggcagcccctgttcttcttgagaaaggaagatagaaagagaaaatgatcctggtaggttttgatatttgtatatatgaatgtttatttagtgagtttattcctcatatttgtgggagtgtaaatgtcaacaatgcaagacaaatctgaatatacaacaaataagaaagtaagatgaaaaatgagtttcgccttaattaattttcctgttcttttaggcaattctcagagagagagagaactaaattctattcactttcattttcttggcacttgtcacttgacacatgtgaatatgaattaatggccgaacagccgaagttggattaaaatgatgtaaatattagtattattaactaatatttgatgatatttgatattttacctgtttttatagttctcttagtcttaataatcgtgttgatacttggaaacttttagatagaatttttgattttgctcctcaagctctttgggctattattggtgactttaatgcttaattaacttcgtataataaatatagtgatgctcctccttgttatactactataaataaatttaataactttcttatgatacatttctcgaatcctttatgttatattggtgagttttttttttttttttttttgaataacaagcacacttttgaataacttagctgatgtgttgacaatgataattgatatctattaaacttattttatctgatgataccctttctgctgttaatctcaaaaggaaatacaagtttacgttcgaaaatcattgacttgatgatgcttctttttatgatgtggttaaggatacatgttcttttgcctgtagagacatttctaatagagatagtattaagtattttttttatctttgcagaattctattactaatagtttaaaaaattggaacaataattctctttgggctttcaaatccaaaataatgggaaacttactaaa

SEQ ID NO: 45824 - DNA, 2230 bp, Cannabis sativa
taaaaatgaaaaagcccctattaattatatattagtcattatattatatatctattttgaaattataaaattttattatttctattattaatgtaactatttatttaactttacaaaataaattatcattttaactgtgactagttcaaaattaaacaaaaaaacatattgaaagtatgaatttgtaaaaacaaatttcatgaaaaaaaaataatataataatacaaaaagataaatcaagttattaaaattaagtaaaaaaatcgtaatacaaaaaaaaaattgatattgttttgcatattgcaattagatcaatgttttgttatttttctattgcttttttgttattttatagtaattttcatgtttttgttaagttgttttagaatagtttgtctacttattttaaagatgtgaaaacatgactatttatgtaagatccctacaacaatttcatcaacttaataatcgtatgcgagcattaaaatattgttactttcgatcaaattttctctaaaataccatgagaaagaaaaaaaaaaatcctttcaaattcaaccaaatatcaaattgattgtcaagaaaaatctcgaatatggataatgttatcgatgcatctactatatcggttggattgatagtgatacaaacagcaatgaaaaaaaacaaataaacagctatataaaaagaaatctcagaaataatagatgaatatcttcttttaaaaatatttttatcatttatacatattttacatatactgtattttactattactacaaagtttgggaagtaatttatctatatctatatcgataaatacctaaaagaacgtaatgaatgcttttgtattttttcagatttttttgtattttggcaaatgtctgtagtatagaaggattttctagaaatttcagtcgatacagaataatagaaaatttcttcaatatttccataatatcggagtacagatatttcttctagcatatgatatttttttcttcttcttcttgttctctgttctgtgacttgagtttaatttctctaatttgagttttaaatgtttaccttggtggataaaatcctcattttatgatcatatatataactagagattttcataccataaaaatagctgttttgcagggaagaatatctagatatcaaattgggtcagatacgacaatgtttacattcaacatccagaattcaacacactacttattcttgttgaacctgaaaaattaaacaaaataacaacattgttcttcagaatcataacataaagaccggatagcgtatggcttccaatatttcaggtgaggtagttgataaattctgaagcagttgctatagcacctcctgttatggcattaataacaattttgtccttgtcttgactggtggctatggatactaaagctcctgttagtgcccctccaatcatggcattcttctgcaatattcaaaggagaaaaaaaagggactgatgaggacaaaagttcatacccgaaaattgaaatgacataatctgaatgttgaagctcttatcattagcaaagattcatatataagtagaattatgaactgaagagtttgcagccaagggcaaagactaatgaaatggaatggaaattccaataaaatggccattctaccatttcagtggaatgactattctattttaaaatagaagaaaagactattccaaaaatgataagaaatagctatccatgaagataagtacccagtctctagtgccacggactctctctataccataatccattcccacataaactccagctacagttcctgtgagtggggtgaaagaatttgtcaacttctttaatagtagtcgaaaatattattttctaatgcaaactataattatgtaattaaacacttttgacttaccccagtatgctccttctttacacattttcttcaactgcaaccaaagtattagtagtattattaattgaaggagagaatattgtacaagtatgactttgtgtttttgactatttgaccaataaaactactagtttactaacatgcaaatcgaaattaataatcaacatattaggaataattattctttctttaagtgaaaattattttggcattattgaaagtgctcagtcgaatctagacaagccgttataggtttggattttgaaagaaaaggatagaaagacaccaaacttgaatggctgaaaacaagtta

SEQ ID NO: 45825 - DNA, 983 bp, Cannabis sativa
ataatatttaataatcacccaactgctcttttgtcattatccttaaatggttatgctgactatgctagttgttccttgttgagtatgagttgtccttctttacggtctttgtaggaaaaatgctaaatatagatataatgctcctcgcaatcctcttttaccatgatggtattagcgaagtgtttaattcaacgtataaagagcgagatggatgaatgtagttattttctccatattctaatatgtgggtcaattagttccaagctcttgttcgggtcaatgaggtgcaagctcttatttctaagtatgtgggtcaatgaactgcaagcatttttggttctctcatctttgagcatcttttattatatactctttttattttaagatggatttattgtcttctcaagcttacctgttaatagttgttatttttatctcgcatctacttatgtgacatcgagtttgaatatttatatcaaccataatttcttaaacgagttattaaaattatatttaataatatgattatcgagctgattcatattttttctcgttggtacacatgtcagcttctgtcagaaagagggccaagcatatatactaagtcgggagttcaatttcggtaaacggaaactaaactgtgacagacaatccataatactttattatgtatcaaactatcattggtttcttattttttgttgtgtgatcttacatgaaaatgaaatttgagtattgaatggcctatttaacagataattgtcattccttaattcattcatataacaccccaaacccaaagtaatagataattatcaatttgatagaaatgcataactccaacgacaactactccatatcgactaattaattgaacaaaagaagataacgagttccataaaaaacaaaaacaaaaaaacaaaagaagaaaacgatatctcacattatctttcatttgttttgagcaaaatatagggtgtttt

SEQ ID NO: 45826 - DNA, 4732 bp, Cannabis sativa
ctccaagggaaacttagagatggcctgtatcaacttgtcaccacagccaacttacaatcaaagaaatctgtcaaaaaccagtccaaaccttttactggtgtgtctgttttaaccaaaggaaatgtgtctcagccgtgtagttttaagccttttatttcaaaaaatgatgtatggcatagaagacttggacatccttcacttagagtgttgaaacaagtcttagccactcaaaatgtatccattgcaagaaatgaaaatgttaagttttgtgatgcttgtcaatttggtaagtctcatgctctaccatttaaattgtccactaatcgtgctactaaggtattagaacttgtccataccgatctttggggaccatcaccggtgttatctaacacaaactataagtattatatacactttgtcgatgattttagtagatacacatggttatatcctcttagagccaaatccgaagccttagaagcatttttacagttcaaaattcttgttgaaaatcagtttgaagaaaccattaagacacttagaactgactggggtggggaatatcaagcattctctgacattgtcatagaacatggaatccaatttgttcattcatgtcctcacacatcagctcaaaatggtagagctgagcgaaagcacagacacatagttgaaatggggttaaccctcttggctcaagctagtatgccattgaaatattgggtagatgcttttcaaacagcggtttatctcataaataggctgccaactcccatattgcatcataaatcaccctttgagacactctttaacaagaaacctgattatgcttttcttaaagtatttggttcatcttgtttcccatgtctaagaccttatcaaaccagtaagtttcagtttcactcattaaaatgtgttaatctagggtatagtgactctcacaaaggctacaagtgtttaagttcaactgggagagtttatatctctaggaatgtaacatttaatgaagaggaatttcctttcaaagctggttttcttaacaattatgcaccagaaaaagagataataattcacaactctgaatggtctcagctccctgttatacagttcactaaacacacacaaccaaaacatccaatttctgctgatgctgaacaggtttctgcctctcaattttcccttggagccccatctgccacacaacatcagcaagaggttagtgatcatacaaatgtagctaatgataacacttatattttcgacttagaatctgatgttgcagaccagcaagcaccagaacaggagcatgaaaatgtttctgctgaagctccgaggcaatcccatccaatgataacacgatcaaaggctgggatattcaaaccgaaagtgtacttggggcaggctcaatggaatccagtacatgaagaaccaaaaactcttgaagaagcactcaactcacctgtgtggaatcctgctatgaactcagagattacagccctcaaaaataacaagacttggacacttgtgcccaggatggacagctacaatgtggttggtaataagtgggttcataggatcaaaagaaatgcagatggttcagtcgaaaggtacaaggcaaggctggttgcaaaaggctttcatcaaaggcctggtgttgatttttatgaaactttcagccctgtgataaaagcttcaacaatgagaattgttctcaccatagcagtgtcaaagggttggaagatcaaacaattagatgttaacaacgcgttcttaaatggacagctagaagaagatgtttatatggttcaaccaccaggctttgaggatccagaaaaaccaaatcatgtatgcaaactccacaagtcactatatggcttgaaacaagcaccaagaacatggtttgatcagctaaaaggaactctaatgcaatggaacttcaccaattcaaaggccgactcttctctcttcatctacatgacagatcaaaccattctcatggtgttgatatatgtagatgacatcattataacagggaatgatgaaagaaaactaaatgagttcacttccaagctgaataaagcctttgcactcaaggatttgggacaacttcatttcttcttaggaattgaagtctgtcgagacaacacaggactatatttgacacaatccaagtacatatcagacttgttgcagaaatatgacatgctcaacacaaaaccatgcccaactcccattgttgcagggaagccgttgtcaaagtttgatggagaagccttatcaaatcccactatctacaggagtgccataggagctttgcaatacctgtgccatacaagaccagacatagcctttgccgtgaataagctaagtcagtttttgcaagctccaactacaagtcattggaatgctatgaagagagtgttgagatacttaaagggaactattcatcatggtctccacatcggttttagtgatcatttaagtcttgtgggatactcagacgcggattgggcatgttgtcctgacgatagaaggtcaatcgcaggttattgtgtctactttggagaaacacttgttgcttggtcttcaaagaaacaatcggttgtgtcgaggtcaagcactgaatcggaatatagagcccttgctcatgtcgcatctgaaattacctggattgaatctcttctcaaagagctcaagttcaagcttccaagcattcccattacatggtgtgacaatcaaagtgctagtgccttagcctcaaacccggtctatcatgcaagaaccaagcatatagaaattgatgttcattttgttcgtgataaagtgttgaagaaagaattggaaatctgctatattccatcttcagaccagattgcagactgtcttactaaaggtctaacacactcaagatttcagtatctaatggacaaactcggagtgaaagcttcaccccttcgtttgaggggtggtgttaggaatattatgtagctggtgcactgtatttctggtacagcagcagtacccaatcattgccaaatgattagctgtcgtatctctcaaattccagaatattctcttgttataaagtttgttatgcctagttttctgtaatgccaagtggcagtgcctaaatggccatcttgtatttaccttttgctatataatgaaatctcaatactcagactcaatttgagctgagaaaatataattaatctgttttttatcttggtatcagagcagataccagatctcctccatgtccaccgaacaatctcagtctcccctcactccaccaccaacaaatcgaaatcctgctgcttagatgtcaatcggcacagggaatggaagctcctctcaaaacctgaccaacaattacactcagcccttcaacaccttaaaccaacctttttcccttaagcttgacagaaataacttcacactatggaaaacaatggtatcaaccataatacgtggtcacagactcgacggattcgtgaatggtaccagaccgtgtccacccgagttcatacaaacagaaaatgcagctgaaggagaccaaggaactgaagttactctcaatccagagtatgaacactgggttgttagtgatcagctactcatgggttggatctatagctccatgacagagacaatcgcaacagaggtcatgggttgtgctacctctgctgcactttggcgcgcattggagaatctctttggagcacattccagggctaaaatggacgagtatcgaacgcttattcagaccactcgcaaaggtatgactcctatgaccgactatttgagacaaaagaaaatgtggtccgatatgttagctcttgccggagatccatatccagaagctcatttggtatccaatgttacatctggccttggtatcgaatatctatctattgttgtgcaagttgaggcaaaacctaacatctcttggcaggaacttcaagatatgttgttaagttttgacatcaagcttgaacggttgcaagggatgaacaataacaagtctggaaactcctcagctggatctggtttgagtcctacagccaacatggctactgctaacatgggaacaaaaaccagtcacaatcccaactcaagccgtggtcgaggaaattacaactcacaccgaggaggcacttctcagtacagtaacagaggaggtgcaagaggaggaggtcgtggtcgatccaataataatcccaaaccaacttgccaagtgtgtggcaagtatggtcattctgcagcatattgctacaaccggtatgatgaatcatacatgggacaggatcctcgagctcaaacaacacaaaactcaagtggtaacaatggtggacactctgcctatgttgctactcctgaagtggttgatagtgatgtgtggtatgccgatagtggtgctagcaaccacatcacttctgctgtgtctaatctgaaccaaaagtccgattacaatggtaaggaaaagctgaccgttggtgatggaaatcaagtagctatttcccacattggttctagcaatttatctactaatactgagaagtctctggtgttaaatgaattgctacatgttcctaagattgctaagaatctaataagtgtatctaaactaactgctgataatagtgttgttgttgaatttgactcttcattttgctttgtgaaggacaaaacaacaaggaaggtgctgctccaagggaaacttagagatggc

SEQ ID NO: 45827 - DNA, 1559 bp, Cannabis sativa
  modified_base (1500)..(1515): a, c, t, g, unknown or other
ccttctacctttcatatatatttgtaatatatatagtgtatatatgtgtattgtgtaacatatatttaatcaatctcttttattgtccttgtattatttttacaattgagttgcatgtaaatatcttgatttatctttcattgtaataaaatctctaacagaaaagataaaaacacacaaggtttctatacgtggaatcaacaatccttacagattgttactagtccacggggccacgcctagagataagattcattagataggtctcacaaatacaaagtaattaacttatacatagatagactccttcttttgtatgccacaagcttcatgtattccaccttctcaaacgaatcttgcgggaacttcaagtgcttgaatttccttcaacctccttgaagagtgctttcttccttcgaggcaacacttgaaaagttatctcccgaaagcttgaagaatcttctcctgaatgtagcattgttcttcttcttctttcgtagacttgattacacactcaagacaatacaaaatacataaacacagagaaagagaaaaacacccactcctctacacaacaaagacactcttctctaataatatgaatgattttcaaagttaataaaggagatactaaatctagttactaaaatgtgtatttattatcaatatacacattttggacatctcatatacggtctagataagaccacagttctgttaccaattaaaatttcatgttttataattaccaatttattagttcatttaattaattacagaataataatatttgtacttaaatagtaactatgtaactgtagaatagaataaaaaataaacattattgaaaagataaaagcacacaagatttttatacgtggtatcaacaatccttgcagattattactagtccatagggccacaaccagagataagattcattagataggtctcacaaatacaaaataattgacttacgcataaatatactccatctaactgtatgctacaagcttgatgtattcgaacttctcaaatgaatcttgctgaaacttcaagtgcttaaaatcctttggacctccttaaagagtgcttgcttcctctcgaggcaagacttgaaaagctatctcccaaaagcttgaagaaccttctcctaaaggtagcaccattcttcttcttcttcttcttttctagacttaattacaaactcaagacaatacaaaatacatacacaaaggaagagacaaatattctcctctacacaacaaagacactctttttctaataatatcaatgattttcaaagtgaataaaagagttactaaaactagctactaaaatgtgtatttattatcaatatacacattttagacatctcatacacagtctggacaagatcacaactcacaagaaacttacttaaaagagattttcaatcaactcaaaaatctttgtacctatagaacgtgatcagtaggtgttgttggaaattattttacnnnnnnnnnnnnnnnnctcacaagtatgttgtttaaccccctaaatatgaactttctaaa

SEQ ID NO: 45828 - DNA, 2278 bp, Cannabis sativa
ggatcgacctcacctgtgtgagattttactacttgattgcgtatacttgcgtagcgtttaaaaatatagcaacaattaggcatagaagcagatggtcgatttgtttctggagttgggagtatgggaacagcaggaggggaaatgggagtgataggatcagtaggataaaaaacaggggtctggatggatgattgggatgagtgtgtgggaaaaagatattcagctgtgtagattgtgttggacttgggaatagtagcagagggtagagatgcaggacttgaagttggggcaaatgaatcattggacagagatgctttatagggaaacttagattcatcaaaaataacatccctagagatgtacaacctacccgaggcatgcaaacacttatagcccttgtgattgagactataccccacaaaggtacaaggtgctgatctaaaatcaagtttgtgcctattataaggcctgatattgggatagcaaagacacccaaaagttctgaggttggtgtaatcaggtttaatgttgaacaacatctcaattggagattgttgttgcagaacaggtgaaggtaatctgttatgtaagtaaacagcagctcgaaaagcctcatcccaaaatttcaagggtagtgaggcatgagcaagaagacttaaaccatgttcaacaatttgcctatgtttcctctcaacaaggccattttgttcatgagtagtaggacatgggtgcctatggaagatgcctagttgttgtaaaggttcagtgaaagatcgaaactctcccccccaatcagtttgtaaagttttgatctttttgcctatttggagttctgtttcagctttaaagttttggaaagttcttagagcttcagatttggttttgagaaggtatatccaagtgaacctagtgtgagcatccacaaagctcatgtaatatttataaccattgtgagaaatggtatgggaaggtccccaaagatcagaaacaattaattgcaatggttcattgtacacagtaagggaagcttttggaaagggtaatttgtgaatcttgcctagacaacatgatgaacaaacagagaaaggatttttattattaactgtgagattacaagagtgaagcacacttttgacaatcttttcagatggatggccaagcctattgtgccatatatcatactcagagattgaggaattgttacattgagtactattgaaggtggtggactcattattggatggaacagtggctgtataagcacatggggcagcagctggggtagatggttgcacatgaaactgagatggcttaaaaatatagaggccattcttgtgtatcccagtgagaaggatggcttgagtgacctgatccttaacaaagcatttgtcagcatgaaattcaaagaacacatgattatcatgagcaaatttagacacactaagcaaattctttgttatttcaggaacatgcaaaagattatttaaaacaaggggatgagagttatgagtatgaataaaagatttgccaatgtgtttgatggacagacctgaaccatcaccaacataaagttggtctgctccttcatattcagtgctcatgttgaggttctgtagattaggtgtgcaatgattggatgccccagagtccggataccaattgatgtcatcagcttgagtagtagttgctacatttgcttgagcattgggagtattgggagagggaaatactcctgtaaagcttttgtcgaatctgtaaaaacagtcgagaaccgtgtggccaagcttgtgacaaagctggcactgaacacggtttgaggaagtggaaaatcttcctcctctgctgtaaccagtagtaccacggccattagaattagagaaagatgagggaataggaaagttacctccattgttggcacttcgattggtaaaggcacgactatttcctcgagctaaaccagcagcaggtgtaggtgaaaaacgattttggttgggaaatctgctggtgcgattttgataaggctgaaatgcgatattagcttcaggatacgaatcgatttcagtcgtggccaaattgacactcagatcattttcttgatcagaatcaactttttcaattcgagactcggatgctaatagaagtgcttctatttcagcaactgagtattcctcaactctggtgttggtagatatgatgaatgtatcatattcggatggtaatcctttgaatatagcagcaatgtggtcccttgagctcagaacctctcctaatgaggcaa

SEQ ID NO: 45829 - DNA, 1471 bp, Cannabis sativa
  modified_base (814)..(828): a, c, t, g, unknown or other
ccaattattgattagctagatagaaattagaaattcggtctttcaattggatttctttcactattgcctttttatctgattcggctctattactattatcatgtaataaattttatccaacttatcaattaataaaattggtaagatttattattgtaatgttataattaaattggtaagatttattatttttatgtagtaattataatacaattcccagcttgctcaaaaacactagctatatatgcatgcatacaataatatccattaaaaaatgattcatatatataatatatacctatgttcttgattatttatgaagataatgcaagtttgcacaataatttgtaagtaccctaatcaagacgttgcattatatttaccgtacatataacagtacaaatgactaattattagttggctacatacacacaagtactattaattattagtattcttctaccattatatatgatacactaaacattattatatattaatcaaaccaagcaatcttcagtgtacgtacttcatctctcccaattcacttattcagaaaaagacaatatataatatttgtgcttatataaaaagtattattagtgaaagatattataagatgccaagatggcataactatgattatgagaatcataattcagatattaatatatatatatatataattaatgatcaacacctaccaatcatatagtactacctttccctaaaaaataataatgtaaagctagcttatatttgctatttagctatatatagactaaattatatacaattattattattattattnnnnnnnnnnnnnnnattattattattattattattcggaaggtgaccattattattattattattgttgttgttattttgtgaagaaaagtgtggattgaacttgggagatcaactttttggaacttggaagttgatgtgattagattgataacttttatgcaaacaattattaattgtgtttaactcacgaaatttcacaaactcgtaacaatgtcaaactcccttcttcttgtgaaattatagaaaagctaatataattgcgtaaagttaacaaattaaatacaattgggtacaaagtgcattaacaaaacagtacaaaacattatcatattattcatgagaatgaatttggaaaatttttatttttaatgattttttttagcaaagtttatgttaatctaaaaactttttctaatgacgtgggcattaatatttgacacatgacatgaaagatgacgtcagctaaatagacccgagtcatagtagtcaacttgggagtggagcctagccctacgcccagcttgactccgggagctgtatgaaggaagtttagacttcaataacttgaatcgaactcattatcttttagtattctgtaccatgaagacatggagcaacctaattcaaagtgcgggagctgaaattacacaaacct

SEQ ID NO: 45830 - DNA, 872 bp, Cannabis sativa
aactttcactaatatatgcatgttcatttataaaaaaaaaaaaagataatttttcagatataacaaattaaagagtttaaataataagggtattttgtatatgttttttagaaagaaaacttttcagtttcctcttatataatgattttgtctgtatctatgtcagccaatattcattttttagtgtatatttgaaaatgttatattatacatcaacaataaataaataaaaaaatcattctatattcttggtgaggatgcgagacaaatgacatgactgctgatgactcaatcaattaaaataaaaaaaagttttcttttatattgaatcaagatcccttgtccaagtttagtttggtatcctatgtatgtctaaccaatataattatgccacatcatttaacactaacaagtagcagtttctttttattttttgttaaagtgtaacttttttttttctttagttttttataatcaacattgtcccgttattttcttgttgaaaatgatgtacaatcatattatataaactaaatcaaaatgactagaactattttttaaaataaataaatagacaataggtgccttcgtccacctcgtcagccctttctcattcgtgagcatttgttaacatgcctgcaaatgtatatacttagctgtacaccagcaataaataaaaataaacagttaccctatatatatattttggaggagcatgccggtaaatgtacacttttttctaaatgatatataaaattttagtatttaaaatatcagccaaaaacaatgtgagatgaaaaggtggccaacatttattcagtgaccctttatatttatatataacaaatgatggccatttacccaacatttat

SEQ ID NO: 45831 - DNA, 1223 bp, Cannabis sativa
  modified_base (703)..(703): a, c, t, g, unknown or other
  modified_base (729)..(736): a, c, t, g, unknown or other
cttcaaagttatattgatgaatatttttttctcttacttgtaaaagttatggcagttaaaattgaacagaagaagccataataaggtaagaaagatgtgcagggagagcataaagaaaagaatatagaatccatatacacctacttgacttttgactggccaaactttggacataatagtcaatttataacagctgatgaggccaccatttgtcatgtataatctcatcctcttgccaaagataaatgacatttttgataggtgcgaaactggaataagtagtgaaaactggtcaagaaattaatattaagattaaagttgaataaagttatcaatatagaaaataatcttatcaatatagaaaataatcaaacctaattttatcaagggcttttagcttaatatttaaaatacagtacctcaaaatcaaaaataatatatataaaattataaaaaatcaaaacctatgaaatggaatctaatccgaaaagatcataattaatacaaattggggaaaacaaatccttgtacaaattctacttacattacaaaattatggacttttctaacaattaaaaatataagagaagggttaccgtcaatctcctattacaacctcttagtcaacttttacacctaaaaacatatgttggaatatttttttttcaaatttcttttttacgggggtgttcgttatgcttanaacatcatccctgtaaatttttgaannnnnnnnaatagtttacagtgccgaaaatacgtttcaagttttttgaacacgcgtggtaaactattaagaactctgttttcggtactgtaaactattcggaatttttcaaaaatttataggggtgatactgtaactataacgaataccgctataaaaaaaattaaaaaaaaatatttcgacatgtgattttcgaatatgaaaattgactaaaaaaagttgtaattaacactccttaaaatataattataaataagatattaatatgaaaaagtctaaacaataaatataattcccataactaaccattaattatctaatataaaattttcagtgacaccctaagatagtgaggtccattgaatttccaatttataacagtaaaacaaaaatctaaaattatcaattttaaattaacacaatttcaatcttatcttccgttcaaaacactactaatatcattataattgttataaatattaataattatgtggat

SEQ ID NO: 45832 - DNA, 1735 bp, Cannabis sativa
cttccaagcaccaaaacaataaaattataaagctctctcttaacaaaactgcaatattctaagatcggcctgtcctacttgtttgactatttctaacattcagtagtttttttatgaaagaaaatctaatactgtaacatctcatggctcaagcataggctaaatgagccattcaaatggttaaaatgacaaaggagttaaacaatatcaaatacaatataattataacactaagttcagtatttggttctgcttaacattaggttgaaaatgagttttaacattctaatttacttagttttcctcaattgctccatattgtgcaacattgtcttccaatccacaaaattatctttataccaatacacaagctagactcagctttttttacaactatattaaatggcattactcttttagtctacaaatcactcactctctcttaaatttcttactagtaagtaattaagtaagaaaaatgttgttgttaataatttaattattgttattattagaatgaagtgagtgagacttacactggtgatggctctgttgatgcaaaaggaaagccagcagtgaagcaaaatactgaatattggagagcatgttggttcattataggtactttattttgtataaaataatcgtgaattgattaatgttcttgactatatgtaattatataacacaagtgttgaatgttgtgaaggcttgtccttctttgggcctttatgttcattctgtcaatagtgatgatgacactctacccaattctcatagatttaatttttaaaaactgtatctaaaaatgttgtcatctattaaatttattcatgtttaattttaattttgttttaattttttatttgtgttggttatgttatttccgttgaacagtgaacaaagtttgtttttaaataatttttatctaaaatgaacataggaggtaaatgacatgatttacatttggtttctatctggaggaaatttctaacatatttagagcattggtggtatttctaatagagaagatggttatgggcttaatataagagttgcttggaaatttataatttttctttatttttataactgacgcaataggtgaaagaaaaactatttcaacaatttatgtgtcatttttgaactgacggtataagtttttcgtgtcggtttagaaatgtcgcaaacaattttgtgtcatttccaaactgacgctaaagataaaacaaaagtgcgtacattttgcgtcagtttttaaatgaagaaaattgttttttgtgtcattttaaaaacgacgctaataaaaaactatttgcgactacggcatacacgtcggttttataaaccgacgtaaattctttaaatgacatttaaaaactgacgagaattgtactttttgtagtagtggatgggtcaagcttcccaatatttgggccagttttgcgttcaccggcaactattttagggtttttgtgtaagtcttagcttattccttgatagtctccaaaattactattaatccgaaagaacttggaataggatgtgtactacctaatcttcttttgttaataaaaacaaaaatattagaaaaaataaaataaaaatacgtacggaaacaatgaataaataatactatattaatatttatttatatatattgatgaaaagtgttacacatttctacacttttttagaaaattctagtattaactacacaaaactaagaaaatta

SEQ ID NO: 45833 - DNA, 2542 bp, Cannabis sativa
  modified_base (2497)..(2504): a, c, t, g, unknown or other
cctcatgaccaaaagatgtatgagatttgtaacatctttatgaataagaataataatattaatgttatattatttttaatataataatatatatatatatatatatattaattttcaacagttagagatgcaaataaaaaaaataataaaaagaaaataagatgtttaagatcttagttaataatgaaaaaaattaaaataaaatggccttaatttaaaaattcaccaaagactgaaaaaatacaataataatattgaacttttaaaagagaaaaaaaaaataaaaaataataataaaaaaagagtagcatatattctaattatattgtagtccctagagttgaagtttcaaacgattcataaagatatccaaacttgatttttcgataacatatttgtgttcaagaaccttaacttttttccaattctcctccaatttcttgacatcattttcttccagccaatcaaaacgcacaccatgatctaaaagataatcttcaagtaattcaggcaatagaataacaatatcatactcatcggacaaaaacacttcatcatcatcatcctcatcattatcgcttcgatctgagccactaattgttacttgtttatttttatcatcatgattgcgatcgtggtcatgatcatcatgaccccaaattatgttggagagctcaaacaccttctgatcgtgctgatgagtaggaggatgcaagggataacttaatcggttggcattaaactttttcttgaggcgacgaaatttgtcagataattgtctcttggttaggtttggaatagaggccatgagtgaatctcggatgaaaaggaagaaatcattactagcgacgttgttgttgttttgatgttgtttggatttagagtagttaatgaatccttgtaagagagttatctcatcctcaaagctccatgttctactacaattcttcgtctttttcttcttcttctttgttatcgtcatcttattgttattgcgattatttttgtctgtcgtaatagtacgcttgctattacgactacgcttattgctggcgccaatgctgaaattagtggtagccatttctggaacaatattgtaagttgaatctgagcctaagtctgtttctgaatttgtttcatgatcaaaaatgtagtaatcctcaaaagcatcaaaatcgaaattttcaccaacatacaaagatttcatattggctgaatggtgtttttgtaagagtatgtccaaaatcgttgtgtatttataaaatttatatagcaacaacaataataatatctcaaaaaaaaaaataatgataataaatatatagatacaaagagaaatttagattgtggttataaaaaggatatatcaacgggtccaatgtgtaatcgacattagttattgtataaataaataaatagtgtagataaaaagaaatgaaaactataattggaaaaaattattccactaattttgttactaataatttttttaacatatatagatatgctttggtcaaaaataaagaaaaaataaagaaaaaaaagaggaatcctatttttctttaattattttttttttctaaaaaaacaatttaatatttttttatgagattttttttttcgaataatatttttttatgagattagagcatatggaaaattaaaatatagctaatcacctagtaaaatatgtataaaatttagcataacatctgttatgatataaaattagtattacagcactacttttatttatatttatattatttttattattttattattatatttaactataatattaaattatgataaaattatttattttttgtatttttactaaaaatattatctaaacacatcatattttgcaattatacaatggagtataatattaaaagtcgatataaatttattacaaaataattttttgtctcaaatataacacaaattgttcttataatttaaaattaaaattaatatatatgtaaaaaatcaaaataaaaataaatgtattgattagaattttggacgaaaattattccatgttagaaacttatttattacttgtttatttccctttcttgctgaaagaaacaaagaaatttggtaattatgatattcattaattataatcctcattagtatcattttatactattaaattagaattccagttagtagtatcgttatgtattttttatttttttgtcgatcgatatttatatatatatctttctcaatatataaattacaattagtataactttcctaatttttgaggagagaatttgacaggcattattgtatttcatcaattaataaaggaaatttatttacactcaaaatttctaaacacaccatatttttataattttaattttatataaaatttaaatctttaattgtactaaattctcttaacttttttttttccaatttatatttttaaaaaatatccgtatcaaacaaatataaattatattttaaatattannnnnnnnaaattaaaataaaaaattatatgattttttttaaaaaa

SEQ ID NO: 45834 - DNA, 18707 bp, Cannabis sativa
atattatatggtagttattttgtgagatatattttaaaagacaaaattgtcattatatatttaatattaaaaaataaaataaaaataattaaaatctattacgcttaatgatattctttacaaaattggtgggacaagttctctctttcttttcttccttatttattcaagttctcctttttctaattttaataatgtaaataaacaaatgtaaggaaataattaccttaccattgataaacatgacattagagttatcaattagtcctttctgaatacaatttaattagttcccgaaaagaataacagtttaaaataaaaggaataataagtttatactttaataaccacttcgaataataattaaaaagaattatgaaagaatatataaatcttggctttcagatagtaaccaaacttaataaataatatataattttttgaaaatgtaataaataatgattaaaacactaatttaagcttctccttcacatcacattcttagtaacataaatatgaataactaacaaataaccatttaaagagttttagtacaaggtgcccataattaaaaaggatggttgcaaatttttcttaacataaaacaagaaggtgatgcctaaaatagaaaagagcatagaaaggaaagatgggttaaggaatctatcactgcaaaactacttaacaaatgaaagtttcttattttctaagacgtaaacaaaggcgaggaaaccttataagaagaaacaagggctccccacttgcaaagtaaaagcaaaataaggctgcaaaataggtgaagaaaaaaaccagaaaaaacatcactcaattacaaaaacccagcaagcaatcaattacacttttttcttcttcatgagagagagagaaagagcagagcttttagaactagaagaccaagaaaaatgaaatttggtcgaggagggagataaaggactggggtatgccacgtggcgaggtatgagtggaagggtgcgtttgggttcaacaacaacgacatcaccaacaataccaacagcacaaccactctctctctctccctccttctctctctttctctctctgccatgtcagattggaaccccgtcctatgaccccggcgaatccgtatctctctctctacaagactctctaacttataattataattatttttttttaaaaaaaaaacaataaaaaggagagaaagaaaaaactatctctttctctctctttatatttgtttctttctctctcttgttgtctctgtccctttctttctcgtactctttctcatatgtctcctctttctcctcttcctcgagcttccatgccctaatcccctctttcaaaatctctctcgctacatctgtgtatctctccctattaatcaattgttcagttgcccaagttgcttttcttgttgggttattgatccattataaagaactaagattggcaagcttctgaattcatctgggtaacttttatttccttagttcttgctcatttttgggttaaaatgtttgtgggtatctgaatttgtgtaattcccacctgactcatttgtgttttcctgctcattttttttgatatggatgatgactttgtgtgcttgagaaagtttatcctttttcgtttgtttgttttgtttctgattggcgctttcaatagtatgttatcgattgagggcttgttatgtgtggtttgaagtagtttggctgataaacggatagtaaaatgttggttttgagtttgcatgagttaaatgtgttttgcatgcttctcttcttggggattgattattcaaaattcattaattttatttttgttcgactgcatttgacattgatgacctagaggttgctaaatttggctcattaggtgcattttttttgtttttttctgttgttatattctcaatagctttcttgtcttgttcggggactttggatattgcataggagtgttttcacgcgattttaaattgggtattcggaaatgtcccagcttactattactatcatggtatatatctaatgaattgcatatccatttgaagaattcatcatcaattccctatgctcccatctgggatcttgtccttagcattagagtttgttgcttacatgcgtagaatgtcggttggattaattttctgcttttacttgtggtgtcatggtgatggattcgctgaagctggcttatacgcaacttaaaggtgtagttttctctcgtctttggggttaatatgtatttgctaatcattgggtatgctaccatgtccagttgaagaaaaagatttcgttttcttaggcagttgtagccaaattttatgaattcacattgtgaaactgttcatatttcatactccgatgtctctctagcttggaagatgtttttgcaattacagatttgtagaggctactttgtgtgataatttctttagagttaatatcattgagcctgtggccttgtactttggtacttattgatctttgtttttctttattgcaaggagattagtactagtagttgagtcaaaatggatagtatgaactctaaagttattgacaattttttaattctttcaaaaaaggtttattttccattcagcatagagcaatagctgttctacttgcaatgccattatctgatagtatcaactatatatttattgactgtatggtaatttcgcttctccatattcaatgaagcagcaagacactcttaaatatttggagatcaataaaagcttgaaatgctaattatgttatgatcatcctcttatcatagtacttgttatcacagagaacccaaatagaggtttagtgttttccttttcttatctagtagtttcttcttgattgggcattgcattttcttagatttgataggtgttgtaggtttagttgcagccttttgaattggaagcaattacccaaacatgattttcatgcaaggcaagaacgtcagtgaataatctgattatttttactttagctgttcaggaaaaatgtaaattaaatataaaggttatcacgctgtcttcttcacggttccatggtagcagttgaataaatgttcacttttgacagtcttcagttattaacatattatttgaattgaacgtttgtggagtcattaccttctggctaatcttccacattcctatttcttcttaatgattgaaatctatcaaaattatttattaactagctattgttgactgtatatctctgtgttagcaccattataatttttcttgaaatttttattaatcattattatttgtgtatatatggtgcattcacaaacaattgcaaacatacacgtttatattttatgggggttgttatcttattctagtgtttgattttaatacttgtgaacattaaagtgcaggaatgaattggttagccatttcaatacacaaactgctgggaagattctcagattttttgacttctcaacgattaaggagtcataattagttagttgtcattgtagatgatacatataagaagtagtactgagagatgaaagaaaatagttcatctaatagtaaaatgatcaatagaaattgggtgttgaagcgcaaacgcagaaagcttccttatggacctgatctagctaatggaaaagaagacggttcagttgcatcaggatcttcaagaaatatctcaactaaacgcaaattgaagactgaaatacttaacgagcgatatacatcgaagaagaagggaaatgatggggtgagtttactcctttatttatttttattttcttagggaaatcatctgcattacaaacctttattgagtgtcttattattgaaaattttcatttcctataatttatttgttttccatgactcattgaaaatttaatctatttgctagctcaaaattttcgaattgaattgattagaatagaacatacaacttttttcctctccctatgatttttctttttccacctactaagcttttctagcattttagttttagtcttcaatttggtacttttattgtgactaacatggttttgccagctggtttatacgttgtcaggatcaaatggtttagccagctaagctgtttgaggctatctagagtgtaatgtagatggtttccccatcttctttttctcttatccaaaaaaggaaaaaaaaaacatggttctgccagctaagctgttttgattattcttttcggtacataactgatgatactaggaattaatgtgggcttgatattctctttgtaaattgacaaattaaaattatgtttgagctagatttcaacataaattaaataagtaaatacttttttatttttatttttctgaacatgaaaattttgtttgggaagttaggcatatttttaaggaaatgtgtttggcaccttcatatgcattaacagttattgcttttatatatggtgtcgccatttctaattttcattatgtagttgtcaattcttttcttccaatgatatttaagaagtcctgctaaaagccttactctagcgatcaatatatgcattcaacgtcaatatgaaaagcgtttttgggtgtgtgcaagcaaacactatggaatttttttttgtgtgccacatgcctgtgattttggtttatgtggaactttcagaagtttgaaaagtctaagtttagtgtaagtaatcaactcagtgttccttcattttgggattgtgaatacgtcatcaaaattcttgcaactttttgaaatgaattagttgtagtttattggatttagagtggtgctctatgatgcattttgaaataatcaaaattgtgattactttaattattgactgacctcgtgatttttttttttggtttatccaatgttctctgatgcagtatttcttcgagtgtgtggtctgtgaccttggtggtaatttgttatgctgtgatagttgtcctcgtacctatcatctccagtgtcttaatccaccacttaaggtacgttctatttttctattgatttgtttataatatatttttattgttcaattttctaattgggatcactatactttgttcatcatttgaagcgtattccaatgggaaagtggcaatgtccaagctgtcagaatggtgatctgttagagcctggtagtttagataaaatttctaaacgagcaaggacaaagattgttaattcaaaatcagcttctgtaatcaagtcatctgaaagagaaaaaatatcccagatatttggaagttcaattattgcaaagaaaaggtcttcaaagaaaggaaaatctgtttcaactcaaggagttaaattctttgaaagtaaaccagcatcctctcaaatagatatgtctggcagtgccaagccagaccatttactggaggatgcttctttggatggtactttgccatctgtaaatgttgaggttgaaaaagaatgtgagaagtctcctatggattcctgcacagataagaagtctccaatggattctttgacagataagaagtcaggatctcctgctaaagaaacttcttctgattctaaagttgcaatatcagaagcaaaggatgaagcctttcctgatgttaaacccagcttatcatgtaacaatgagcctcaaggaaacactgttgtccttgcaattagtgctacaactgaggctagaaaaaggaaacataaagctaagaatgatactactcgaaagaaatgcaagtctgacaagggaaaaagtgttgctagtatttctaaacagcgtgggtcgaaagaaaatacagccagttctggaaataataagtttcggagaaagaagaaatcggttaaccgtggggtttctgtatctttgtctaaggaacacgttcaaaacaataatacgaatgttccctgtgaagatgaggtatctatcagctcacatctagttatcttattatattcctaaaccaactttggagtaaagctgattcccatagaattctaattgagattgaaataagtatttcacatctaatgtcacattcactacaaaaatttcttgtgtcatgttctttcagctgtttctgatattgtgtgcatgtgatttggaggaaatatttttgtctatagaacaataacatgagtaaggtttgggataggcctaggctatggtgtcaatataaattgaaaaatgtatagccaattatggtgtgccaatatgtgcgtatatgtgcaggaaaataataagcaaatcttgtaaaaggtgtatatcaattgaaatgctgtcttaagttactctttatctcatgatggctcaattctgattctagtagccttgaatagtttaattaccttttgattttgttgttcatggtaaaggaaaaatatattaaaattgcatctcgcattacagcctctaaatttgtttcttgctgggtgctttcagtttgctttcctaatttgagtgtaggatctcttttcgttgtgattattcctttaatacaaccgtgtcattgttttgttactcaattttttttgttataatatcagtatcacttttatctttatactttctgtaaatattgctaaacattaattattctgtagcagaaacttcttgaggatgctaaaaacccatcttctgttaaggataaagcaggaaatcgtgtagctgactctcttacatctgaacataaggctatatctgaatctctgccggtgaggagtaatacgaactcattgcatttagtttttgaacaggctagatatgggctcgaatagcataagtaattttggttttgacaagccttttatttttatcttacctaaattacaggtagatcgcattctaggatgtcgagttctaggcaataacagcgactctttgcggcatttatcactgacagatgctgatgatttattactttcagaatcccaaaatagattatctcgagggaattctgcttatgatcatgaattagatgtcgaggctgttgattttgttatcgaggataatggaaatgatatgaagattgttgatgaggaagagtgcatgaaaaacgacattagagttgatgaaatgaatgtatataagggatctgtgagcagagaaggtgaaaaagggaaagaggtggatttagtgaagaattcaaagaatactgaatctaccaccatgactgctaaagggcagaatgaatctgctgtggctactgatgggacagggaaaacaaatgaaaatttgatgacagaggaaaatacaaatactgatatggaaaatgttgatactgaagaagttccacaagcctctgaaacatatctctcttgcaaggagaaaaatgtagtggaaatagaatcaggaagtagtgatgttgctgagcacaaaattcaggaaaccattgtgcttgaatctgcatatgctaatggagggactgttctgtatgagttctttgttaagtgggtaggaaaatcccatattcacaatgtttgggtccctgagtctcagctgaaagtcatggctaaaaggaaacttgaaaattataaggcaaagtatggaacttcggttataaatatctgtgaggaacaatggaagcaaccacagaggataatagctcttcgatcatctaatgatatttgtgaagcttttgtaaaatggactggtctgccgtatgatgaatgcacttgggaaagtttggaggagcctgttcttaagaaatatcctcatttgatagaattatatcatcagtttcagtgccaaacattagaaaaagatgtttctatggtgccaagggagatgattgatcagcaaactgatgtacctactctcacagagcagcctaaggagctgaaaggaggtttattgtttccccaccagcttgaagcactaaattggttgcgtaaatgctggcataagtctaaaaatgtgattctagctgacgagatgggtctggggaagacagtttctgcttgtgctttcatttcgtctttgtacattgagtttaaagctattctaccttgtttggtcttggttccactatcaacaatgcctaattggctggctgagtttcaattatgggctccttacttaaatgtcgtggaatatcatggctgtgctaaagccagagccatgattcggcagtatgaatggcatgctagtgatgtgaaggactcaaataataaaatggctgcttataaatttaatgttcttttgactacatatgaaatggtccttgctgattcttcacatttgcgtggagttccttgggaagttctcatagttgatgagggacatcgcttaaaaaattctggaagtaagcttttcagcttgctaaattcattctctttccaacaccgcatccttttgactggtactcctcttcagaacaatattggtgagatgtataatttgcttaatttcttgcagccagcatcgttcccttctctaacctcatttgaagagaagtttaatgatctcacaactgccgaaaaagttgacgaactaaaaaaactcgtttctccacacatgcttcgtaggcttaaaaaagatgcgatgcaaaatatacccccaaagactgaaagaatggttcctgttgagctctcatccatccaagctgaatattatcgtgcaatgctcaccaagaattatcagatattgcgaaatattgggaaaggagttccacaacaatcaatgctaaatattgtgatgcaattaagaaaggtctgcaatcatccatatcttataccaggaacagaacctgattctggatcagctgaattccttcatgagatgaggataaaagcttcagccaagttgactttgctgcattcgatgcttaggattttacacaaggaagggcacagagtcctaatcttttcccagatgacaaaattacttgatattcttgaagattatttgactatagaatttggacagaaaacatttgaaagagtggatggctctgtttctgtggctgatcgtcaaacagctattgcacggttcaaccaagataaaagtcggttcgtttttctgttatcaactcgctcatgtggacttgggatcaatttggcaagtgccgacacagtaattatctatgattctgatttcaatccacacgctgatatccaagccatgaatcgtgcacatcggatcggacaatcaaagagactcttggtatatcgacttgtagttcgtgccagtgttgaagagcgtatcttgcagcttgcaaagaggaaacttatgcttgatcaactgtttgttaataagtctggatctcaaaaagaagtggaggacattttaaaatgggggacggaagaactttttaacaattcaattggcacagacgcaaaagatacaaaagatgcaggtgaaagtaatgttaacaaagatgaagcatctgtagatattgaacataagcatagaaagagaactggtggtttgggagatgtgtaccaggataaatgtaccgataacagtaacaagatcgtgtgggatgaaaatgcaattttgaagctacttgatcggtcaaatctacagtctggatcaattgatgttgcagagggagatttggagaacgacatgcttggctcagtaaaggtaagctattaaaatctgtaggagatatctgtttccaagcactgaagtgttgcatgtctgatcttatgtcctgatgcatgtatttattctgagtctttttctaaaagatgctgtgttctatttaatttaatgaatggctgtctattacatacttcacctattttgttttgaaaaagagagaggttatttgttttggaatggcctcctccctaactttgttcaggagcctcgcttatggcagaggaacactgtggttacaagctaaattggagcttcccaaagataaaaaccataaacatataaaacacacacaaatatagttgcagacatgtattgaaattacagctagctatgatcacttagtgtaagacaagactccgttatgtagtcagatcttgaaaattcacccatttagtagaaccatcctattgtaccagtagttttcaaatcacctatgttaattgtagttggaattatgctttctttcttcagatttatgaattgaactggtatgttaatttttgtcaatttgatttttggctacgctattatctaattttatgttgactcagtgaatgcaagtggtagacctcaggtagggatccttaactcaatagcaaagtgaataggcaaaaacagacatatgggagatagaagaggttggaaaatagccaatagaaaactggatatttaattgaacaaattgataagaaaatgctagaaccatagaaccacgaggtatttatttagagaaaagctcatacaaaatcacaatcaacatgcctcggaatcctttcttctcctatatgtatatactactttactcctccactacccatcactacagttacccatgtaccccctctactgcctgcccactttacaccctttataggagtctatcaaaaagtgaatatcaacatttgagggacacttataataagtatgatagaaggtgacaagaagcagtcaaagatttactatgattgtacaccggattatatttacttctttgaacttcttgtttttttgttcattttctttttggttaacttgctactaatgagacaccaattctttggcagatgttttccaacttagtcatatataacctttataatgaaacttgtgcataattcttatttattagaaattagaaactagagatacttttgatccttacttccttacttgtgctttatgtcttttccaaattatattttgaccagtcccttgagtggaatgatgaaccaaccgaagaacaagtaggaactgaatctccccctggtacgcttgatgatatctcagcacaaagctctgagagaaaggaggagaatgtagctattgtcactgaagaaaacgagtgggacaaactattgcgtgtcaggtagcaagcttcttcttggattctctatttatatgtgatgtattatgtggtctgctaacattttttctttctttctttcttgagaagaaattgtacaagtgtactttatcactttcttctctgtcctttaaggattatggttttattgtaattgagtaggttttggaaaacggttgatttatgttttattttgctattgatatcttgaagtagcttgattttcatcccttcacagactttatttcccttcaataaatttttccatttccctttccttaattttcttctttctgtacatataaatgaatgagattctgctcactttcatttgcatatttattgaacttttagatgggaaaaatatcaaagtgaggaggaagcagctcttggtcgtgggaagcggcaacggaaagctgtttcatatagagaagcatatgctccacaccccagtgaaacattgagtgaggtaaaaaatttatttgatgttttgctggaaagttgacaagtctttatagcttattttcttgcatatttttcttgtagctgttaacccaatgtgcttattattctgtataaataacaaggttattaatgagttagcttgttacttggtgtccttttccagtgtttctttttctttgttattggttatgcatgtgagtattacagaatatcacaaatgcgtactagtaaaaatttggaattaatgatcttaatagaataataaagacatgtttatagataggcccatcgttgcaatattattgtttcctcttcttttaagagtaatactccactgattttgtatacacttattaaaaaatgtgccccttctctcttgaattatctctaaatatgtaccctctttcctcttaattttaattcatagttgctgcttcaaatttagtttcttcctgcatcagtgttggctttaattgctttcttttacagcagagtggtggtgacgagcgtgagcctgagccagagcctgaacgagaatacacacctgctggacgagcactgaaaacaaaatagtaagtacagattctttcagtaatcaaaataaaaaagtacagattcattcaatttaattattaccatgattccattgataagagaaaaaagggtcatgcatgtaacgttcaattgagtataatatgagataacatcatcaggcccttataattactgtcttcttttcattgagcagtgccaagctccgtgctagacaaaaagaacgtcttgctaagaggaatgcagttgaagaatctaatcctattgacagatcaccccatgaaccagcccctcaatttccttcaatcaatgcttttgatggtgaacaagcttctggattagttcaatcttctgtggagaaaccactgataattgatttggaggataagaaatttgatgctcctatgagcaagtcgggatcacctttaagacttggaaggttatcaaagagtaaaattagtggtcatgctgatcgttgtattaatcttcttgatcatccttctccagacatattccttccaagccaccaactcccggcaacaaattacactaactcaacattcaacagtaatttattgccagttcttgggctctgtgctcccaatgctaatcaaatggaatcatcacataagaacttctcaagatcaaatggcaaacaaaaccgatcaggaattagaccagagtttccatttagtctacctacacactctggcactttgactgagacagaagttaatgcttcacaagatgtttcacaacagcatcttaagagtggcattcctgatggccgatttccacttagtctggtacactctttgctctgattggattttctttatttaagtgagcattacttatataggcatgattgagagacttgatttatttgctttatatttcaactgccctaggttgggtttctggtcttttataatcctcttcatactactttctctgattttcagggtagaatgccactgcctaacctaccatttgatgagaaattgttcccacgattcccatttccatctaagagcatgctgagctcacatctcgacttcttacctagcttgtctttgggtgggcgagaagaatcaacgagtggctctttgcaagaacttccaactatgccattgttgccaaatttaaaattttcctcacaagatgccgtgagatataatcaaccagaaagagagatgcccccatccctgggtttgggacatatgcctagcatgttttcatcatttcctgaaaatcataggaaggtacttgaaaacataatgatgagaactggttcaggatcaagcagcccacttaagaaaaaatcaaaagccgatagctggtcagaagatgaactagatttcttgtggattggtgttcgtaggcatggaaggggcaattgggattcaatgctcagagaccccaggttaaagttttcgaagtatcgaagttctgaagatttatcagccaggtgggaggaggaacaactgaagatcttagatggatcagcttttcctgtatcaaaaccaactaagtcaacaaagtctaacaaatcttccttatttcctggtatttctgatggaatgatggcgagggcactacatgggagtagatttgttactccaccaaaattccaacctcacatgacagacatgaaattggggtttggagatctagggcctaccttgccaaattttgattcatcagatagaagtggtttacaacaggagcaattcccccctgttccaacatggatgcatgataaatatcgggcaaatatgtctggagattgtgttgctgggccttctgacagaccaggcacatcttcaaatgcaccagttgagaagccatttctccttaattcttatggcgctaattgtttagattcaattggtgtgaatcactcatccagctatgatgcaaagcgaaaggaagacgaacaggttgggagtaagtatggcaagctacctagtcttcttgataaatcactgaaacttttgcgtgattccaccaataatttgggaactggtgaatccaatagtttaggcttgatgtctgaccctaggagagggctcttgcactcaaaggaggaagatgtagctggaagtagctcttcaagggacaagctacctcattggctacgagaagctgtaagtgctccagcaaagcccccagatcctgagctacctcctactgtctcggcagttgcacagtcagttcggttactgtatggggaagataaaacaagtataccaccatttgtgattcctggccctcctcctcctttcccaaaggatccaaggcgtatgttaaagaagaaaaagaaacgaaagtcacagctgttgaggcaggttacatcagatattgtcggaactagccaggacttccaaagcactgtgcctggggacaatgctccaagcactccattggccccaccactttcgttgcttccacaagcaatatcaaggattgagtctgacctcaactttcctccactccatttaaaaatgatgattccatcatcctcaccagcgcacgtaaaccagcagaagaaaacaagcatgggattgaccccttcccctgaagtgcttcagttagtggcatcttgtgttgatccaggcccgcatcattcttcagcctctggcaggactaactcaagcttcgctaacaccaatctaacattaccgaaccatattgaccaagtggggatttcagactcgcaaggtgtaattgaagaaaatgatgataagcaggatgcacccgttatggtattgagttcacctccagaagataaagaagatcctggaagtggggattcaagcaaaactcattcagatccttctagaagtgaacggtcggttgtgcctgatgtggaagaaatatcttctgagggcactgtctcagatcatcgtttgagtgatcaggaatcatagctgtaatttaagactgaaaattaaaaaaaaaaaaaagatattcttttgtactgctgtaaactgtcaaccaatgtgctggaatttttgtaggtgttgtcaagtgagtgatggattagccaaagtataggattgtttaaaacatcttagtgtaaagtttctcttagagaaagaaaatatagtgttgtcttctttgttgcatctcctgtcttatttttctccatccatgtttgaccagtaagcagtttaggtagtttttagcttacctcctcatcctttcttgatttggctgtgtaaaggatatctgaaagggtgactgttgttatagtaagaaagctaggctctaacttgcttttccacttagtttggtttttgtagaagcatttcgtaccaacaaaagtttgatgaatggattttaagcatgatcagagaagtttctccaatcaacaattttgtagtgtcaatggatgcagggatgttggtattctcactgagatttctagtctttgtattaagtttgacagagtgaatttatgttttgagcgtagagatgctaaccttcttgcttattagctaaaatatcttcaatctgttggttggaatgagttgaagccatatgttgcttgtccattttttttattggacttgcctttccttaaaaaaataaaataaaacaaatttatagctgcctaatgacatgtgcacttaataaaacacactaaaaaaattaccatatttatctaaattgaaatttaatgttttaaaatgtagagctagatgtgaaatatttctgtgcatatatcattagcatgagtttcaaactaaataacgatactctttttacatgatattaaaaatatatttacttttgacataacacccaaaatactttttccataattttccttcaagctcttgctaaatcaaattctatcttcgtctatcttgcactagccatagaaatgtggatcacactacccctgatcctagctttgaggtccaccagttgagaatccatccctattgcagcgacaatattacaacaagccccattccttgcggcaacaatattccaccttgatgagttcgcgtgaacccaacttgttgctttgcagtcgtatcacactagattccacccctcgcagcgccaagatcacaccctgatgagaccccgtgaatccatcccctctttgtcaacccaacccaacaaccctctctctaaactcctccaaacgagtttttggccactattagagatggcaaagatttaaagcattatgtaacatttttgaatattttaggatggtactcttagtcgaatgtaaattagcaaaaaaatcaatgaaataattaattttatcaaatgaatataaatgtcactggtgcctttagcaaagtgtggtggtagacttgtatatcattttgggtttttccatttcacatattcacattgttcttgtattataattatcgtatttaccaatgtttattcagaaactagtcttgatgacgtagacatcaatatttaacatgtagcaagaaggaaaatattcatggagttaagtatctgtgtcataatagtcaatcctgggaagggtccctagccccgcacctaggttgtctctgggagctccagaataggtatttggatcctgccaaattatttacaaatcacaaccctttagtattctaaaccaacaagtcaagaatactccaactccgaagcttgggaactaaaaaatgtcaaattggcatctcggaagccaacccgagtgcctagggtttaacccaacgcccaagttgacatctcgagctagggtttcaattttcaggtccatcttagtgcagatttctcaaaccctacacttagacatgaataagacctgtcacaagcatgctagaagcaccaaaattagaatcgaaacacttttcatttgaggcacctaggcaccggtgcccaagttgacctagtggtgcacccagcgccttggttgacatgttgtcaagctggggcgcttccaaccacttttctgaagatgtttcatggaaattttcttcttcatcataaaatgaggaacaagtgctttcgggaaagaaacatatcaatttggaggccaaacaggtgacccagcaaccaggttgacattgggcatggtcactagcgcgcaggttgaaatattatcaacctggaccattttcgatgataattttgacacagtcttccagtcatattctccgttttcataaaaaaaataagatacaagtacttttggaaaacaaacagagccatctggtagccagaataaggagacagtgcccaggttgacttgatgctaggtcttagcgcccaagttgacattttgtcaacctgggccagttccaagcatttttctcaagaagtctcttggaattttatccattttcatctattacgaagatacaagtgctctcgggaagaaaacgagaccatttgagggcccaaatagggactcgatgcctaggttgacagtgttgctgggccctgcgcttaggttgacattcaacctggttcgcgtgttttcgttgctcaaacacaaattctactatgagcattcttcatatatcggtccaaaatgaggtaggagacctcgtttgcaatctcgaatgctatagaagtatcaaaacgagtctcgggaagctcaccaaggagcacccagcacccaagttgacatgtgacctagtgtgctgggttcttcttatcagattccagttctttcttgagcatcagacaatttttttttttatagtaaatgagagttatgacttgtgacaagttaaattcgtacttcaataattcacctttttggtaaagtggaatatcggcaaaatagtcgcaaatcaggaagtttcaagtctacatgatttcacaaaaaagtgacatctctgagaactagtgcaaaacttcactataactaagaaattgattaaatgacgttagaatatcacttaggcataaaaatacaagtccgatactttttcccactcatacaatgttcaggttgacgtcagaatgtcaacttgggccctggatttcatcctgggcactagatgtcaaccttggcaccggttgctgaacatccttcaataaaacgaccataactcactcaatattgatctgattgacacaattccagttgtatttgaaagatcttttcaagctatttttagacaaaaattcatccccaagtcaagtatgatttttctctttgaaaagcctgaaaacaatccaacagacacgattcgagcttcaaatttttttgattatgatttacagtcattttagccattagatcatcatcaatggtcaagatcagcgagaaatatttttccatattttttatattattttactaatttgttaatggacatcgttgcttataaaaagaagagctccacaagctcatttttcatatttagaaaagttcacataaggtcagagcatctctctctaaaaatttgatctcttaccttagtcaattttcttataattcttatgagaaataaaaaaatcgaagtagacggagccccgttatcatcatgacacaaggagtgaactactataaatttggtgtgtttctcttttaatatttacttaaatcattgcgcatctcgctaatctatcgagctagtgttggccaaactttgtaattacttgaaaaatgattcaactttattaataatcaaagttcaaaattttacatcaggaatagagattacagcatcagtttactggtagtaggatcgcaaatgctccacattccagtggtttttttattagcg

SEQ ID NO: 45835 - DNA, 1806 bp, Cannabis sativa
aattgacaactttaatcttctcacctagttgattttcaacttaagctttgaagaccttaataaacgtctaaggattgtgaactttcatgtatcaagtataagtacacataatgagaatagtcgtctataaaagtgataaaatattgtttgtcattccaagaagctgtagagaatggaccacatatttcagtatgtatctatttaagatgccagaactcctgttgtcacttaacttcttaatgtttgccggtttccctttgatacattcgacataaagattaaggtcaatataatcaagggtgttagttttctgtttgacacaaatctctctattctccttttggagatttatcctaagcatttgtgccataagatgatagaattctcatttggtaattttcttttgtacctcttaatgttatttgcaaggtttcataattagatgaatcaattgcattaaacatatataaattgtcaattaaagaaccaatcacagctaagtaaaattaaaaaaaaaaaaagagactaaatttattattttcaaatgaataagactaaccataattgtttaaaatagaaataaaaattaaattttgtctaaatgacagtactacataagtctcttttaattcaataaaatgacaaattaagctcacataataacaaattcatgttggcagtaatattagcaacataagcagtaactaacaaattaagaacaaataagtacataagctcacataatagaaattcatgtcataacatactaaaataatataataaaataattatgtaagacataaaattcatttaactgtagtggtcgatccattgaaataagatatctagcacaatattgatgcttagtctttagacagaaacatcaacttgtaagtagtactctcaacacagaaatcaaatgttaatcataaattctgtcaaacaacaactttcttttgagtcgatatattgttcatataaaaactttataattatcatgtttggccaatcaataatatttctttgggccgattattgaccgcataaacaaaaaatacacacatcttattatctcaaaatagataaatttaagcaaaagaggttactttggtaacattttacttcaattagtttatttcaaatttaaagacacaaaaatatcaaacaagtacccattccaaaatatagtgcataaacatataaataatttatctttacataaataaatataattaaatattgaacactgactcatattccaaaatgccactcatatgctaatgcaaaacaatagcatatattatataatatttttataatataatgttgtacgtatagcaccaaacttgaaaagtgatttcaaagaatgacgcaaatatatgaatatgcacacaaaccatatacatataatgaaatggatctgagatgagagccttgtctgccctttaattgctctgtggcagttagttccttatttctttttaactgtcttatattgcatttcaactgtcttggtttgcatttctttcctctttattcgaatataactgttcccgcctgcttcctcttgccattttttcttcatttctgggttcaactaatggagaatttcatcccaaccatgtctgatgcattgtcaattcgagaaagagaggtcattaacttgtccaacttaaacatccctcctcctagacctgtcaataatcgactgatctgtaggatattttctaaaaaaggatacaacccaaaaactcttaagaacttcattaccaaacaatgggttggtcgttttgctgttgccatttc

SEQ ID NO: 45836 - DNA, 2020 bp, Cannabis sativa
  modified_base (665)..(667): a, c, t, g, unknown or other
cataatctaataaaggaaaagtcacattgattaatcttttgggaacttttgtgaaataattatgcaataaaaccctcctcaaactttggctgtgggaattaatatttaatttgtgagtggaaatcaataatatataatatgttctcttacttgtctctatataaatatatacaaatattttagagatatatatacgaaagtaacccaacctagctaggtatatattttgctttaagcttttatgcaaatatataagggcaatgacttttcaagtgctttaaactcgagaatttgataaccactatctttctcttttctttttctctttaataaagattataggtctttctcttttgcataattattcttagagaaagaaaagaagtttgatagaaaaaaacaataacatcatatcttgtttggttcataaaagaaataaagttttttgctattgttttgtaaagtgaaaaagaaaaaagagaggtacgtaatataatatatacaaaccctagatagctatacttcgctttttatatggctaattttcccattttataaattattaattataagatcattatcatatagagtgactagtcatgagtttatatccatatatatatataaaaaatatatatataaaaatatataagagagagagagannnagagagagagagagagtggcaggtcaaagttggtattgtttatgtgcatgcatgaatgatgatgaagtcaatttagcaaagtaatcaaaaagagaagaaaaagaaggaatttataatactaaaaagcatttttataatttatttatatattatataatataatttgtaacgtactaatactagtctaaattaaatatatattagcaaagtggaagcatgtatgatcttgataaattattatcgatataattatttgagtgtaacttggaaaattgatgatgtaatcacctacctagtatagtatcatacaactagaaatttgattaaatgtgtatttattatattaaaataattaattaagattttaaacttcgatatgtataaaataatattctctaaattagtctgactgcttaaaattctccataaattattgagattgttggatttaaatgtttttgtctaatttctttcatttttttactaattcggtgattgtttatactaaatcatgtttctcagactttgatatttactaaatatattatgctcctcaaactttgatatgtaccaaattatatgtgtcccctgaactttcattcatgttacactttttttattaaaattggacaaaagtccttaatctaataatatcaatagtttatgaggaatttttaaaagccttaaaagttcagggagaataatttgatatgtgtacaaagtttgggggtaaaatcctaattagactattaaaattaaccactaaactaaagttaatgtgtataagttttttgtgtgccaactttctattatacgcccaaattaccccttctcattttaaaaaacccaaaaaaaaaaaaaaactctctttctattctctctttccctctggctttcagtttccttctcacccaaccgactaccagataaaccactccaaaatttaccaatcgcaccactgcactatctggtgccgacgacccacgaccatccctctctctgtgtggttctctctggtgcatggtccacgaccaccactgtcaaacggatagacgaacaatttgtagtttctttgtattttcaataaaaattaagtttttgtgaaatctgtattttttgtgattttttatatggtccaataggtacgatagacgtgggtataatagtagtgtaatctggaggttaaggataaaggtctaatagtggtctgatggtagtacaatagttgataaaaggtacgatataatccgatagtacactactacaaaagttagaattcgcgacggtcctaaaaacgctttttttgagagaccatcactaaaaaaaataattgtttaaaactgtcgggaaaaa

SEQ ID NO: 45837 - DNA, 2153 bp, Cannabis sativa
ctgtgacaacacttgccagacttcgaaattcaacttcaatagaggacctacttattgttatttgcttctgagatttccagtgcaccaaattccctccaaagaaaatacaatacccggttgtggacctcctatcatcagggtcagaggcccagtcaacatcacagaatgcctcaatggaaaaattagctactggtttgatgagaagatcataatcaagtgttcctgaagatacctaagaattctcttgactcccatctaatgtgacatcagtggctggtgcataaattgacatactttgttaatagagtatgcaatttcaggccttgtgacagttgcatattgaagagctccaacaatggatctgtagagagttgcatctttgacaggttcactaccatagttggagagcttcaagccactgttcatgggtgtattttgtgtgttgacattttgcatgtcagctttgtagaggattccttgcaggtatttggtttgagagagaaggataccttcttctgtttgaatgacccgaattcccaacaaaataattgaccatggcctagatcttttaaggcaaaagtggcactgagatcagcaacaaggtgattgaccataatggcatcattgcccattattaagatatcatcaacatacactagaacatagatacaaattgagtcagtgatcttgatgaagagtcaatgatcagctttagaaaattgaaacccatactgcagcaaacagtggacaacttttctaaccatgctcgaggagcttgtttgagaccataaatcaccttgtttagcttgcaaatatgatctggaaattcaggatctacaaagcctggtggttgctccatatatatttcttcctgtaggtccccatttaaaaaggcattattgatatcaagttatcttattgtccaaccttttgtaaaagctattctacaactcgaatggtaacagtcttcaccatagggctgaatgtttcttggaaatcaaaacctgcctattgatgataccccttagctacaagcctagctttaaacctgtcaagacttccatcacaatttaattttattcgaaacactcacttgcagcctatgggaaccttgttagctagtctaggcacaacaacccatgttttattcttttttagagcaaaaacttcagtattcattgcattgttccaatgtggttcttgaagggcagccttaactatttttggttcacaaacagctaaaaaagctttgggtattctaatgctagctcttaatcttgtggtcatgggatgagttgaggtggtttgaggaggtattggggtagagattggtgttggaagagtattgttggtttgaacagggatgcatattgtactggtgcagcagtagtaggaacactggtgtgagtgctaacaatagtgggaatgttattgacagacggtggttgtgaagaatttgtgttggtagatgggataggtgagttaggggttgaggttgggatatagggtataggattaggcattagagttaaccgtttgagcaagggaggtaatggttgtaggcctgtagtgactgtggaaggttaagaattagaactgttttgtatagcagcagtgtgagcataaggaaagttgttctcatcaaagacaacatctctagagatgtagagtcttttatcttttgacaagcacttgtagcctttatgggacatactatagcctagaaacacacaaggtgtggatctatactggtagtgtgtctttgttgtaaggccggaggttgggataacacaaacaaccaaagattttgaacatggagtaatttgttggtgtgtgaaatagtggttgtactaaaggcttcttcccagtactttaagggaagagaggctggagctagcaaggttagtcatgtttccacaatgtgcctgtgtttcctcgcaacaacactatttttttcatctgtgtgtggacaagcaagcttgtgcacaatcctagaattttcaagaagtgttgtgaaggatctgaattcacctccccagtcagattgtagggttttaatttttgttccaagttgcaactctagttgtgtcttgaacttagtgaatgtaggtagggcctcatctttggttcttaacagatagatccaattgcat

SEQ ID NO: 45838 - DNA, 840 bp, Cannabis sativa
aagtgttaaggattaaaatggtaaccaatgacaagtcaccaatccaattcgacagctaaggaatatgaagtggcaccagctcatcatcattgagtaatcacatattttgagcatagcagagagtatctttctgttattacctttttgagaatattctatgttattgtaatgcattgtttctgtgtaatgaggtgttcctattatagaatattcttataattgactataagtatcaatgagatcacaaaagctctttgagttgaatttattcatttgtgtgtttgtgtaaaattttactaaaaaagtaatgtcaaaattcaaagttactatataaaaataaatattttaatattcatatttatactacaataacttactaattaacaaaacctaattattcaaaataagtactaaaattaaaaccaatcttctatattcatagtctcgtcgtccatatcttcatcgtttggagcatgtgtggtacagttgtggtggtagtataagccattgatattgagaagaaaatgatgatgcttaaagaaataaaagtaggaccgattgaagagtaggtcagttgtgaatattgtgataaggctacatacatatattcacgaaataatttggttaacacatacataggaatatataaaaatttgttatatattattagaataatgatttagacacatcaaactgcacacatttttactatatacaatgatatgtaattgtttacctaaattttaacggcgatgacgtgtcaagagtagcaacacgtggcacaaaaataccgagactaaattaataaagaatatgtaaagtcatgaccgttaatcatga

SEQ ID NO: 45839 - DNA, 1477 bp, Cannabis sativa
tagggtgttgattagttggcctaattgtagaggatgtaccagcatcgggttgactggttaaaccaatggaggattgagtcatattgggaggtacagtggggttggatagggacgtgtcactggtatgtatgggttctgaggtgtgcacagtgggagagagagactgagtggggtttatgctagtgaagttgggacatttgttggtattaggacagtaggggatggtaaaggctgagtagactgactgacagctggaacagcaagggaaaaagtgggagcagttggaaaagcaataggggaatccaatggaacagtagacagacgtgtaggttgctgtgaagagagagatgttgattgagaaaagagagcagattgagcaaaaggaaaaactttttcattaaacaacacatctctcgagatgtataagcgcccatctttggataaacacttataacctttatgggacaagctatatcctaagaaaacacaaggtgtagacctatagttgagttttactttattgtatggtctgagattgggatagcaaagacaaccaaagactcttagcatagtataatcaggtttgacatgaaacaatagttctaaaggtgtgctaagattaagttttggtgtgggcattctattgattaagaacacaactgttctataagcttcatcccaatatttaagaggtaaagaggcttgagcaagaagagtcaagccactttcaactatatgcctatgcttacgttcagcaacaccattttgttcatgtgtgtgagggcaagacaccttgtgtaatataccatggtctgttaaaagtttagtaaaagcttggtattcccctccccaatccgattgcaactttttgattttgtatccaagttgtaattcaacttgagccttaaagcttataaaagttggtaaagcctcacattcggttcttagcatataaatccaggtatgtctagagtaggcatcaataaaactgatgtaatatttatatccactagaagaagtgataggggcaggaccccacagatcagagtgaagcaattgtaaaggttcattgtactcagtagtagaaataggaaatggaaatttgtgatgttttcctagacagcatgcagcacagagatctgaaaaattggcatcagttttattgctaatttggatattacaagatgataaggcactttgtacaattttagcagtagggtggcctaatctattgtgccaaagagaaaattgagaatttaaatggggcaaagtgatgctattacaatgactttgataggtaataattggtggagttgttgactcaaaaactggtgctctagaacttctatttttggataggctttgaagttgaagagagtcaaacttgtaaagaccttgatcaagcttcccagccaacaaggtcttcatggttacctgatctttgacacaacaataagtgggatgaaattcaaagtat

SEQ ID NO: 45840 - DNA, 955 bp, Cannabis sativa
aatagaaaagatgtctggaacactgttttggagaaaacacttggaactggcccaggttgataaaatgtaaacctgggcaatgggcattaggcccaagcactaggttaacctaggtgctaggtcccaattttgcccaccagatatttttgtttgattctcgaaaacactcgtatctcaattattggtgaaaacaaagattatgcccagaagacttcttaggaaaaatgtttggaaatggctcaggttgacaatatgtcaacttgggcatttggcccagcactaggtcaacatggcactgggccccagttctgactaccagatggctctatttgtttcctaaaatcacccatatcttaattgttaatgaaaatggagaatatgcccgaaaaaatttgtctttactgctattagaaatggcctacgctgacattatgtcaacttgggctgggagctagcaccaggtcaccttgggcactgggtcccagttttggtctctaggttgatttgtttatttcctaaaagaacttgattcctagttttggatggaaacaaagaaaatgcttgggataattcttcaatattgtggttaaagctccccaggttgacaatatgggcactaggtacatcaccaagaggcttgagcaccaggtgctccaaacgaaaaatgttctgattctgattctaatacctctaacatgtttgtgataagtcttattcatgtctaagtaaaacttttgagccatttgcactaagacgaacccgaaaactaaaaccctatctcgagatgtgaacttaggcgttgagtgaaaccctaggcgcccgagtcaacttctgggatgccgatttgtctctttttagtttccatgcctcagacttggattcttcttgtctttttggtttaggatactgaaggatggtgagttggaaacaacttggcgggatccaaacacccatt

SEQ ID NO: 45841 - DNA, 1206 bp, Cannabis sativa
  modified_base (513)..(525): a, c, t, g, unknown or other
  modified_base (778)..(801): a, c, t, g, unknown or other
tgttacaatacgacctaatacggcatttcaaacgagaccttagtaaataattatcttatgcttatggccaaagaaaacacgtcaaaaaaaaaaaaaaaatatggccaaagaaaaaaaaaagtaattacaaagaccgtattataataaatagttataagaatgactttaattataaaattgtatgcgcatttggagaaaagaaattatgagtacatatatagataatgacaaatacaatatatagaataattttatgtagagtagacacacctattttatcattataatataaatacattttcttaatctttgatctctataacttttaacttttgagtatatacgttaactaatatatacccatatgtatccaattttttttatagtgtatattgtataatattagttctgccacccaacaagagaaaacaccaaaaaaaaataaaaagagaactatcactcttaatataccatattaaaaaaaaaaaaagattatttcacaaatacataaannnnnnnnnnnnnattacaaaaatacaattttacgaaattttaaataattttattattttttttttattttatttacaaataatataatttttttacgttgtactgttgttaatttgttgttattaatttccctgcccattgaccataccacaaaactaccctaaacaagtaggaacaaaccataataaatggcacaaaaacaaaaaaaaaagcgtacagaagtcatacaaaagtccttaaatttaacaatctcaatagtttaggnnnnnnnnnnnnnnnnnnnnnnnnttcagggggcatgatttagtatatatcaaagttcgggggaaaaaattgctaattagccttttattaaatattaaaaattacaagaattgctagctttcattgttaggaccaaacaataattgtggaggaacaaaaagcataggaaaatgttaagatgcaggtataaaaatgaatatttagatcaaaaaatttatgatgatttaagtttggtatatttatgttgcactatggtatatatttattttgtgataaggtatattaattaagaaataagtaaaaataataatcaatggaggtatatcattttaaatttgtggtatatttattgtgtgctaaggtatattcttttttgaccatgtaaaattgatcgtatattaatttttcactatggtatatctgtttagg

SEQ ID NO: 45842 - DNA, 2058 bp, Cannabis sativa
ataattattatattaaattaaataaaatctaacacttaatgactgatatgagaggatgctaagtaaaaaaattggatagtgaagttaaaaattgaaattgaaaattaaaaaaaaaaaaaattcttcaagattggtaaatgtcaaagtctagtgtatagtatgagtcaccatatcatgatcatggagccggtatacccaaattaggaagaataattatcaattataaacatgattatagaattaacttagcagttttacaattgtattacattaaatattattattatttttttgaaatgcattaaatattattcgaatatacttaaaaaatatttatagaaatgcattagaactttagaagataacataattaattaattaattactaaatatatacacactagtcgatcgaacacgtttctttatatgatttggctattaaataatacttttttctaaaataagctattttaaaaggataaaagtaaaaaattcttacttattttagtgaggtcaaggaaaataaaaaggttgtattaattgtattgtatgtcattaaaatgatgacatatgaggacataattaaacagtaaaaattgaccagtttttaaattcaggagagtgataatatggtaaaacaactctggtcccattctttttcttattatttatttgcattatttcattttggatatgaataaataataaaaaaaataatttgtggtataaatttttaattttaattattgtttataaataaatatttaaattttatttttaacggtaataatacataaattataattttgtaatttctgtaagtttataactattaaatgttaagtaaattgctactttaaatatactaataaaaaaaataacatgtggataataactagacatttaatgatcatatatttacggaattccaaaatataatataaatattattacaaataaaaattaaatttaattatttatttctaactataaattaaatttaaatatttatatcacaaattatctacataaaaactaataatcaatttatattttcaaaaggccaaacaaaacaaaaacaaaagaacaagaaaaacctcatatgatgttgaaagagatagataaacatatgcatcacctcactcccaccactgacaaagatttgggatgattatgattgtttttatttattttattcatttattaagtattattagagtaatataattatacctaaatttaatatacagtgacgtgacagttgctggtttagtctaattttttttatttcacaataatgatatgccaaaatattatatacttttaaaaaagtagatcctaatctatacaaatataattagtttattaattctctaacagaaaaaaatataattagtttaaaaaactgtgatgtatgtatgttttttttttttaataaagtattaatttatatttttttatgtaataatttttatttatatatattttaaatatttttatttaaaatgaaactctattttgaaaatagtgtccatgtaatgttcgaataagtgcaatatcattattctaatggatcatccacatttttatgtttgatgttaaaaaaaatctatttttaaattttcgtacttgatattttatattattgacaaatttttactgctgcaattgttctcttagcgcggaaggtgtgctcttgatcaatatcaatttgctcaatcaacaaagatgattctttattgtcatttcgtgataatgataaagttgttgagcattttaaactagaataaaatcaatgtcgatagtgcaattttaaccagtttagacgttatggtattggttgtacagcccgtgatcatgatgggaaagtggttgatgcttccaacaaatcttttaagggtcgggttcaacctgagatggcagaaatcattagcatcaaagaagctcttagttagatcgatagtttctcttgggattatgtggttcttgagacagacagtttagtttgtattcaagccatttttagttctctttccactccttttcaatttagtttta

SEQ ID NO: 45843 - DNA, 2173 bp, Cannabis sativa
  modified_base (803)..(807): a, c, t, g, unknown or other
tttttaataattttagtttaatttgttaagatatgtatttataaatataataaagtttgaaaatatttttttaggaataatttaagttttttatgtaaacttaatattttttttgttaatctaatattatatttttaaatgactttttttaatttgttttagatttaataaaaaatgataatttttgaaattaatttttttttttataaaaagaacaaaatttagtattaattaaagttcagatgataaaaatattaatatttaatggttaaagtaacagaatttaaagaatggacatgattatgtaattattatatttaaaattttttaataaatagtatattttaagagcagaatttggcagtgtctttttttttttaaaaaaaaaaataataagtagtgttaagagttcgtaattattctttttatgatggatgcccaaaactcaagtttggacagttttagattcaagttggcaaacttattttgacccacttaaattggtccaaataacatgaaaatttgtaattgtgatcattactattatttctagcgcttatctgcaaagtttcaaaaaaattcacaaaacatacgatttattatgacttctaaaaaaaacgtgatgctaaattagaaagactttaaaaataaggctgagaagcctgagatgcaaaatgatataaatttaaaaattaagttattaaatgttatttattaaaaaaatttaaaaaaaaaatagttaaatataataaattaactaataaaaatacatttatttcatattatttttttaaaaaatatannnnntaattaaattaagttatataatttttttatagtattgcatatttttatattgtaataaaaacaaataaatatattagatcattaaatatatataatagtatttaatatattgtattactgaaaattaatataccgtattaataaaattatataccacaagaaaattataacaatactaaactaatactcaaaaaatatataaatcatgctaacaaaattatataaactactattataccaaaaaaaaattatatataataaaataaaaactaaatatcattttaaataaatgatatattatagacaacaaaaactatataccatacaacaaaatatatacttacaataaaaaataaaataatataatataatattataaaaaaaattgcatataccatattaacaaaatcatatacaaccataaaataattatactatacttacaaaattatatatcacatttatatataataaaataaaatttaagcatacacgatataaaattaaatattagactatacaataaaatttatataccataacaaaaaatgtataccttacaatcgaaatatatataataacaacaaataaaaataaaaatacatagaatgctaataaaattataggttatgtctatggtaagcactttagttttgtccctataatagacatatttttatttaatctagtggtaataaattgatgaatagatataaatggttaataattattcataaaattatttttttaatgatattcttgaattaaataataattgtttaaataaattattaattatttctaacttcctccaattaattaataatcttttttatctttctctctctttcatttagaaaccccataccttcacaaatgcttttctatatgcttcgtaatcatgtttatggactttcccaaatcggttcacataataaaaatttagaattattcattttcatagtttgatttttgttaatgttattataagatgcccttcaatacccttttaacctttgaagggagaaattatcaaaaaaaaaaaaaaaaaaaacctttgaagggagcaagctagctgtaatggcatcctcatgcgatggtggagacaaatcgcgaagacagatccacaaccatcaagccaaccaagagaacagatgctaggcccgtagacctagtactcaaatctttctctgacgtctctttcatccaaacattgtgcaggtaacccttttgaattatttcctaatttgaactagtgtttcttttatatatgacatacaaaataaaaaaataaatatttcttattatataaataagattttgtttgcacactatataactgtttgattgcaattgcttgattatt

SEQ ID NO: 45844 - DNA, 900 bp, Cannabis sativa
  modified_base (44)..(54): a, c, t, g, unknown or other
ttttatcatttaacaaaacacagagtccaattggtaacttttgnnnnnnnnnnngtccaaaatggtatttactctttaaaatatacttttttttttactaatttttgaaaaatactaaaatattttttttaataaaagatcaaaaatatctttttcctagtttcctgaagaatcccgcgccacccagccgtatccatgcttgttctgattactaaaaattgctgcatcgatattgattttgatcgtgttactaactgattcaatctactcattccattctccattttttttaatgaaaacatataaaaatcaaaagatttattttgcgcacaatttcattgattaaaatttctcatcttttttaattttaaacaattttaaaaatcatgtataagttatagtggactcatacttatcatccctttgttaggtttcagtatttttgtcttgagaattttcgtcctattaaagatgaatcactaagacaagttaatcttctaaaaaattagcataaactcttccaaattatatatttatttatatgatgggatttgaagtttcactacacttcaaataatgctaataaaaatattcctacaactatactatataatttaagaaagagaaatgctaaaggataacagtagtacttagtactttcttatgtgtcattatcactattggtccaattaaatattagtacctatatattttgatataataacttttagaaaatatcactaaccaatcacaatgcgacatgtcaagaaggtgctaggcaccaatagcagtactctttaagaaagggaaatttgattttctatacttaaaaaaccttaatattttattcttaaaccaatacatttcaaactaagaaaaatatgacacttttatctaaaa

SEQ ID NO: 45845 - DNA, 1107 bp, Cannabis sativa
  modified_base (49)..(73): a, c, t, g, unknown or other
tttatttcattgttttagaaattcgtattaggatgttaatgaaacatannnnnnnnnnnnnnnnnnnnnnnnnaaaataatttccaacagttttcatctccttccttaattcaactaagcttggatttgtggtgtaggaaggagttcaaacctttgagcaattgcacatatttttgtcttgctgccatttcttcttcaatcaactcatggtttgatgggtcatcttccaatttcacttgggcctctagcaacccttttttggcttcatccgtcgcctcttgaatgtttgagaagctcctcctattcaactccttaaatgccactttaaatttcttcaatttcgaagtgtcttggaacatcttagaactgacaacctgctgcttcggaaaccccatttacaatctctttgtatcttggatgggaggtcaacatttaaaaatatttaaaaggcttcttcccttttaggattccatgaaacaaagtgactatagccggggtatggtctaataattcctctgctgcaaaaatagcttcagcagtagaaaaattatgtaaccaaagaggattggctaagacacgatctatcttcgaataaattctttcacttccttgccttttattgttccacgtaaaatagctgcctctatacttgatatcttctagttgacattgccccacacaatcaataaaatcggtggctgcattgtattttaccctcttcccaactctttcttctttggacaaaatgtcattaaaatcacccaaaaccatccaaggatcttgagtactcaattgatttagatctgcccacaacaacttcctcccttcaacttcattaaaagcataaacaaatgtaactagaaagccaaacttaccatataaagtagctacttgaaaatggataagctggctggtacatttgagaatgtttacccagaaactacagaaattccatgccactatgatttgacctccttcatggcatgctatgttcgaagtaaaacaccaccctttgaagatgttaacatataaggccccaagatttggggccttaattctcgtctcgaagagaccaaagagcctagctttatgaacatgtaacatgtt

SEQ ID NO: 45846 - DNA, 4246 bp, Cannabis sativa
  modified_base (557)..(562): a, c, t, g, unknown or other
  modified_base (991)..(997): a, c, t, g, unknown or other
ttggtcacgggactactgactgtgacatatttaagtctaaaaattaattagttttaattgtaataatttttgggtaatttctagaaaattcccacatatacacgtgagtgatgatgtatttcatttctttccaattttaaaagaatcaattaattgatgtaaatgtaccaaagtttggcttatatatatatgatctgtttttgaattgaatcattccaactttcttgtttaatatattggaaaatgtacaaattaaggcaaaacgattattgagagcatatatgatagcagggtttattgttaattaattaactgttaattatataattattttctccgactgtatctgaaaaatgttcatatatgtatatttatttatataatatgaaaactgagtattcaaatacggacctaattaataagttaaacataatattgacttaatatataatatataattcacaagaaacaaacaaccaaatatgttacgtaccttctgaattcgttttattaacttaattaaaatcagttatatcacataataataataataatannnnnnataataataataataataagaactatttgtttattttatttctaacgactataagacttagtctcatgataaacaaaattatattgtaatgttctgattgtatattaatttctttcaaaaaaagatgcaggtcttcaccctactattttggaattaagtaatttgatcacatagagagtagtttttttttgtctgcaaaatagtaagtttagaataatttataaaatcattcttaaaaaaaaaatttaaaaatatttctcacattattttgtgttaattttagtaaaaaaattctaatatgaatgaaagttcaggggtatgatttagtacatatcaaagtttgagggacatgattaggtaaatatcaaagtttaggaagcatatagtttagtacataaacaatcattgaaacagtaaaattgaataaannnnnnnaaaagtccttaaatctaataatctgaataaattttaacgataaaaaaagatcagaaacatgatttggtacattcaagagaaaaaaaatcttaattaaccattaattaatgctctattattattgataaaaccttaaagaagtgagcaatgagccaattacatatggtgtggtacgtattaataaggcccacttttgtacatgttgtgaaattgtcaaagtctagtggactttaattgtatacagagatagatagagatgaattcatagtgaatacccaccaactaattaaatgacatctcatttacttaattactgtgaaatgactttatcaatgtatccaataatgggactcaacaacacttcaaacttcaaagtgttcatccatgaagaaaactataattatattaattaatcagtaagatatagctaaacgtaaaatatcagtttgaagaaaatctttcgggtccgtttagaaagtcattctatgatttgatttatgcataattaatttaagctaatttatttgatgatataagtaattaagaaattttaattacatcttttaaattttgactcccataaaaatgatgtataattattaaaaaaaaaattattttaaatattatttaccaatataattactaactattttaatcaaacaaataattaattcctatgtaatacatataatattaattatttttaaatattattttaacatataaatttaaaaaaatctgataaaaataaaaaaaatatatatatataattttataaatatttagaacatatgtcactaaaattatatattaaatttatatatacaaaaactctaaacaaacccgtcgacatagttaatggatggatgtggacacacaaattattacacgttgcaaaatatttcaaactaattaattacattcatattgctatacatagcttacatattatgtatattgatcatttgttctggttgagggtagcggcggcagccatggaggctccaattccaggaggagtaggagtgatgttcagatcaggcttattccttatctcagcatcaattaccctttcagcatcttctctagtcacacatttatccctctctaccttctcactcgcatcctaataataatttataatcatcacaatattttcaccacacaaataactattaaaaaaaaaagaaatgttaaaggtaccggttgcttaacacccttctacatgtgaatatcgctattagtccaactaagtatatatcgaattccatataacttaatataatagcttttaaaagagtatcgttaactaatcgcaacgcgacatgtcgcgaaaatgctaaacaccactgttacctcataataatgctaaaaaaaaattaatacaagaaaagtctgcaattaatacactctttcaggggtacttcggtaaacaattcttatatgttttgctatttaggagttaagtctgtttttctttatgaatgtatacgtatgtggtatctatttaatattatttgtaaatttataataaattttttgaataatttacaaaatattaaaaaaatatattagcattttcctacatgtccacctatctatatatatataaattaattttaatattaattaccttaagaatatcagaaatagttgtcttatttgtggtttttgggttttgagtggcagcagactgagcaagagcaccaataccgccaggctgcgttaaattacgcccagttgctctcatctcggcggcttgtattgcggacgcatcactttggtcaacagttttgtcgcccattgagagtgcagccgcctcaagggcttcgcctatattaaccgagtccttatccaaaaccgctcctggtgttccgcttcccaccactgcctcactcaactccctcaccacctataaatataaataattaaaattaaaaaaattattttttattctcatgaattttgaaatgtattaaattatgccctgaacattttaagtcgaactagtgagattgttggatttaaagacttttgtctaatttcattcgattttactatttcagtaattgtttatgtactaaattgctaccaaactttgaaatctaccaaatcatgtccctcgattttaacatatactaaattatgacctctgaactttcatccgtgttaagtttttttactaaaataaaaaaatatattccttaaatccaaccatctgaatagtttaggagtatttttaaccaccttaaaagttcaaggggcataatttgctacatgtcaaattaaatttaggaatcaaaaattataattagcatttttgccacttgtaccaaattttattctcaaactctaaattattgaaattattaaattatttttatttaattctattcaagtaataattgttacacatacaaaatcacgttaaagacctttcattcagaaagaaaaactaaagaaaaaaaaactttgaattaaacaatcttcatactttgaaacaaaatttaacagtttaaaaaaatttaaaacatgtcaaaattaaagaaaaatatcttaacaattatattattacgaaaaaataatttgccataaatttaacgataaataaatatccaattaaaaacatttacgctaataatatattttttttctaaaaccgctaataatacttattatttggccaatataacacttaattattatttactgaaaatatatctaaaattggttagacataatatatatttaaatattggcaagaatacattataaaaaaaatatattttcactatttaaataataatatatagaatatagtaatatactaaataaattctagaatttaaaaaatatacatttaatgaaatagaaagtaaatatttttttattatatgaatattttacaataattattttttttcttttgaataattatttttaacgttttctaattaaaagtgttttctaattaaaaattttaaaagtgaaatatattttttaatttgaatattaatttaagtaatattatgtttaactatgtaagtattataaaatattaaatttttttttcaaatattataaattaatataattaatcacctgaccaccaatggcttcagtgacgacgcggctcccgtgaagagttttttgagagacggtgacgccctcctctctacccacgtttgatgcgttgttatggccactcaagccgagtcgctcatttagagcggcagccgactccatgac

SEQ ID NO: 45847 - DNA, 832 bp, Cannabis sativa
ggcataaaacccaacatgaagatgctttagagttatgtgggctatatgggaaaatcgaaataggaagtggaatcaactcccaatcatgaatgggattcagctgttaacttggatcttctctgcttatccgcactctaatcctcatggggatattgctttgaaacctgaggcaacccatcccacgataatgaaatagtggcagcctcctgaaaagggcagcatctgtgtgaactgcgatgctgctgtgcacgagaatctgattggagtgggcattgggttcatttggcgaaactgggaggggcaaatcatttcaacaggtatgatatatatgcccagtatgtgtacagttgagatggctgaagcttgggccatcctagaagctattaagagagcgccggctgctgcaacgggtcctattgagattcagtcagattgcagggaggttgtggatcagctcaagaaccacggacaatattacaatgctgtaagcaccattttgcatcagatcaaagaccagatggaagctttagagagtgtcaatattattcatgtaaaaagattcaataatgagtgtgctaatatgttagctaggaaaagtttagctgatagaaccactcaactctttgatcattcttttcccggttggttagccaatttttgtaaggctgacctccccttattgctataatcctggttttcttcaataaataaattttcctttcaaaaaaaaaaaaaaaatctttcataactattttaatggtgttacatcaaatgtaatttgtcaacaagggaaaataaaataattgttataaatattaataattatgtggat

SEQ ID NO: 45848 - DNA, 1169 bp, Cannabis sativa
taatttatgttatgcctactttatatagaattttaataaattgaataacaaatttaagagtgtttttattgagaaaacatttttttgctattgtaagaacaacaaatttacatatttatttttaaaaaggaaacattggtaaataaatttaacggaaaattcataagtagataagcattatacaagacgttctacttattatttattttttttgaaaaaaaaaaaacaaacaaattttgactattttatgtctgttttaatttatatgcgtgcaaattaattaattttttattttattttaatattataaattattcaaaaattacagaatacctactataatcataacgtaaattataatataaagtagagtaaatagtgacataagtacctaaagttttgaatttttaaacgctataaatttaatattttttagcgacataagtacacaatgtttgtaaaactataattttctttcaattccgttactacaaattttgttattctcttaaacagagcccatataaagcctagattctaaattatttggtccagataaaaatatatatgtattatcagttgcttccaaatcttcttaatcggaggaaaattataattttacaaatattggatacttatgcgtgccgctaacaaaaaaatcattaaatttatgtcgcttacaaaatcaaaactttaagtacttaataaatttttttcgtcaaaatgacaaccctacctaccttaaaagttttctaaatttatttatcaaaacatcaaattagttttggtaattttttttttggctatttaggtttttttttttccttaaacaatgatctatgtattattgtacccctaaacttttcagtcctttacaaatgttccctaaactattcacaatattgtaaactaatcattctgtcaagttttatcacacgtggcaaacaaataatgacatcgtcgtttagccaattgatatatcaacaccatatgtataatttaacattaaaaaaaataaaattttgtatttttaaaaaatcattaaactaaaaattaattaatgattataaaaattatgtaaaattaaattatttttttaaattaattacacacgtgacatggacatgacactcatgtggcaactcactaataatcagccatgttatcat

SEQ ID NO: 45849 - DNA, 1090 bp, Cannabis sativa
aaaaaaaaaaaaaagaacactgctattattattgaataaaatcaagaataacaacagagtagattggagaaagaatttcccccaaccatatacaattattatccaatcaaagaataaatcttgttaaaccatgagcgattttattagcatccctttttacacgagagactttaactctaagaaagaagaataacaaaagagaaatataatctattaaatcttggaagtgagatacacaacccaatgaagaagccttgttgattgcatttgccacaattaaggaatcagtttcaacatagtggatagccaattggttagcaaaagcccattgtaggtcgtaaataatggcattagcttccatttctttattagagtagcatccctttaatgattttgaaaaggcagcaatcacatctcctgcataatctcttacaactgctcccatatcaataatttttgtaaaaacctgatggcggtggaagccatttaattggaggtgaagtgttggagtctatcgttaatggtacagcagaggtagagcaactggtttgatcatttgaagctttcaaatttgtagcaggagctttagctttcttgtattggtcaatgtaagattcagcaaaaataaaatggtaggagctggtttgggtttggtgccataaatttcttttttctttctgtccatatactccacatgaggtaaagaattttttctagatcagaattattgtgagcctccgctaaatatgcatagatgtcatgtccattaaggttgccaatatttgggatacctacccaaaaatgagtaagtttccaaacagcctcagctctggtacatctaaacaaagaatgaccaatcgattcccaccttcccttgcataacgaacataaagattttgataacaatattgttgagatactgtccttagaataagaagctattgtatataagaaataaaattattatatatcatttatatatagatagatacaaaagtaaatatataaatggaataaaaaagaaatattagtacctaccactaggtgtgggcatccgatccaatccaacctttttttcctcatccgatcc

SEQ ID NO: 45850 - DNA, 712 bp, Cannabis sativa
tccaacaatcttaatagtttatgaggaattttcaagggctgaaaagttcaggaaacatgatttgtacatattaaatttcagaagacaaaaaattataattagaaagttcccttcattgcaatctcttattttcatgatatcattgtagatgtctctagcctttcgttctttttctctaatgtatatgttactcatgtcaaatgtacgactaacaaggctgctcgcgggttggttaaatttgcattaaaagtggataatgcttgtttttagttgaagaatatccctccacttatttattctattctttctaaattatattcacggaaattaattggtaattaattattattattgctgttttgcaaattcttctcttctctttttgatagaagctaatttgtgactcaaaagagacaagaggtaagagtacttgttaattaatgggtttacttaaaattaatgattaattactatttaatgaatattattagtgtatgatatactaaagtatgagagagaaagagatcaaaatctactactccatcatcaatcccatgtatatatttatgtataggaatatatgcatatatgagggttaaacatggggtagcaccatataagcatacataaatcctagtatttgtaggtttatatttttttttttatcaaagacatcctgcaaatcttcgaaaacgaaaaaatatacatcgga

SEQ ID NO: 45851 - DNA, 2291 bp, Cannabis sativa
ttgaaagattggagcattaagaacaaagtttctacagttacaatgagctctttttttgatgatgatgcatttgatttcatcaaagaacatggtttagaagataagaaactctcattgaatggtgacctgtttcgagtttattgttgcagtgactgtattagttcaatggttcagaatgcatttgaagaagtagaaggcattacaaacaagataagatgcctttataatccaaagtcagaacctttatggtacctcacaagctctaaactgaaagatgctattgagttatggtctatgggggagttctcttctgaaaatgtaacagattattctgatgtaccaactgttgaggaatggaatcgagttgaacaagtatgcaacattgtggagagcatttacaaagtggcttatgggatattccataaggaacttgtcactgctaatcacttcctttatcttcttaacgagattcgagcaattctggttccaatttccataaaacctgagagttttgaaagaggtatagctaagggaatgttggagcaccttgacaagtacttgaaagacatgttcttggtcttggcaatagctgcagtgctcgaccctcggtttaaaatgaagtatgtagagtttacttgctcacatgtatggggtagtagtgttagtaatggtactgatgatggtatttcaaaggctaagactttttcagatgccattcgcgacttgtttgatgattatgtgagtcggtactctaagactgttagctcgtcttcttcgagtttgatgcaaggatacaagcagttcatccaatctcagaaatgtgatacgaaatctgaattggagttgtacttggaacaaccaattatgccttggagtgatgattttagtgtcttaaattggtggaagaccttaagtattcagtaccctatactttctaagatggctcgtgatattttggctataccaatgtctcttactacctcatatgaagcgttttacactgaaccaaggcctgtgcagaaatatttacgtgtgaactcaaagatggcgaatgccttggtttgtactcgaagttggttcagaaaggattcaaccacgacgagtccttaactggcttgagtaaaattcctttcttttcatgatgctttttttgctctttaattgttagttactttctctactttatgtccaacaggtacttttggtgtctttttaagaacactagttagaaaagtatgttattattattattcagttatatttaattaatggttattgttttggtcacccctcaatacaactaaacaactaagttaaggatggaataatttgatgtgaaaccaaattgaagaaaagagttttctaacaagtacatggactaagaaacacattatcatattgtaggatatcattgaaaagtttgagaatttcatcaaaaactttagtaaatataacaggagactatccattatccattaatgctagttttgtaactcattttcctatcttttttgtagtgtatttttaaaataaaaactattaaagataaaaacaaaataaagactataaaagaaaatgtatgtgaacatatttattctttttatcatgtgggacattctaacatgaacttagataataatcttctttttttttttatgatagaatgattctcattaaatcaaacaacaccattacaacttaagctaacacaagctcagaattgggactccaaaattaggaatactaacaactgtttacaatattaacatgagcttatctttagtggatatttttttcttcctaaacaaccaaatctagcttttatgttcagctaaatcatttcactaacatgattaatagtataagaacaatgctaaaaaatataaagatttttgtttacccaaatgacatagaccatagcaactataacaataatcaataccatgttgcaagtcaaaccccaactttccaattcaaaccttccagtccgaataaacaatgggccaagttgtgaaacttcacccaaccatgaacctagcgcaaccgagcaatagagaaaggacagagaaaaaacaagtgatcatggctctcaacaaaaccattacaaacagacaacaaagagaagaaatggatagttgtaaccttagaagcttatctctggtcatcatctaaaagtttaccatctgccaaataatgaatctgtgtttgagaagcaagtctactccataccacatgagcataattaaccttctcaacatcaaagagagagttatagaacttattaagcctaa

SEQ ID NO: 45852 - DNA, 859 bp, Cannabis sativa
ccatggtggtcattactgtaaagaaactaaatcaaaatgcttaacaacatggccaaacgtttacactaagcttctacgcggagctcaactcacaataaaaaacaatcactgagtgcactactactcatttctccataacatgtttgattgatttccataagcaattgaaaactacaaaatgaacttgctgaagataatgaaaaatagtagtagtacctcgcgacgagagagctcggctttccaggcagcctcacgctcggcaacctcacgttcccgctcttcaatatagctttgcatctctctctctttcataattcggtcctgaatatctgcgtccagagcttccttcagctcctgaacgaatttatccaccaccgctttaatcctcaaagacattcccaaaccaacactccgatcccaaaataatctgaaattgtttcactaaatctaacaattcatgctccagattttgtggtttcgagctccgtagaccgattcttcttcactgcgctagaaaatcatgggttttggatgaacagagaatctctgttgagcgaggaagaagatggtgaagtagagaaacttgcgtttcagcttgaaactacgtcgttttgaatcgagtctagtttactgtagtcgtagctctgaggcgaataatgagaaaaattaatgaaagaatgaataaaaatatggaaaagaaaagagaatgagtgtagaagaggacaactcaatttgggtttagtggacttgggcttttctgtccccacctacggcccactctacacagatctcggcccacctcacgtaatctctcacttttccctttgctaaagaaaaggtgttttggaattattattgg

SEQ ID NO: 45853 - DNA, 1905 bp, Cannabis sativa
gatattgaataatctggattacatcgaaatagagttttatttagggcataaaacccaacaagttggtccaatatgacctctgaaggtgtcttgacgctaaatacgaaaagcccaaaggagagaaggcgaggccacgtgaaaatgaccttaagaatcacttaaatgataaggctcgtggatgcaaccttccaggtagtgatacaaagatattggaagaccaaattgttgcattgacaaaacttattcgaaagcaaagtatagccctcttagattcaaaggatgaggacctgaaaccgtgtgtcaggcggatcacggaagccccactacctaagataagaattttaaaatgccacagatcgagttgtatgatggttgtatagatcctaggactcacctgtcaaaatacaagaagatgataaaagtagcacgagcaagaaatgatgccaattgtatctatttttcattaacgctaactaagttttgcgaaagactagtggaaaaggttaactctcaaattaatccatagctagaaagaattataatctgctttttggaagcagtttattgcagtaagagactatgatatggaggtccatttactcaccaacatcaagcaataactaagtgaaagcctaaaaacctttattcaaaggatgacggaggtaacaactaagacaaaggttagcgatgacatgaagctcgtagcccttctatatggacttacaatattggctcctttttttgggggagaaaatgcaaagaaaaagggctgagactctgtccgagttcatggcaaagccacaaggtatcatcaatttagaagatgcctatctacaagcttttggagtcccttcgactccaaatctttccgcatctacacccagtttcaccctaaaagtaatgatttcaacacttacactttcgagaacccaatactctctagtcgtctatggaccttctgcttccaggcaagagccaacacaaacccatttctctgggcatggagcgacaaaaattagatgtagtagcgctcctaggcagtcgaagcaacaaattagaaccaaagtgaaactttgaaataaccaaggaagagtatgaatcaaaattttttgagtacactaacctaattgacactcgagagaatgtgacaaagcaacctgcaacatggtccactaccagagcaagagatgtgagtaccacggagatgaagggcacactaccaatgagtttgactacttgaaatatgagattgaatctctagtcatagtcagacacctaggccaatggatctaaatcccagttatttatcctgaatatggggtcattcataaacagttgcgcgtcctatgatagtatgggattgtaaatcctctacaaggagtaggttaccctcaagcttctagaacacagcttctatccctgcttgctctgctagctcacgttacactcccaattttggctccaagaccagggagcccctatctaccaggtttggctctactgcctatcaatggtcaccatctttgggggaccacatattgtaggaaggacccgcaattcctatagtagatatttgaaggatttagaaggtgaaggggagatgtgcgctctagtgtagtcgcgagcacaacgtcaaaagatgacaaactatccaattactttcacggaggaagacattaggcatgtacatttccccataataaccttttagtcattgaggctcagatttccaacaagagagtttcatgagtgctcatggacaatgggagttctgttaacatcttgttcaaattctcattctaggtaatcgagctgttggggaagatctagcttctagtcacgttaataggggagaacaacatttgtaccttcaagcactgcacttttatggttgtggattgtccc

SEQ ID NO: 45854 - DNA, 1384 bp, Cannabis sativa
attgttctttcccctgggaatattttttaagcaattataccacagagaggaagtttaatttaatttaattaatatgagaagtactattcttaatacatatgcatgatgcatgtggatgatgatgagtatgcatgtatttcatgatgaaatagtaacatatatagaaataaaggtgaggatagaaaattagaggtggtattatcatcagttgccatcaaccccttaactcgataaaagtgatatatatatatatgatgacatgggtgcgttggttttggggaggtgtacacacatgacatgcacatataactgtactaataatataaggacaaacaaagctatagccattagccatgcacctaaataatgcagctgacggcgttttctctctttaattttaattttgcatatccataaataaataatgtataagaaagcaagagctacattactcaatgtacataggacccctccgccactatacattccacgttgagctatatcaactttatcaaaattatgtgatgatatgcacatgactacttttgttttataataattaataattaatttatattattttttatttttcggccaaatgataagaggcactttaaaaattgagaattacgaaatttggtgatggaaaaatttgtttaataataagacaattttgaaccattttattgtggagaagattaatatgtgataaaactgtctcagaaaatgagataggatttaatattcgaaaaagaaaatacacaattcatcatttaaatatgaacactcttgtttactgatcattaatgttaaaacttaagaaggagagacttgattttgaagactttattacaagatttagcataatttagtctgaaaaaatcaaagatagtttgtaataaattacgatgcatgactgtgcaatattaataactggagggaaaaaaaaatagctatatgagctaaatttattatcaaaaggatatatctctaaatttaagaggcaaaaagaatttgttttcaatggtatactactattgagtattgttattgggtatcagtggtgcctagtacctttaagatttgttgccttacgattggctaacgatactccctaaaagttattatatcaaactatatgggacccgatactaaattataccaatagcgatattgacacgtaggagggtgcttggcactactggtgccttttagcatttctcattactattataacttaagaaccaatttatcaacagcccactatagagtgatgcgaccttaggattggaaatgtatattaattagaagagaaatgctatcattagcattactggtgctcattaacaatactctagtttctaactaaaattaacgtgtctta

SEQ ID NO: 45855 - DNA, 1195 bp, Cannabis sativa
cagtgtttttcattcatggctttttctcaaaattacctaggtttcattatagcttttgttacaaattattttgtgttggttacatttgctggtaacttcaaccaagattttgatataacttggggagatggtcgtggtaaaataatcaacaatggtgagattctttctctttcattggacaaagcctcaggctctggatttcaatctaagagccaatatttgtttgggaaaatcgatatgcaaatcaaacttgttcctaataattctgctggtactgttaccgcttactatgtaagttaataattcatatattattattattacatgcaaatacatgcatatatatatgtatatgaataataacatcttgattgttatattatttttgtatgtatagttgagatcagaaggttcgagttgggatgaaatagattttgagttctttggggaatgtgagtggtgagccttatattgtacacacacaaatatttttagccaaggcaaaggcaatagagagcaacagttttatgtttggtttgatccaactgctcatttccacacttactctattctttggaaccctcaacatattgtgtaagtatatatttatatatatacataatatttatatttatgtacataatatatatgtacatactattttcttttacataatatttatatatatactattttctttttatttttaaatgctaatatttattaactccaataatattgtgaattttgcattataatcaggatatcctttttaggatagggcggctggcctttgctcaaagccccttttgttgatctcttttcttaagattttttttttaacattagtctaaaaatatttttattaaaaatacggtttaaaaatttaattgaatttcattttatatctcaaataaaatatatattattaaaatttaactatagaccctataaaagttaaagatggcactaaaagcaccttataataaaaataatattgttattaggtactgtgtaacacaacaaaagtgatatatattatattttgtaaagaagtttgccaattaataatgatgaaaaatgttcacatttttgtttctgtacaagcttatttattatataagacatcatcataatattggagtcaaatatatacatataaataatttgtatccactcataatgcatgcatgca

SEQ ID NO: 45856 - DNA, 1009 bp, Cannabis sativa
ttcacctatggaaatcaaagcaaatttatgaccatatttcatcaactcatgcccaacttatggtacaaaatatatatatatatatatttaagctcaaacaacaaaccaaaccttactaagaatcatgagaccaaaacacaactgtcaaaccattcatactaggatgacaactctgaaaactctccaccaattgcaattcacattcaacatcttataattatctcttaaaacacaaataattaatagccaaaatcatagaggaaattcaagataaacaaataacgattcacaatccaatgagctacttctcaataacaatacaattcctaaattcttattatggcccattgaaaagttaaagactctgctatatgaagtccttactgtatgtggtttctcattttttttctctctttaaatctgtctgtcttttctttcagctttgattaattgtcataatcaatgtttcaaggaattaaatagaattagacaacaacagcatttttaaaaaaaaaaaaaattgctggaacaagataatgatgttaaactctactgtatacaaattatcccatggtaagagaaagaaaacagaaaggaaaaaaaataaagttacatatattgatcaattactcgatcataagaatcatgagttgagctcttccacttccattattcacattacttattatatatattcaagttaaagaacttcaaaactcaacaataacatccaaaacatttcgaaaggaaaaagaaaaaagaaaaattaacgcacaaaatgagacttaagagattagattttggaggtgagaatcaaagcgagtttgaaacaatacttaccagaattgaagagaggctagggcagaattggagccgagagaaaagagagagagagcggagtgaatgggcagtcggactgtgacggcgttttggggtttaggcgtgtcgagttttggggttaaaatggagagagggagatgaacagaggaggaggacgatgacatttcag

SEQ ID NO: 45857 - DNA, 1094 bp, Cannabis sativa
tacattaaatactttttggcattactgccgtgtgagatagctaataaacaaagagtgtttttcatcttctgttaccaacacaacaaacccaaaacatccccaaatcaaaactaagatgtcaaggatcaaacctagaatcactctatcataaaatgacatccttttaatctaaacatcaattaattcaccataaatagaacagaattaaacatgaacaatatcaagaaatatccacaaacttgagaggaggtgtctacctcctttgccgaacacttggaaactttctactccttgtttcttctagatttctatagaaaaatcacaaggattctaagcattgatcccatagccaaaattactaggaaagaattgtgaaaatgtaaggaacttaatatttatccagaaattttgcttgatggtgtggacaaggttataattagtctccaaacaatgtaccaaactatagtctaaaactaattatgattttatgtgactcaaaacatataagataatacttgataattctccaaaattatattccaacatataccatatgctaatataatttatttagactttagtgcataattatctaaattaatgcatcaaaactataagtgaccccaaacacaaaacatcatgcttctcttccttctttaatttagataattaatttagataatgatttcttgcataaacttctgcagacactaagttgtgtttttgacttttggctcttggatcaatttttttgaatttttagtggctccttttttttaggctctatttcgatcggtttatttttcgttggggttggatagtcattagagattttttttttattattttgctctgataccatgttagaatttggggataaggtgaatgaggttccatctcaaaactaattggcaatgagaggagtagcccatgcatcttatatatggtatttagtttcaacgtacattatcaatgcgagaatctctaacatttccacttaagatggtggctattttttttgctcaccaatcttgtacgatttgatcacaagtggctcttttagctcacagtggctctttttggcttactatccc

SEQ ID NO: 45858 - DNA, 1082 bp, Cannabis sativa
ggcaattttgggaaatcactactgggacactgacattttctcatttcccctttttggaccattaatttgtaccaatatttaataaatatatatacttgacaagccatagttgaatatgttgtctaaataaataaaaatcataccctttctttatctaaaggcttcttcttatggttatggccataattattagggaaatttaaagggtaaatatataagttttatgttgagtagtaaataagtatttaaattgtatttttagcagaaaaatacattttattattagtgtagaacttccgtaaatatctggtcgttaaatcgattcctacatggtaaggaaactcatgctaggttcatgtcatttaatttttattcttattatttcaaaattcattaaaataaaaaatttacctaaaaattatttaaaacaataaaaaagttaaaaaaaaaacattaatgttaaaataacttaattagaaaaaaaagagagaaagccctaattcctctctatctttccccactcttcccttcccttacgctctttcttcctcgtactctctctcttcctttatctttcttctcaggcaagccacaactattctctatcgtcggcaagtagtagcctcaaactctcggcttcgacagtcccaacaggctcgagttccctctactcaacttcttgctccaccagtttcaatggtggtttcacgggctcgagttctctcactaggttcaatggtggaccaccaagctattccttgctccatcgtcagccatgaagggtgtgtagctggttcgaaaacctaaaccccgtatttcgagttccttctactcagtttctccctctcttgtctccttgccaaatttaatggcaaaatcgtcgtccccaagctcctcttgcgagaagatgaaatctatggcggaagaggtcagatctagatgagtttggttaaaatgaatgtccacagaagaaagagaagattatagaggtatagggtgcttgattttgtttttctttggccattttttcttctataaatagaatattgaacaatgataaaaattagcagtgttcattaaac

SEQ ID NO: 45859 - DNA, 1561 bp, Cannabis sativa
gttaagaaatccaacactatctcgcgagtcaattatgatgcccaaaacttcaaaatttcaatgagggtgaaaaatacacttagatctatcttgagaatatctttaattaattttacacttgaatcacatcatttcgataaaaattgagaaagttatgaccaatttacttagcagtatgcattgcacaaaagtgactgcgagaatagactaactttgcctagaacttggtttctggggatttaggcatattttcagatgtttgaatgttgtgatagatatccttagttcattctttgaccttgggtaagttttcttggcaattttacttgatatgcatggctgattcacgatgaatcactaatgatgactaggtaggtgtgatcactagtgttattctaatacttgcactacgacgtgacatttgtctaggtaactatacacgtgtagccaatctcataacctgggcgaatgattctacttccaacaggccatgtagactgttatgaagcttaaagtcatacatagatggtagaatgtctgaacaaactcacatttagacatttgaccagctctattaggtggatagctcgcatgcaccgaccagagagtgcgagttagcaatttcatagatataactcattatttccaagcttgcatataacggtacaatccctacattggtggaattaattcatatcttcagagaataaaggcaatcaacctagattttctaatttatttattgtaattatgggaataagctatttcttattttatttatcattgattaagggaaactattttcaagtaattaatccttataaatagtggtctcatctcactattcagggatacgaaattattcagagaaaaaacactcaagagtgaagtcacgatctatgagtaaatcactcagagatcattgtaaaatctttcgagagagaataattcattcttgctcacaagttaatacaacaaaatagagagtaagctattaccaatcataagggaccaaacatctataacatctagtatttttttttttactttatgctctttgctttctgttatttaattatttcattgctttaattaagactcctggtcattagctaaaagcaagatcaacaactagtgcacatggtgtccgttgacttttgggtgacacatgtaaatgagaccttgacatgtggaagcatccaaatcttattttggaggcaaaataagaccgatgtcaggagcaaaattgttgtatgaaggacagaacactgagccctaggccaatgtcaacctcgacatcgaatgtgcttgcacattggcgcaatgggttgtttgggggctgagtcactaataaatagatattttctcctaattccaagtctcgtatcttggttttggagaaaaaatagacaagttctcaaaactaaattgcaatcagattgacagaaccaccaatggggtggctatgtcaaccttgggacccattgattaaggtgctatcaccttgggtgcccagctttacatctggggcctagatggctttgttttcttcctgaaagca

SEQ ID NO: 45860 - DNA, 2184 bp, Cannabis sativa
  modified_base (1484)..(1485): a, c, t, g, unknown or other
  modified_base (1848)..(1848): a, c, t, g, unknown or other
agagctgggaattattttatgttatacctggttttagatatgttgagaaagattttgaagatgctacttgaagattaagatatgccaacttcaatcctaatacaggtgattgaagttgtgatttctagtttgctgctatcttttaatgttattttattggtttccatttattctgattggattacaggttaatggctcagaaagcattgacgaagaagaccaggcatcgcaagtatcgcgatttctggagggttacagggaagggagaacaatagagacaagaattagcggtccatcaatgcttggcttcataaattcactattcagcggcagcaatgctgtgtacctagtatttttcgtggttgcaactatttttgtaatacaaagcatcagaggagatgaagaacctcccagggtcagcactcgagacgaagtgaatcaatctagcactagcagttttgtccctgaaactgaaagtagtgaatctagatcaggacaaaaggaagactaaataaataaatactcttctagttcataattttatcataaatttcttaattatagattatgctttggattaggagctttttacagtgtaattatttgtttgagacaagtgactgcataatgcttttttattcatgtttttcactgaaaacttacaacaaaatcattcaaagtttcaattttaatttaagtaatacttttgtatatttacgtatatttttacacaaaatagtatatatgtagttgaatatattcagattactataataatatataatgtgtaaaatatatttagaaaaaagttttaaaatagaaaaaaattaagtgtaggtatattgtattaaataattagttgttttaatttagtttaggtaaaattataaattgttattaataaaactatataattgcataaatttaggtaaaaaaaatatttttgtattagtttagtatagttagggaaacaatttaaatttttttggattgttaatttgaattatatttaggtattagtgtgatgttgttggagtaagcttttaatttaatatttgaaaaaatttataggtttcgagttttttgtgttgatttttacggtggacaattgtagctatctttattggagaaatgtataatctttaaaattttaaaattatttatttagtggagtttgaatatgttagatattcatccgtagtgaagtaggctctacgattaattgtgctgcagtcggatgggtggaatatgcatgttagaagagtttgaatatcttaaatattcagccgtagtgaagtaggttctgtgaatacatgtattgcggtcggatgggtggataattatgtattgttaatgctattttgttattattgtattgttttatgtgtttattagtttttttttcatgtttttaattttcgagaatgtccgattacagttgttatgctgctgaaattttactagaattaggataaatttcactnnaatgcataaaattcaataaaatatatatgtgttggtaattaatataactgattatttactacatatatttaaacaaataattgaataaattttttttttagaagtttcgaaatggatagagattggatgagtgcgaaaaagattatcagtggagtatagtgaaggtgttgaccatttcttgggcttttgtcagaagtatgccaaaactcctaatttggttctttgaccttgtcttaaatgtggtaatatggagcgtgtggacattactaggataaaggagcaaatatttaggaacaaaatagacaatacttataaggtttgggtttaccacggggaaaagaatagagtttcgggcgagggaangtctaagtccaacaaggttaagggtgttaatttggactatgaggatgatcacattccagaaatgattagagatacacaatttgaattaaatgtcgatcctttgaaatttcaaagttttgtagaggatgtcgagaagcccatttaccctaactataatagttttactaagttgtcgacacttattagattatacaatataaaaggcaaacacaggtggagtgataagagttgtatggatttactagctttcttagtagagttattgccggaaggtaatgtggtgccttcgtctttctatgaggcgaagaagatactttcttccttaggcatgcaata

SEQ ID NO: 45861 - DNA, 3136 bp, Cannabis sativa
atgcatgttagcatggtttgccgtagcgacagatgagtgtgccagcattgcgagtgagtctcgtgacaaaggtgccaggcttgtacttaatcatatcatgccttgagaactgttttttattgaaacgacttcctgactcaacaaagaatgccccattcatcattaggtctccctgagatttccattgccattgcttccattcactcccttctgcgtactccctcttcgtcacctaataattaatatatatcaccaaattaacatcaaaaaatgttcccaaacctttaaaatatgtcatgattgtttagaaatattaatcatcaaatacctcttttgcattcaaattaggaggagcaatgaacctatttccctggctgatgatagtagggtgttggctacctccaatggcgtacatgagccagtgagtgtagtcattgttgaccacatggaagaatccccatctgcaccttggcattctttgcaccaatccttgtccaaaatgattgaaagcaaccgtcacttgcatcatctggtcagccgagtaactatcactcgcaccgaacaacatcacctgtatataataatcaatcaaatcaaatcaacatgaccaaaacttataattattaattagtaccaacaatttaatattaatatcatattgagtttcacatatatacatatatatatatatatattaatttagtagatatatataacctcgttgtgatgggtgaagtggcagttggagatggtaatggcagtggaacccatgatggcatcgatgaggccatcttgacagttagacatagagacgtgatcaatccaaatatttgtagagccaaagatggagataccatcaccatcactctttgtcctaaaaccaacgtggtccgaagagtccctgatgtttccaccaccacttgaaacgatatcgtgtatgtgaagattatggatgataacgttcttgacgaactggatagtaatgccagcaccgaaggcaatgcgaacattggctcctcgagcgtcgatggtcttatcactagtgatgatgagctcttcgttgagcctgataatcatgctacgagcgaagatgatccaaaggggttttttccgagtgactgcatggcggagtgtgccgggtaaggggtcaacgaggttgttgtctgaagggtccgtgactatgtagtaggaaccgttcttaccacccactgtgttgcggccaaagccaaggacacagtcggctaacttcttacggttactcgcccagttggggtcacatctccaacatctgtctattgggtttgtggctctgcatggacctgtcttcctgttccttctgcctctcaattctcttcttctgctgctgttcgacgacttcgttagagccctgcattgcgtacatatatataaaacaaaacagaatatatgctaattaattaaggcccaatccatttgatattattaattagagactttacattgatgtttataatattatatatagactattttattacttatggccaattaattagtttggatggatagcatggacccatggcttttaccgtaaacagcacgtttatctttgtatatgaataattaacagcaacataacaatatgcatgcatgatgggatcatgagttaaaaaaaaatcatataaatatatatatgtgtgtataaagggcgcggtgggggaactcactgctcgacatgggagttcaattgttcagttacttcctctggatttgaagtgtaagcttcaatggcgtatttctgggattcctcagctctatttttccaataatcgtcgtactcggggatttttgattgaaccaatattgtagcaaaagttaagaaaaagaacaacacatagaatttagttgtgttaaccatgttgttgttgttgttttaatataaatatatttatatagaaattaatggcccccctcgatctggtgaatgaggttgaagaagactattaattagatcgctgtagatatggattttgaataatccgcgagcgagacctagcaaaccccagttcgatccaacaggttattataaaaataacctgattaggatcacttatatatggcagaaactgcatgcatatatatatatggatcaatgtttattactggggaggtctttaatggtaaggacaaggctttgtttatataataatttcaggacaaattaaactccatcaacgtatcatgcatggccaatacgtacaaatcgttgggctggagatgtgtgaggcagagaaagtggtcagccacttttagacacacaacgtacggttataatttgctttcaaaaacaaactagtctatgtttagatattatgtatatatatatgctttgaaatagcactctacaatatatttttaattattaccatattaattcattacatcacttcgtagtactatggattcaaatcttctgtccggattcctatctcattttctgtcccaaccaattacattttgccacttaactaaagttttaccaatatatttaacagattttgtatcaagtagctccgtttgttgatttttatttatttaatttttttaattaaaataatatcatcattctctctatcctttctctcatcatctctttctttttttttatctaatctacgatattctcatttgttttaatctttatttctttttcttgttcaatatcttgctttattgaaggtgtttaattttttttttttgataaatcaaaactgtgtattgcatcaaacaatcattttcaatctatacaacacctctaaaaaaaagtctggtgtgcaatttaaattttgtagttttttgggtttgcattagtttgtctctgttttttttttcttttttccttttttttttttttgtaacaaatctcaactaccatttgcatgtatagttgttctcaaattgtttagaagagtttggggttttttttttctagaatgaattgattttttacaaattcactctttttaatttggttggtttagttaaatttttagtagataaattatgttaaacgtcataattctaattatcatgtaatagaggagatatgtttcattgattgattactaatttcttttataaaatgctagtagtaatg

SEQ ID NO: 45862 - DNA, 933 bp, Cannabis sativa
ttttatggtcatgttagtgcttatgggctttcattgaagttttggatctatattatgcctagaaattatttttcaaaataaccatttatcacgttacaatttgaatgagatgtaatttttagaatgacacaaaataagaaaatcgattaccaaactaactatttatttttcttctcaaagtaccaaacttgctatttatgtgagattatttttgtttgaaaaagtatataaacctagattctcatggaaaaattgaaataataataaaaaaaatatccaaaatcggtttcaaaattcaaaattgttatttgctaaaacgaggatctgtcatacaattcaagcaattattgatgatttacttagaaaaaattagtgattttgagagctagctagatagaaaggcttcagagagagaaaaaaaattggatggtgaattagagaaaagctacaagaaagtaaaaatagatgtgggctttggaaagctatattataagaattaggggtttttctctatttatgagaaaatgtagtacagtttattttttttagtataaataaataataaaaaaaatatgagatttaaaaataattaaagtttaaaatatgaggaaaagtaataaataaatttaataaaacttgtaataataaggttcaccgagaaagttatcggcgctagaaaagttgtcggtgccggaaaagttagtgttaccagaaaaattgccggaaaagtcactgtcgccggataaagtcactgaaaaagtcactagaattaaatgtctcgtatataaacaaaaaatagaataacataatgaataaaaacaaatcattcaaaccaattataattgaaatataaccgttctgtaacataatgaataaaaaataaataacacaaaacaaatcaaattagttataattaaaatttaaaatagaatt

SEQ ID NO: 45863 - DNA, 870 bp, Cannabis sativa
  modified_base (428)..(454): a, c, t, g, unknown or other
caatgatccacttttcactgccatgatccaattcctccatgattatattgccgttttcttaccatttaatcttggattgacttctctatataatttgtattaaaacaacggaagaatgcatccttttcaacatcgaaaaaaaattctttcttacgatttttctcagagtaaaatttagggtgtaatcgagcgatatagttcgatgcaaaacatatcgtacacagaggttattttatcatgtggacgtcgtggttgctagactatcgtgtacacttcgggcaagccgcgaaacgtcttaaagaaagtgacattgtctgcgactcaactagaatcttttatcggtaattcgttccagttttattattttaaattcggtaaaacaattttaagacgtttaatctgctatggctgctaccgatgaattttcnnnnnnnnnnnnnnnnnnnnnnnnnnngcctttccgttttgagggattacactttaagcgatggattggatttatttccatcacttgaagtgtaatcactcaaaacgaaaagaggcttgttaatatcgttagaagatgaaccagaaaattcatcggtaacagccatagcagatataaacgtcttaaaattgttttaccgaatttaaaataataaaattcgaacgaattaccgatagaagatcctggctgagttgcggacaatattgctttctttaagacgcttcgagactctgtctgaagtgtgcacgacagtctagcaaccacgacgtcctcaggataaaacaacctctgtatacgatatgttatgtaccgaattatgtcgctcgattacatcctaaattttgctctgagaaaaattgtaagaaagattttttttttttttt

SEQ ID NO: 45864 - DNA, 2737 bp, Cannabis sativa
atttataggatgttggattagatcggttctatccaatagatgttggattagattggttatatccattagatgtatttcatgttgtttacctagaaactgatcccagtgatatggacatcaatgttttgacatgtgacaagaaagaaaatatcccggagttgagtaatcccgagtcatagcagttgacctgggagggttccctagccctacgcctaggttgacattagagaactccgaaatggatattccaagttgtttccaactcaccatcgtttaaaatttagaaccaagaagacaagaagaatacaagtcccagacttggaaaactgaaaaagagataaaacaatatttcggaagtcaactcgggcacctaggatttcacctaactcccaagttgacattccaactaggattttaatttttgggtttgtcttagtgcaaatggcttaaactttatactttgacatgaataagacctgtcacgaacatacttgaggtaccaaaatcagaatcagagcactttctattttgagcacctaaggcactaggcgcctaaggcacctagtgcacccaacacccaggttgacatattgtcaacttgggagcactttcaaccataatattgaagaattatcccgagcattttctttgtttccatccaaaacgaagaatcaaactacttttgggaaagaaatggattgacttggaggccaaaactaggacccaactcccaggttgacttgggcattgggcctaacgcctgggttgacactttgtcaatctgggccatttccaatagtagttcagaagaagtcttctggacatgctctccgttttagtgattaagatttgggtgctttagtgaaacaaacagagtcatttgggagccaaaactatgaccgaacacccaagttgacctaggcactgggcccaacgccaatgtcaacttgggcgctgggcccaacgccgaagttgacctttgagctgggcccagcgtctaggttaatcttttttcaacctgagctatttccaatcaacttttttgagaagtttttcggtcatattctccgttttcacaaataactaaaaaaaagggctaagtgatatcaacatatcacttaggcatcaaaaaatacaagtttgggacattttttgcacttacctagcgtccaggttgatgtcaagatgtcaacctaggcgttggattgtcaacctaggcgttgggtgctaaatatccttcagtaaaacagacataactctctcaatattgattagattgacatgattcaacttaagttttaaaactctttcaatgatcttccaagtcatgtctcacacatatcacaattttgaagattttgagtccaaaatttgtgcccaagacaagtaagattttttccacaaattatctgaaaacgatccaacggacgaaaattaagctctgaaaattgacaattttcatcaatagtcaattttcaccattagatcatcatcaattgccaagatcagcccaaagtgtatttttgttttcatagttttgtattattttattagtattttaataggatataaaaggagagctcctctagtttattttacacattcttctaagtctccataaggtcagagcatctctatctactttctttctttagaagttagagttcttgtcatagctagtttttctataatttttgtaagtaataaaaagtcgaagtagacgtagctcaattacggtcgcaacacaaggagtgaagtactataaatttcatgagtccctctagttacttactttaaataatacaaaactaatatattggttcagatttatccaatattttagacctagtatttttttagatcggattggatcgatctaatattttaagatccaatatttattggattggactggatctattcaatctaaaaaaatattaattttaattttcatatatatatttagtataacaacatcaaatataattactcatctaaataaaataaaaataataattagttcaaatagatattcgatgtattgaatttttagaaatcgtatccaatatctaatttaatcaaattagatattcaaaaataatatctaattcaattcaattacaataggatatttaatatttgataatcggctataattgaatctgtcagttgaaattagattaaattaatatatgcactaataattttatatgattttagtgaaaaatttatgtttgtggattttcttgttaattatattttgagagtaatcttaattttttctctaaaacataatctcaatattttaaaatattctcttaaatttatctcctcttaattactaaagtcgtctaacaactaataaaaaccattatacatttcctaaaatagtataatataatatattatgatataaatagtagagaagagtatttcgaaaagaaaaaggagagagaaagggtgtcctatagtaagattcatgattgtaattagtgagcaaaaaacaaaaaagaagataaattattgttcttttttatttagtttaatgttaattaaaggtacgtggtacaagacagaatggtgatgatgtggaccgtgagatgcagaacacatgaggatgatcatgatgatggtcactgttgtattatgttatcgatttgtcgggattaaggttagcagcaatcatgtcattgcaccctacaatatggacaaacacactgcttcttccaattccaaa

SEQ ID NO: 45865 - DNA, 1958 bp, Cannabis sativa
agcaaaaaatcaattagcatcggtgcacttattttttgcttcggttatgaaccgaagtaaagcccttttttttttttgcttcagttcataactgaagcaaaaaaacatttagcgtcggttcaaaattgaagcaaaaaaaatcaatatttgcatctacggaaataatgttggttacacaaaccaaagcaaaattgtttatgtgtcactttaaaaccgagacaaaaggccatttttgtagtagtgagacctcgacaattcgagaattgaagtccctgatcagatcgcgctctcttaattttgtcttcctgaccgaactaaaagttgatgacactcctctggtatatacacttaaatctctccacttttattttaatatttatgtgccgcctatgggtgttgttggaggtattactttgacttggaagaatggctttagttttgagtgtatttcttgttctggtaatcataattctggccttgtttactcggacccccttcccatccttgacttctctcttgtgtgtatggccctccttatattcatgctaagaaaaatttttggactgaatttatgaaaattggggataagtttgatggaccttggttgaatctgggagatacaaattttgtgcttagtgattcagaacgtgaagggtccacgggaagggaccaatttatccccttcatctctaatctggttgattctcgaggtcttattagtttgcctattcagggtgataagatgacgtgggataaccactgttctgggaggaaccatgttaaatctgctctcgacaaaggtttagttaatggagcatggctcagtttatttccaagagctgctctttgctcttcctcccagacgagtaactctgatcatatacctctttgtcttcttactggtaatttgaatgctagattgacaagatgttttaagtttgaagagggatggacgcgggatgagagaagtaagttggtggttgatcatgcctagaattcaattaatcactcttaggctcccgcccgcgcttataagaaattaagagcaactcgggttgctcttcttcattggaatagaactcaatatggtaaacttgacacgatcataaaagagctagagcaaaagcttaattttttgcagagtttaccagcaggatcccgtgattgggatactaaatgtgagatctgtcactctttgaatgaatccctaaaaagaaaagctttatactggaaacaaagggctaggatttcttggctcaaggaaggggataaatgttctaagttcttttttctctcgactactataagaggaaggagaaatgccattgagaatatcttgaataaagatgatgtctggatctctaaccgagagttgattggtcatgagttcgttgatttctttaaaggaatttttactaggttcgatgatggtcaagctcttaattgcagatagtttttttatgaaagaatctcgttacaagaccaggaggagttactcaagttccctactcatgatgaaattagaagagctctctttgccatgggtaaccataaggctcctagttctgatggaatgtcggttctcttccttaagcattattggagatctacgggagatgatttttgtgaagcatcttgtgacttttttcgtgactggtaatatgcataagggcatcaatgctacgaatatagttctcatccctaaggtccagaactcgaaaaagaaccaatcattttaggcccatttctctttacaatgtgatgtacaaggttatttctaaaatcattgcaaatagaatcaaacctatcttaccttctctcatttgcccaactcaagttgctttcgtgccaaggaggaatattcaagataacaatgtgattgtgcaatagattatccactcgttcaacatgaagaaaggcaaagagggtttctttgccataaaaattgacatggttaa

SEQ ID NO: 45866 - DNA, 770 bp, Cannabis sativa
tatgttgtgactaaaaagttgtgactaaaagtagttgtatatatatatataaatatatacgaccgtatactaatatcatatgttttatccaacataagtactttatatttgttgtgaacaagttcatgagggctccatgctgtcatgatgtaacccactttcttttgtgtatgcacaaattaataagatggaggaggaattctcaaggacactgcgacaaattgactccaccaccctttcatcaaaccaaccgaacaccacatttgaagctttttgcacaacccattatagtcggcttagcaacgtttgtaacaccccaccaaatccaaagtttcaaataatgttgatcaaacatctaacgtttgtatctcaaaatacacaaatatcctatatatgtagtttctttggtttgaattattgataatgtattccccactagcttatttatttatttttttcaatgtacttgccatgtggtcatatattctattcacattcatctgtccgaacaatttcctgtcattgtcttttttctagcagattttatcaaatacagttacaactttttgatacttagttttaggaggcaatggttagtagtactacacaaaccaataatataagtctaacaaagttgttagtattgaaattttatgcactaaataaaactcaattttcaaatatgaatctttatttgttatcaatagaagaataaaattttttaatttaacatgttattttcatgattatagtttaatatacaatttaat

SEQ ID NO: 45867 - DNA, 796 bp, Cannabis sativa
tttttttaaatattgcacttctatacccattttaatgaaaaatattaaaattgtttaaaatgttaattttgtacctaataaatgcacacttttgacatatttacacaaaacaaaatttgtgtaaaagtgtaacaatttgaaaatattaactatcaagcatatttaccatttaaaggtaaaaatattatgtattttgagtgcaattactcttattgtgtttggatcgataccgatcaactccgttccagaaaacttattgtgtaatgaccatgaggtctagttttatttaatatatttatacgcttatctttaaaaaaaaatactttttttttatgaaacttttttaatgtatttttttttaatttcaattaatttttttatattgcagccatgagcaagataagaggatcatccaagagaaaatcagcaacaaaaagttgaacaaaatgatggtagattttgagaagtagagagtgatgtacaattgtttataatcccattcttttggttccctagctaaactaagattattatttattaccaagtggatgagattttttgttgtagatctttaatttttttaaaaaaaattattagggagaatcagattagtaaccctcttacttctaattactatattttaaaattagaatagagggattttaaatacaaatggttcaacccaacctcactatctcaaaattatttatgtaatatgctttaatttcaacaaaaatgagaagaagaaaaacaaaagagagttattctattctttttatatatttatatttttatt

SEQ ID NO: 45868 - DNA, 3112 bp, Cannabis sativa
aaataaacatggtagtcatctagtggtggaggagcacataaactgaagagtttctttccaagaaagcttttacttcaacggttgttcattgttggcatgaaagttaagaaaagcatttttatcattgatttgtgcctcgattctagagtgcaataattacttgacatgctaggcttctaaacctccgagtcgttggatgtttttataattttagagatacgatcttggatcattcattcttcttcacgtggatagacaccttaggtataaatacccttagaagataccatttaccacttttctcccaatttcagattttcggtcgtttgaattcaaattttcttgagagcctgaagagtttaagcacttaatgaacccagccttcgacaaccctctttaaattctcttttgtttgagaaattatcattttccaaattattcaccccttgtgatcaatcatttttagaggagtgagttggcaaacatctattttaactctgaaattgactcactgatttccctagccaatcgtctttgtgccaggtgtgctcgcttacctcaaccagaaccagcgaagatcaatttggtgacttcgattcaattaacaggtttgtatttgtctaccttctcgcctttaattgcgtttttaaatccactatggaatgtaggatttgcatgttctcttccgaatgaaattaggatttatttggcttgtgattaatactattagtagtcttaggtgtgatagactatattgccttctgggaaatgattatgttgctacagaaatgctggcaaaacttctccatgctcagaacacaaaaattttgcaacacaaaattctgaaaaataatgcatatattcaatagaaattgcataaagaaagaaaaagataacttgctcactgtttgaagctttctgaatgtgcttggagggtttcagcgatgaagattccaataatgttttcttcaaacatttgagaatgcagaaagaaatttttgctctggttttttgaaaaatgaaatggctaaaagagtcccactgaagcttgaaaccccttttataggcatgtgggagggataattaatccaaaatttgaattttttgggtttctcctaaaaattgaacgttagcactcattgcaaatggtatagacgtcacacatgcagtgtcgtgcaactgtcaatgcgtaatttaaggtacaactttcaagatagaattaaatgtcccagacatcgaatagatgcacgatcaaatcatgtcgtatcaaagatggaaaaaagacacacatcacccattcgatcagctttgtggccgaggaaggccacatgcgaccataaagattcctcatggacttgcagggaaaatgttacccaaatttcttgacaatgacatggcatctatctaggtgacacgcggagtacatttcctaacttgggcagataattctactcttagttagtcgtacaggaggaattgattctaaagctcacagatagaagttgtgatatctgagcaaagtaagaatgtatatccgaccagcttccatcacacaggttgtttgcatgcacggaccaggagatgcaagttagtaattttagagatatatctcaaatatctccaagcttgcaagtcacagcataattcctaaattcatgggatagatttgtatcttcaaagaagaaaggcaatcaacctaagtttcttacttccttattgtaattatgaaagttaaactagtttcccattttttcttattgatttaaggaaactaatttcatgtaattaaaatccctataaatagtgttctcatctcactattcagggacacgattttattcaaagaaaaaacacttaagagaaaaactttaatcaaagagtaaattactcagagatcattgtaagagctttcaagagatatcaaggcattcttgttcatcttctcataagtcaatacaatcaaaggggagtagactattatcaactataaggggccgaacatctataaattctagtattttctttgctttatattgtttatattctattatttaatttattctcaatcactttcatttgactcattatcgttggctaaaagcgaggtcaacaaagttcaagggtttaaattccaacaataatattttttattttttcaatatttaaaatatattttttgaacatataccaataaaacttatatctaataacttaatcattaaagccaacttttttagtattattttttcttactttagactatatttaatatcataaagtataagattgtatcaattttaacatgttatgccacatagaaaataaagtatgccctatcccttaaaaaaaagtacttataaaaaaatacgcaccctcctttacaaaaaaaaaggcatgcccctcaatttaaattaaaatttctctaaaatactcataagaaagtacaactatattagagacaaaaataacaaccctacttgcttaattactaccaacaaatatatattcttgggtattttggtacaagatttgggcacgtttggaaagctaatatgaaattgtaattgggtgcaattgaaggtttacatagtgttacatttatttgactacataattatactgtaactgtgtaattaaaagtaattgagagacttcaaactctctaattctcatacactctctaaaaacttttcattttaaatattaagtactaaaattaatattattattttcttatgtaattactaactattttgccaaacaagatattagaaattcataagtaattgacatctcatatctaaatacatcttatattttaaaatatgatgtaattattatgctgtgtgttgacctcagatttgaccaacaggcatcagagtcgtatttattactgatgtttacctcgtgttacacaataagaataaaaaagtaaaagagacacaagattttatagaggatcgaccccttgagttagcgggtaatgatctactctcctttgtattaataccaaagataataccactcagatcacaagagttgtggaatctgaagtggctatcttaaaattacaatgtgagaatcaagctggcaaatctcaagagagagagag

SEQ ID NO: 45869 - DNA, 999 bp, Cannabis sativa
gataagataaaacaattgactatattaaactctctttttgacaataatttttccaaatatcaaaaataaaaagcacatatttaggttaaaaattcttacccgaacaaagcagtcatggaagtgcatacgaagcaagccagcagtgatcgaagagtccttttgaaatgcttctaagacaacttgtttaacaactctttcagcttttggacaactcactcggtagaaaaatggagttagttgagcaaaaacacaacaataaggactaagaacaagaaagatcactaaacaagaatattgtgtcatcttggtcatgatgatatttaatgatttgtaagcaaaaaaataataaaggttgctatcatgaatcaatgttgtgagctcataatcatatatagtcaaaaacattgtaaattttttatttaataaggtacatacttgctatatataaatatattatatgatactttttaacggctctaacaccatgtgatatgatgaaacaatattaggtaaaatttataaattaattaaccacgagggctgctatatataaagatgaattaattattaaattattgccatcgattacttttgttttgttttgagaaagattagtcttaatttatttttggtgttggatattatgtcgtattgagaagagaactatagcccttagtactatattttatggatcactaagcatatatatatatatatatatatatatttatgtgagcacatgcatagtatatgtaagtgtgttacatttttgtttttatgacctttttattttcgatacgtggatatatatatttggcggttaaatttttttaattattattttatttttatttaattttttaaatttaaattttaatgataaaatctttaaaattattaaaatgttaacaaatttacggtatcacatatagttataatttaaatatagaaaatataaagtgctggaattgtggagaagaaacgagtttcctttttgct

SEQ ID NO: 45870 - DNA, 1906 bp, Cannabis sativa
gggtctcttgcaaatttagaagatcttctcattgaatcaaatgatttcaaaggtcatgtgtctgaagttcattttgccaacctcacaaagctcaagttcgtacttgcttccggaaataaactaagcatgaaagtaggttcaaattgggctcctccattttctcttcaagtcatggaattgagaaattggaacttgggtcctcattttcctcaatggctaaaatcacaaaaaaatatttctcaaatcgacatctccaacactggaatttcaggtgtcattcctcaatggttttggaataatttattttctaatcgttctattatgcttgacatttctaaaaaccaaatctatggggaaattcctaattttccaaataatgtttcatttttagtactaaacatgagtttcaacaagttgacaggtccactaccacgtattccaatttcaaaaatgctagatctttcaaataattacctgtctgttaatatttctaattttctttgtgatccaacatcttatcaaagagaggtgttaagcattaatcttaagaataattttttatcaggaaagattcctgattgttggatgtattggtcgacattaaaaataatagacttggataacaataatctaaatgggattattccaaggtctattggcttcttaagaaatttagagtcattgcatcttcgcaataatagctttgttggagaagtaccagaatctcttaagaattgttcagctttaattggacttgatctcggtcttaataagttggtgggaactataccaagatggatcggaagtcttccatggttgggccttcttgtccttcgttcaaacaacttgacaggtcttattccaactgaattgtgtaagcttttcggacttcaaatattggatgctagtaacaacaatttgatggggaaaataccaaaatgtttcaaaaatttaagctcaatgacatctaagtcaaatcaatatttatcttcatattattttaatatcggtgaccaagaggctggagagtatgcgagtgttgttgttaaaggaagggaaagtcaatacaacaccattttatatctcttatgcaccctagacctttcaaggaacaacttatcaggtgaaatcccagaagaacttgcaagtcttgatgcattacaatccttgaatttgtcaggaaactatttgagtggaagcattcctgaaaagattgatagtatgaccgacctggaatctctcgatctctcaaggaaccatttgtcgggttatattcctacaggtttgtcaggtttatcattcttgagtcacttgaacttgtcatacaacaacttgtcgggacaaattccaataggcacgcaattgcaaagcatggatgcttctagctttgttggtaacaagttgtgtggaccaccgctcaaaaagtgtattgaagatcctcacacaacgcatccagatgcaagtaatgatgatggagaaagggaagatgatgaatattggttcagattgggcataggaatggggtttggagtgagctttctaagtctccttgttccgttagtggtttgcggattttggaggcgtgcttacttttggtttttcgaagagtatttgtggaacaagattctcgactatcttatcaaaataaagtacatattttgaaagtatttgtgtcaatcaccttttaaagtcttttttttttcttgtaataaggaacgtgttagttatgtcttttttgtaagtttttttcatgtattatcattttgggagatatccccatttatagtttgaaaaagttttaagagtttatttcatgaataatatgtatgtttaagggtaaataccattttggatcctgtgttttgcaaaagttatagattggaccctgtgttttgttaaatgacaa

SEQ ID NO: 45871 - DNA, 2881 bp, Cannabis sativa
taattagttttattggatgttagatacattagattttgagatttttacaccacatactgaaatttctaacttttttactgtagggcaatttttttaaaaaaacaatactgtgtaagttttatactgtgtactgtgttaaggttttatagttgttccacaattattttttagttgttccactgttgttttaattgttctattttgttgttttacgattattttataaaaagacagtattttgtaaaaaattcagtatgatagtaaaattataaacttttgccaaaaattcagtatttttgtaaaacccccttatatttttagatacatcatttaacatcagtattttgtaaaaaaattcagtatgatagttaaattataaacttttgccaaaaatttagtatttttgtaaaaaccccttagatttttagatacatcatttaacaattgatgcgatcaaattaaatatttaaaaataatatccaatctaatttaatcacaaatacgatcaattataattaaatcatctattataattagatttatccagttttaattataaatacatatatgttttgaaaattgatgaaagggaaagatcacaataataaattatttataatattatatatgaaagttggaagtatgtgccggcaacaacatgataatcatattatacacatattgttcttatattttttttcttcattatctcttcatcatttattatgtattatgctataatttatattgtattgttataaagtattagtagtgtctaataatactataatcattataatcatgagatgataatttattaataactagtgatacttataataaatattaaaataaaatatattaagtctaatatttaattatgtcgtagtattgtagtattgctacttactactactctcgtacaatttttttattttattttttatattatatggtacatgtttcactcaaccttcataaaagttacacatctaactagttcaaaattttgaatttaaatttcatcaattactattttttatcaactacctacttcttcctatttttatatatatatataattattattatatgctccatcttaattttcatatatatatgcctactcatccatctagttcaatagagcattactataagatatttaaggagcttagcactacgatgaagtatcattttataattagttagcgatttttcataatatttattaaaataaaataagtagaatcagatattaagttgcaccaataacgatactacacctcacaaaagtgttagacaccataaatatcttttagcctttttcatttcaattattcacactattcaagacagaataaagatagaaaataaagataaaaactaagcgtaggaactctcttcaggggggaagccagactaagcatagggactctctttaggaagaagttagaggtatagaactaatagtcttgaaaatcatgtgtatacttcacggagttgattagacaggctactttcttggagtagcattccagcctgtaaaagtctatcttctccttatggctcacatgggctgagacttaatattgtagaagtacaagatttcttccggtgttggtgcagcttttttgtgctgagcacaaaagatataccacccagataaaaggcgatgcacctgagggataaattgaaaaggtgccattctggctactgcagaatttgacaaagtaacaccttaacaaaaggtgtgcgaccatctccacatgggcccagctccagatgccgaagcccccttccgcgcacttgcttggctgctctccatgaacgaagagcctattccattacagtcttgaaacactctcaagccctcgcaagatctcgtacttcctaagattattgtaaatcctaaatttgttcgtatattggtccatctcccatggattattattcagcaccaattttggagcgctcttgttctccagaacttcttcttccaattcaacctcttctttttgaatcttcttaaacataatttctataaaaagaaagaaaatcaagcaattagctatctaaactacctgagatatacaaacatatatatatagagagagcatgaaagtccttccccataaactgcttgaagaggtccatacaagatttactatccagcaataaaaaccttcaggggtcattcgttccagataggaaatcaggaacatcaagatgacgaattaagaagaaatttgaaaggtaccaagaactagaaggattctggacacggagaaattttgccagcacttatgcaacaaaacagtcattcccataaatttctagtgctaaaacctaaagacaatatagtgtgttatgcctaagactaccaagaatatcaatcacaagctcaagaaatccttacttcattcagaacagaacatgtaaatcctacatgcaatagtaaatctaaaaaaacatagttaaaaggcgaaagggtaaaccaatgcatatctgttggtggaatcgacatcattaaactaaacatcactgggtctagtcgatgtagttaagcacaccttttgcgaagacgaggggcaaagataatcaacaaatcaaattctgagttaaaatctatagtcgcaattacttttgatgtagcactcgagatcactgggggtgaaaagtttggagattctcaaaccctaatccttgaaagaagttggatacaaagctcaaagtcacgctccagattggtttgggttgtttcgaatctgggtttagttttaactttcaaagttgcagagaaatttaaattctaatggctgaaaatctcaaaattggaagaaaaaaatggtaaatggagtcttataagggtatttatact

SEQ ID NO: 45872 - DNA, 1820 bp, Cannabis sativa
aaagaaacaaaaccaaattcaaattcaaatgaaaagtataaattatattttaaaaaaatagttcaataaaagtgggtacgacgtggtttaaataaaatcgtattaatcgtattaatgaaattccaaaccgtaaatttggacgaatagcttgtctgtcactaattcgataggatttcatgtttaaactgatacttgttctagattcataagtgctcttgtaacagttgatttaatttaataaattaccattatgcttttcttcaaaaacaaaaaaataataataataataaataaattctaaaccgtaaattatactgtaccatgcaattgtgaaaaatcaacctgcaaccgcacaacggaatattctaaactatactgtaccatacattatacaatatgggcattgggcagtttgataaacacatcgaagccacttcttcttaactaccgtaccaaatctctcattactcaccggcttgaatgaaatgtaatgcatggttttggaaaatggcggtcccacattttattttattttttaaaaaaaataactttaaattaagtggacacttttgctattttaagagaggtgattgattttgagattttgatttcataagctttatttattttttttatttaaagaaattggtgcctctttttctttggtcacctatctgatagacacccgtacagatggcaagtactaaatctcctaaaactcacaactaatccttaaccatatggatatattcattatttaataattaatgtacttctatgtatttatatttgtgtagctaagttgaaaagtgtaaaggtctacactactccaaccaaattatagtaggtcaacaccccatccctaaccaataaagtttgtctgataataacaaatttttttccccttaatgcaggtatgttgtgggaaatggtagagtggtttcaaatgtaataagccaatttaggccaactaataatttgtatttgagatactatgatttaatatagaagaatctagtgggaattccctttaaaaaaatctagttgaattggatttagtgcgttttaatattttctagtttgctatgtcttacactgtactttgaagcttggtttatatttcgttactgaatgttttacctgatttgattatagtgtgttcattagtgtcttattgtattaatttacgaaactaacttcataatggataaaatgggctcaaaatagatgactggacttgaaatgattgtatacaattttctactttggggttcaacaatttctttacaccagttcacaccaatttcattttaaatcttaatttctaaatactttgcagtttgattatatatttttttaatagtgataatgatgatgatgttgagctcttcatgttcttccaatcactataataagttaattagtcatgtcacttatttacaagatatgccactaaataacttacaatgaaagattggaagcttctttgaggatggtatcttagaatatttttcttatatgaagtataaaatcattttattaatttatccgtgtatgcgagtaaatgaatatttttgataggataggatttataaaacactcaaaaattctaaaagtgctttaatataaaaaactttaaatcataaatccatataacctttgctaaattaaagaacaagaaaatgataaaagatgagcggaagcactaacttaaagccatgtctggagattgcagagaaggtttgatctgttggaaaattgttgtgctccaatagaaatattaaaccaacaagattacaactcaatgacaaataatacaa

SEQ ID NO: 45873 - DNA, 2307 bp, Cannabis sativa
tataacatatgtggttaaaaaattccattaaagttactatgtattatacttaatagtaattttttaataatctatgtaagttatactttagtatattttatttttatgtctctaaacaatttttaagttttttttcttttaaatattgcaagcaattaaatatttgtttttttattttgatgatagtgacgcctaatgctatgtattctaatggactagcaattgaattcggtgtattaatttcttcatccggtattatttggctgacgtgtaacgtcgtaattagccatttaaatattataaagtataattgtaaaatgttcaatttattcgtatatatatatactaggttgaagttacgtgcaactattgcacgtatacttagttatattttagttctcttttttaaatattataatttataatttttataatatataatattattgataatttttttttgaaaggattgataattttagtgcactttttaaaatttttaggtaaacaaaccatctcattttaaaaagaaattaatatataatataaaataaaaagaaaaacagtgtgtaaagtttcaaaaataaactcttcatttttgtttataatttaagataattataagaggtgtttctaatcttgtattgctttagtgactaatcttattagtataatgaaacaataattaataaataatagtaaatattccaataagataattgtctttaactcatttcattttcatgaaatccgctaagtacatagactcaagaattaatagtcctgttatgtgaaaattttgtgcaaattaaagaaataattatcatatcagtagtcactcaaagaatgtattttcacctgtaacccctaaagaaaacaatgagtaaaaaaataacaaagtgaaagtaaggataagagcatcaacaaaaagaaaggggactgatatctttcaggaagctttaaagagatatgctcatatctttatcattttgctgctacaaatcttatgagacaaatcactcaattaaattaggatcggaaggtacaaaataattctttaatgtaaaaaagttttagcttcaaaatattagatcaatgggtttaaccaatagtaggtgtaagataaaaattaagttggctaatgtatacccacaccacatgtatttgtgactatatatttgtgatcgcaacaaatcattaacccatcaaaatgagacatccagggacccgtattgtaagcagatacaaatatttaatgctcaaaaggggagattgattcgtagggtatctacgctcaggccttcctccatcagcttcctcaccacttcatcaaacacaatccggtttccactgggagtcagatgcaaaccatctctgcaatatttgaaattaattagtacatatatcatcattcaatttcaaaattgtaataatgtcactcatatgtatcatcatatgaaatgttaagcataagaaacacaatatagaatgagatgatccataatatgaaaatatcgaaaacaatcaataacaaacataacaatcaatttccatgttttgaaactcgccaaaaacattgtaacagacagcgtggccttccttatcaactccatggctgaaaacaaccttatcccaatcagaaccaagatcttcctcaataaggtaatcgattccgttctccttgcgccacttgacggtgttcttcaacatggtgaaagcctccttaactttgtaatctctagctttcaggaatttcaagagggtcacgtcactcctgtcatcggcgagaaggggaattccccagatcgaaacctcctccggtgggacacacacttcttgttcttccttttcttcttccttcttcggttcctccgtctctgtttttgctgatgagcttgcctcgtcgactggggcaggggttacggatacgacagattcttcgattgcttccacagtcttagcgccatcgtcatccacagaagcaacctcggtcatcacaactacagccttctctttctctttctctgtttcaaccttcgaagcctcttgatcaacagttttcacctcttcctcattgggaggctcttgttcgtcagttttctcctctgctcatcaaaccaaaaaaaaaaaaaacattcaaaaattgttagattgaaaaatttagataaaattttaaaaagaatggctgcgatttttaggatgatgaatactaagaaataatatagagtcgatagcgagaatgaagccaaaaaaatcggcagtcccaaaaatgacgaaaacgagtaattaaagttactcagaattgta

SEQ ID NO: 45874 - DNA, 2004 bp, Cannabis sativa
attttataacaatcaccaatgtaaagttgacaagtcacctatcacattggttggattacatagttggatccctaatattgatggaatttactctcaatatgaacaagcaggtttttaggggtgggggtggggggggctagagatttacagctattcattgaaaaataaaggcattatgttgtaactggttcggcatggcctaataaatattcctgaatatccaaagcaaccttacgaaacaaacaaaaataggtgttcttatttctgtttcgtgatctctaatttgacagcaaccaaaagaagtgaagtaacacaccttcccttggtaattaacacactggtgattgaacattgcatttatatctgcaaagttaagattaaaaatgttaatgctgattaagagcacattgcatttatatcagcaacaattaagaataaaattgttgttgatgatcaagagttcagtagaattctttttaaaacaataatttaacaaataagctttgaacattctaaataaaattatcattttaaataaatcaaatataagtaagaaaaatgtcagtcctggatgttttttttttgaattcctatccaactcattatgtcttccttactgactttcccatcactgtgttctatgaaagaagtgatttactgtacaaataacattttcttgcatcgtgcgtttgtgggaactttgataggataaggtttctagcttaatttagatacagcgcattgttccaaggaacagctatcatatgatgacccaatagtttgtacaacatttggcagaagaggaatgacaagaactttcaagatacgcaaaacaagttggagtatatttgggaaaggctcatgttttgggttgctatttgtcttaagaatgtcaaagaggttgagtgggtcaatatatttctaactggtccaaggttcaagtcaatatcgtataattatatacaaaaattaaaattatatatttctgtttttaagaaaaaaaatcatatcactcctttgtttaatttctaagtacattttgactttttacaaacagaaggtaataaatggtttagaagaaacaaattaactatgtctttgacttgacatacttcttaaccataaagtgtgtataaaacaaagagtaaaattgatattgcagagtactggattcattagatggttcaaaaatatgaaaccttttaaattaaaaatacacaattcaaatacaaaatatacatattatgcaggcacaaaagataagtgtctgcaaatctttctaaataatatttaaagggcgggcatgagtggcacctgggtttaaatatgatgacaacattattgtttgcctgtaaaatcttgcatacccatccaagtacctacacattataacaaaaaacaaaggtagaggattttataaacttataattgaagtccaaaccaatatacaaactatttcatctaaaataatgcaaattttttgaaacacaaaccgatttcaaatgatgcttcacaaactcatgtggtgcagaattactgagccagtgaagagccaatctatcatatttttcgacactactatagtactatatggctatatttgtgtggtatgaaatgaagggaattatatctctttagcaatagagaatcccattggttttagttcaacaataaaaagtagcaaacaatataaaagtgatgcagtatcggttaataaataaagagtaatgctagggacactcccaagttatacataaaacatgcacactacaatgtatcattaatatctaccatgtaatgctagggacactcccaaattatacaaaacctcgcattttaaattgtggttgatattaatgacagatcgtagtgtgcataatttgtgtaccaattaagagtgtactagcattgctctacattaaaacaagaaaaaacataaaatactatggtatataaaccaataaaggtaactcaaccataacacaaacatacagataataactt

SEQ ID NO: 45875 - DNA, 1286 bp, Cannabis sativa
cggccattttcgcccttttcgccatagctccggtgagacaccgaaagagagagaaggagcgggaaaaaaaatttattttgttattgctgagatcctaaaaaataaatttcatagggatgttttggtggctgccactaatcatgtttccgtgtataaaatatgggaagcaaggaatgtttgttattgggaacaacatgcctacgtaagtaaaatttgtaaataggttttatcattttaaaaaagagaaaacaagtatagtggatagagatttgtttgaggctttgaatccgctcttttgttaagctttttataaactcaatttttttagcgacataagtacacaatgttaataatagtgtaatttttgcccaataattggtcaataaagactacgttatagtgtcttaaacatgacacatacatttaaaacccaaattttaaatttgagcctagatatcaaaaacatatagtatgagttactattagatcttcttaattttaacaaattcaaaacagaacttttattaacgaaaatgaacgaaaattacaagtttactaacattgaataacttacactacaaaaaaatcttacttatagtcacaataaaacttgtgactaattatcattcctacattcactgcaagaaatgtcacttttttcagcaaaaagtcaaagttttatcatcgcacatttgtagcggctaaaatctaacttttaccaccgcatttacgtgctggaaaaagtcatttttgccagcacttttcattttgcgctaataaaagttctaataccaacgttgatttgccaactccttttgccaacacatcaaaagtagattttgttttgccagcacaaaaatgtgttgataaaaatgacatttcttgaaatgtgtttgtgactaaaaaatctgtggctaaatacattagtcacaaaaattacaatttgttgtgactaaatgtgtatttaattagtaacaatacttgttgtgactaaaactaaattaatgacaacttgtatataattactatgctataattagtcacaagtaattgtgactaaaagtcacaaaaaaaaattatattgtgactaaaagattatcactaaaggtgatctttttctatagtgttatattgctgaaaaaaatattgaatttatgaagcttacaaactcgaaactttggatacttatagagtgcttttatatcaaatgatagattaatttaatcccgttttacttaaaaaaaaaaaaaaaaaaaaaaaaaccttagtaccaatagccaagttta

SEQ ID NO: 45876 - DNA, 2347 bp, Cannabis sativa
ccaagctcgaccactctgaattgagaagaaaaatggtgaataaaatttgttccctttggttcttgggtgaggccgaacaagaagagagagaaagagaggttggatttctagattttgcaatttttggctaagtgtaattaatgcaatcactttctattattcagctaataattaataaacttaaggattactaccaaattcactcaacttactaaagacaaaactaaggtaaaattactaatttgccctatttcttctacaagaagtaaacttaaaacctagggataatatggttcaaaaccataaccccaaatactccttacatttttaatgtctaattatattgccccgctaaaccaagatactacaccgtgtctatgtgactctataggctaaatgtcgtattctattatgttatatacatttttggcaaaggacacgtggaatccaagtcaacatcaaaggcccccaagtgcgtcccaaggaatacaatttgggccaagcctaaattatataggacattctaagaacgtatcttatctccatgattagatgaccttccgctagtgacagcttgtatccaaaagcaggtctagtactatgaagctgaaagagtcagatagaatgttcttggaagaccagtcaaatttctctttttattcttgcacacagataaggaaataattgcttcccaaatcttgacaaaagatcgtatgaagataaaagggtgaacttcctaaaacagagatcaagcaattgattcataattaatttcccgcaattataggacacgattttgaccaattcaaccgtatccaatctacctagtcaacatatcttctccttcgtgggctaggcttcacgagacaacccacattatgtaattcaatgtaaactccccaatacagaaaaaagggaaacaaaatataattctcttaatactataaatacccaatgcatcctatatagattaaaagttgaattttcttgcaatatttactttggaaaacttgagaacttatgctcattatattctcaaaggctttctagctcaaagtcacataatgaaattgactcatggactaaggctacttaacgccccaaccacataacaattgtttgtgtctctcttactctttttcttttaattatttatttcttcagttctgattattcataattggtttttcgaaaatctcgataaatattatggtgcattcattgagagctgaagaaagtagtgataccatctaaagattacgttcagtaaccatggtactcacccataacaaatctggtcttcattttactgatcctaatgccaaggcaggggataaagaagatcagaatgaggtaactagccatcataaagatcaggttgacaaagatacaaacctagacgctcctgtatttcaaaatgatgaatcagaggagaatagttctaacgatgttggagatgatcaataagataactcaaacgatgatcctcaggatgcactgggggacgatatccaggacaagaccgctaatgataatgttggaggaaaagacaaacctagcaagacagatcccatgattatcatggtcaaaaagttccaattaatcaaaaataggatatctcaacaggataaattcaatgagataattctcgaaaagatgataagaatgtaggccgtgatgatagccttgaccaatggaatccctaatgtgcaaacacctccaacaaattgatgctcctggaagagtggatccaaaagattctggaacctcaaatcctcacaaggataaagggaaaaggataatgggtgacacttcgaagaagactctcacaactaagcaacaaaagaagtctaaaattttcaaccaacctcaacagaataagaaagggaaccatgctccagggaagggtgaccagactcattctagaggcagagtcgtacagaaggataagactgatgctagagtctagaagtctgcttccaagaaagacaagcatcattgcaataactccatcagtcaaaatgatgatattgatgaggtgtattcgatctcagatgacaatagtggaagcatctccacaaatgatcttcaaagaagactaaacaagaaaaaagagaaagcaataacaaagaaagccaaaccccacgagaatgatttgagaaaccacaaaaatgatcgtgttcacggaagggaatcttcaagtgataaagcccaacacttagaatgcaaagtcaaagagtttataaagctcacaaagaagatatctagaaaacaaaatggtaatgtatcagactcagaagaagaagacacaaaattgtgagggaagatatgttgggttttgtgccct

SEQ ID NO: 45877 - DNA, 2237 bp, Cannabis sativa
  modified_base (190)..(192): a, c, t, g, unknown or other
  modified_base (1273)..(1274): a, c, t, g, unknown or other
ttaaaagggtagaaagaaaattgtttaataaaattataatattactttttgatatgaatatttatcacttttggcggggcgtactaaattaacccactacgtaccacaccactgggtggctcacctaaatgctgggtctttctccgccgacaactcaacgtcgactcacctgcaaaataaggccaaaaannngactttactaaacaagcgagaaaaaccattattcatatgtcaagggctggtaaggttttgcgcgttgtatcgaattaaaccacatgctctaccgcttgtgcaggcccccgtcaattcttttgagtttcggtcttgcaaccgtactccccagaccgagtgtttcacgcgttaactaggtctttaatccaaatccttgtttggcttttcgatttttagaattgtattttcaaaaatgaaaatagaaaataattttttgtcattttaaaaattaatagtgtttgacacaaattttttaaagctatttttaaatttttttcttactaaaaaatgaatattttaacaccataccatgacatgaacccattcggatccgggttcgggtttgattgtgggtctaggatccgatatgtgtgcaaaaatgtaaaatataatatgttagacaaaaaaattatttttaaaaattgagaacaacattttgatattttctgttttccagttttttcaaactcaatttttaaaaaactgtttttaaaatattttgccaaacgatccttattagttttaaaaaactgttttcagttttaaaaaacagaagacagtttttaagttatgaagccaaacagccttgtagtttttaatttttaaaaatattttttttttgtctaacatattatattttatatttttgctcacatacctgaactctggacccagaccatggtacacggacctggaacctgtacctagaccttagaccctgaaccctgtaccccagaccccgaacaccaaacccaagactcggaccccgacccaaacccgaacccctacccgaactcggaccccgacccagattcggaccccagcctaactcggactacgacccgaccttgaacctcgacctgaaccctgaaactggacccaaaacctggcccaactctgggtcctggtcggggtcggggtctggtttagggtttggggtccgaattcgggttcggatctgagtccgggttcgggttgaagtttgggttcgggcctgggtttggggtttgatctggggttggatgagttcatgtcatggtanngtgtagaatattaattttttttatctaaaaatagttttaaaaaatctaagccgaacatcattaaatttctaaagaatgataaaaaaaaactattttttgtacttacttttaaaaatacaattttgaaaattaaaaattgaaaacatagtcaaacaacatcttattttccttttttcttcccctcttactaaacaataaattttacctttcacttcaactctttcctctctctcctctctttacctcatataccatttttttaatttttttttttaaatttacggttcgagttgctctgatagtttttatgtgggttgctatatggatttcggttgcgatttaagttactccgttagttgttatgtagatttctgtaaatatagaaaaaaaattactttgaatgtaaaattgaaataaaacccaaaaagagaaattacttcatatactattttttatttttcttttcaaatttacagtttgagttgctctagtggctgctcccgtagtttctacgtggattgctatgtagattttggttgtgatttaagttgcttcgttagttgctatgtggattgttatatgaatttctgtaaaaatagaaaaaaaaaaaaactattttaaagtaggggtgcacatttttatacccaaaacctgaagcccaccagaaacccgaaaaacccgaaaaaactaggtttcaattttagtacagtgggtttgggtgtaacccgattatgtaccgggtcgggttcgagtttaatatttttaaaaatctaaaatccaaaacctagttagtattttatttatttatttatatatattatataattatattatatatatgttttttaattgtgaatttgtgagtgtgtattaaattgttaatgttagtttatgtaatatgtatatatataataataaggctaattagaatttttacccttcaaactttaacatgtaccaaat

SEQ ID NO: 45878 - DNA, 940 bp, Cannabis sativa
ttctacaaagatttgagtagtaccactttcaatagtataggctagtactcaactcaccttttggaacaaaatttgaaaagagaaataatatatttatttcgaattgcttaaggaaacgagtgtaaagaattttctctagtcagatttcaggttaagtcatttgaattagattaattatctgacaaaacaatcattttattccttatatagacacttcataggagattacatgggctagaaaaataaaacaatggaccaaaaataaaatcccagcccaaaactatactttatgactcatgaactttgatttttgccatttttatttcaattaagcttaaatgaaataaattgcctttttttctaattttaccatttatctcatctaattatttaaataccaaatttaatttaataattattaaataacaatacaatttaaatatatttattaattagatacacaaagtgtcttaattaacaattaaacccatatttctcttttcttctcaaatttgtcaaaacttagtgaaaattctcaaagtagacatagtctatttttgaattctaattgaattatttaaccaattaattgagtctacaagattctattatctcaaaaaatgtggaaaccataggcctatgtgaccaaggtccctatataagtagatcgcaaatttactaagtaaattaattaacttatttatttctcttgactccactatagatttagaattgcacatttatatactaaatatagatacgatattaattatccattatttcaatctaaataattaatgatcctatagatattttacatcaaatagagataaatttaccatttttaccattcgatatattttatccttaaaacacttagctatttataaatgatatttcagtaaactattataattaccgaaataagaactctttcatt

SEQ ID NO: 45879 - DNA, 2537 bp, Cannabis sativa
ggtttcttgtagttttcccaatacaaactcctataacttatatacactcctctctcctctctcctctctacctactttcataaagagtgtatatatgtttttgccatctataattgtatgaaaactctttccttgtttcctcgttgttgttattttgccctttaatttaattgttcgtttctcctcttagagtttctttgcttacaataaagtttaactgatatattacaggtttataaaaaaacgacagtttttcaagaaaacgacaatttttcgtaataaacgacattttttaaagaaaacgacatcatttcggagaaataacatgttttcggaaaacgataatttttcgtaaaaatgacattattcagaaaacgacatcttttcattaaaacgacaccatttcggagaaatgacttttttcggataaacgacatgttttaaataaaacgacattttttaacggaagcgacaatgttttagagaaattacatcttttctagaaaacgacattaaattaagacatgatttccgattaacgacattattcattaaacgacaggtttcagagaaaacgacataaagtaagaaatcatttctagaaacgacattattcaaaaaaaacgacaaatttccaagaaaacgaaacaaactagcattatcttcaaaaaacgacacttcttaaacgacatattcatttaaacacggaaaaccaaaacgacaatatttataaaaaacgacaattttctcagaaaacgacataaattaaggcattatttccgataaacgacataaactaagaaatcgtttccataaacgacattattcggaaaaaacgacaaatttcaaagaaaacaaaataaactagcattattttcaaaaacgacacttgtttaacaaaactatatattaatttaaacacgggaaaactaaaacgacaatatttataaaaacgacacatttcgataagcacaccattagagaaaaagaacaatttatgtgaaatctctctctgtaagccctaattgtccaattcacaatctgcaaagtaattatttttggattgaaattaagcttatttttgtttaggattagtgaattaagcttattttatataaaaagaaagatacattaattcaaccttagaacaagattaatccaattactaatacttcattaattagataaaacagtaataataattaacaacatgagctaaactaatctaataatcatccattggattcaacaacaacaaaaaaaaaacaatgatctaaaagcaattacagaagagaaatgcaaaaccctaagctctctcacctctaatcctacgagccaactgaatatcctttggcatgattgtaactctcttagcgtggatcgcacagagattagtatcttcaaacacaccgaccaagtaagcctccgcagcctcttgaagagcagacacagcgctggattggaatcgaagatcggtcttgaaatcctgagcgatttctctcaccaatctctggaacggaagctttcggatcaaaagctcagtactcttctggtactttctgatctctctcaatgcaacggttcctggcctgaatcgatgtggctttttcactcctccggtggctggagcagactttcttgccgccttggttgccagttgcttccttggagcctttcctccggtggattttcttgctgtttgcttggtacgagccattgaggggatgaagttgagttgtttgtttctcgggaaaattggaagagaaaatggagtttgttgtggaaagtgtgggatttgagtttggtatttatagtagtggtgaaatgaagaggatgaatcttgagcgttgatttattcttaatggacggtgtagattcattttagtgtgttcatgcggatcttcaatcaaattaaaagttttggcgggttttcaaattttttgtttaagcgcgctaaaatttgtaatttctgattttaaaaatatataggaaaggaggaaaatacatgcaaatgtattaacattttttttttgaaggatgtaatagtaatactaatttttttatttaagcaaatatattaaatatttaaaataacaacaacaaaaattagtgatataaaaacctaattatagttcaattacataaatatttaaatataatttttaacggtaataataattaagttatatttttttatagaatttttgtaagtaagtacctaataactattaagtataagtcaatagtcacatggcagtccttgatttatttaaaaattaattttaatatactaataagaaaatgacacgtaaataatgacttgcactctggttataaatctaatttatgatgatgatgttttgttatgatttatgtatgaatttatgtgtcgagatatatatgagagagagctatggaaagtaatagataagatgaacaagtaagttttgtcacaaagcagaacaactcaaaacaacagtagaacaccagtaaaacaccagtgaaaacttaacacagtatactgcactatgaaactt

SEQ ID NO: 45880 - DNA, 950 bp, Cannabis sativa
acaatatgtagacttgctactatcagggccatggaaacgaacatgtttaccatccctatatgatttgtttatgatggacaatgccagcttaatattaacagaggtttattcacttaaaactcagcttgtttcatgaatggtaccttgtctgtttggtatttctttatggacttaataacctctacaggaaaggcttcatcctctgggtaatatgcgatgggatcagataataaagaaattggtaagttgagcacaccaatgaacatcaatgtcaatcacagctactttagcacaaccagaattcaaagccaaattaacagcaagaccagtattgttaaggaagcagtatccatcagcttgggtaggctgagcatggtgacctggaggcctgaccaatgcataagcaagttttccatgtccatctagaacatacttcatagctaataaagtagtaccagcagcaagaagagcagcttcccatgagccaggattcaaaaaagtccctccacaaaacatcttacccccttctttatcagcttcaattagttcatttatgtattctgaaatgttttgtatgtcaaaacccacatcactctcagcctaactagatcggtcatgcattgtgctggtgtcatatatctttattattattagtacaattttaataattacagaaatccattagctattcatagggaacaatctcatagttgtttaactagttcgtgtatgagtgattcaagaaaaacccattaaatttattggaaaataaacagaaattaatagagataaaagaagagaaatggaacctgtggagtggaaagagagcaattcagaagtgagagctggttttccagaatgccaagtaatgtagggagagatagggcctcttctgagaatggagagcatgttcttgactcttttagagttttctgggtgtttttctaaga

SEQ ID NO: 45881 - DNA, 960 bp, Cannabis sativa
gaataattttgttgataaaaaaaaaaaaaatcaatcagttcattcaagaaagatcgatcttatttatactattttagaaaatacacttgtatctatacataaatattttttagatatgtgcatttcataatttacgcacaacttctttctccacaacttctcttatgaaatgaagctttataactatgtgttcagtacgtttatggtgcacacaattcttagtcaattgaattgtactttgattatcactatgcacattgataaccttctagttgagttttaactcttccatcaatacactcaaccaaagtgcctccttgatggcttccgtcaaggccatatactcagtttcagttgtcgacaatgccaccactttttgaaagtttgctttccaactgatagtcgttccgaacatattaaacacatagccaattaataattttcgggtatcaatacatcctgcataatcagagtccacataaccattgataacatctaagtcttcactctgtttgttcatgccaaataccaatcatttttcaacatatccctttaagtatatcaaaatccacttcaaggcctcccaatgctcctttctggggtttttcatgaatctactcaccatgctcagtgtatatgctatatccggtctagtacagaccatgacatacatgagggagccaacaacactggcatacagaacctttgtcatctcggacctctcagtttcatatttaggcatatgagtagcactcaatttaaaatgttgtgcaagtagagtgctcactgcctttgagttactcatttcaaaggtatctagagcctttttgatgtaactcttttaattcaagtacaatagcctttttcccttatcccttcttatatccatgcctaaaattttactttgccagaccaaaatcctttatttcaaactctttcttaaactggagtttcaagtgt

SEQ ID NO: 45882 - DNA, 1359 bp, Cannabis sativa
cgctgtgaatacctgtgtaaaggtgacattaaatcttcaaatccaataaaaacatgcaacatgtattgcacacagtaataattcaattggcatttaagagtaaactttaactcctctcttcaaatttgtcagcaaaagtaagagtattaccacacaagaaaattaaggggttggggagttttgtatcaaaaaaaaaaaaaaagtgaaactgctatgcagtgaaaaaaattctgggaataaaattaatttatataaattatagtatttctttatatctttaagacctacttattcacattttcataattcaatttcatagtgctaatactcctttgctttacatccaagtatttacactttcttttggggagtcaatacatgcttccaatttacaattttcaaaaacaaatcaactttctctagtcagattttgtaaagaacttctattttgtattttttagacagggacagtgggaaccaaatgtaaagaataatagcaataatagtaaaataaaaacatctatcaataataaaataatcaaacaagtttcaaatcactaccaaatgtaatgcttttgtaaagaatttcttttactataccaccctaaaactatatttaccctttttttttgtcccaaaatctctgcaacttctagctattcctaaattcttataccataaacaacaaccaaaaagaaatgaagactcaatacttatcatcatgaatgtacaatgacatgtagcttgggaaacaagaaacaataaaagcatcttcaccaaaattcttcaccaacatatggatcattgattaaattcaggctgttggcctctcagctcagcctatgaatagctaagggaaccataagtgaagtttctcttgttcttctgctaaaccgaaatcataatctggagtcaagaaatcgaaatcatagctcggaatcagttgtgtttcctccatctgatctaagctcttatagagttcaggatctctagccaatgtttcagtagttcccctagtttgtaagtaattatctcttcttgatgaaccggcagcagagcccgaaaaattttcaagtctctcaaccattctaacatcattagctagttcacaatctctagctgagtaaagaccagtattactatgttcattgcttgtaataatatctttaacatctatctccatatcttcattcacagtcttagtactagtacatgaattttgtgcagcttgagaaaaaccccgaaaacagtcttgtttttctactgatcccttcacaaaatcagcttctgcataatcataattatgcttaatatctaagtctagctcctcatcttcttctgtttcttctatcttggtgg

SEQ ID NO: 45883 - DNA, 1786 bp, Cannabis sativa
ctctctctctctctcttaatttaagccaatttaaatttttactccttaaattttgatatgtacagtactttttaagtcgttaaatttttttactgaactattaaaattgttgaatttaaaagtttttgtccaactgtactaaacaaaatctaatgtagatgaaaatttaaggggcacaatttcgtacttttgaaagatcggaaggtataatttaatagatatcaaagtttgagaggtaaattttcaaattgtacctaataataagattttctttagtaagaagatatgaatccgttgcttgccacaaaataatatgtgtttgggcaagttaagaagaaaccaatttacctttgtgaagaccaccttttcttgtagagttgtgctattatacagcttcttgacctagaattttcccttgtaaccaacgactacatttaggggtgcacatgggctgggttaaaggtattttaataggccaactcaatgattgtggtttggataagctataaatcattcaatttttttattgtacaacccaaccctacttagtacataatatagggggtgggttgggttcattgggttgagatgaatattttaaactttaatatttatgttacaaacatgataaaattattcaacctagtgcatacataaaaaaaaacgatacatatgtgtgtgtgtgtgtgtgtgtgtgtgtgtgtgtaatatagtactttaaaaaaaattaaggtagtaggggtatcattgtgtgagtagcaaaattaataatagtgattgattctcacattaggcttgttggtagaagtagtagggtaactatagactacatgttagtgatgtattttggttaattcacaatataatttatttatgtataaaaacgtaaaatatatatttgtatatattttgtagatgtaaaatatattttatatatgaatgttgtctcaaatttgaaacatctttcaagatatgggttggtttgggttataaagagttaaaatgtgtccaacccataaccaacccataattatatggtctatcgctttacaacccaatgagccatggcctactcttaatataaccctttactacaaaaaatgggttttgacctggttgaatggtttggcccatactttgtgcacccttaattggataaactaattatttcattaaaagtaacagaaaaaaaaatcaatttcatcaacaacataataaaaaaatattatgcaaaaaattataatctaaaaacgatacaaactttgaaaaccaatttcgaatgtataaactctctatgaatatctaataactaaacttctaacttcattctttagaattcaatcttttatttgctttctaagaaatcaaagttgatttacgcatacaaagtgggataaagataacaaagggaatcagaaactaaaaccaaatttatcaacaacataataaaaaaaaatacaatgcaaaaaatataatttaaaaatgacaccgactataaaatcagttttcaacatataaatttacataaattcctaataccccaatttctaacttcatactctattttggcatttaatctcttttttgcttgatcaaaaatcatagttgatttaagcattcaacatagggtaaatatctctaagggaatcacaaactaaaacaagtttcataaaaaaaaaataatttaaaatgaccaactttaaaaattatagtttcatcaatattaaaataaactaattatttcactaaaagcaccagaaaaaagaaaaaaaatcagtttcatcaa

SEQ ID NO: 45884 - DNA, 2370 bp, Cannabis sativa
aaaaacttagtacatactttctttcgacttgctcctttcttttgcatcttaatttttcttagcagtatcaaatttctttctaagctctagctaattagaatcagagactgttttcacctgttaaaaaataaatacaaaatcaaaaataaaatctaaatgatatagcaaatatgataacaaacataattaatcaatttttaaaaaataaaaccagttttgaaactcttaaataatataaaaaaatgaacaaaaaataaaaccagtttcatcaacaatataaaaaaatatatacaatgcgaaaaactataacctaaaaataatacaaacttttaaaaccagtttcatcaacatttaaataaactaaaaattttcattaaaaatgcaaaataaaaaccagtttcatcaacaacataatgaaaaaaaaatacaatacacaaaaagtataatttaaaaacgataccaactttaaaaaccagtttcatcaaaattaaaagaaactaatcatttcattaaaagcaacagaaaaaaacctgtttcatcaacaatataataaaaaattataacctaaaaacaatagaaacctttaaaaaaatttcatcaatatttaaataaactaaatatttcattaaaagaagcagaataaaaaccagtttcatcaacaacataatgaaaaaaatacaatgcacaaagtataatgtaaaaaccatatcaactttaaaaaccagtttcatcaaaattaaaaaaaaaaaaaaaaactaatcattttattaaaagcagaaaaaaaaactcgtttcatcaacatcacttttttaaaaaatataatgtaaaaaattataatataaaaataatacaaactttaaaaaccagtttcatcaaaattataaaagaaactaataatttcattaaaggaaacagaaaaaaaatcatcaacaagataatgaaaaaattataataagaaataccatgtaagaattcttaacgaatgaatcagacaactaattaaaaatctaacataaaaaaacaaattttataaaataaacaaactaaagactaacacatgataaccaattactcatttatctgaatctatcctcaccatcatgctatgactattgtattttgacacacccaaaactcaaccaatattttttttttcatttttatgaagaatgcatatacagcggggaaaagataaaaagttagaaaagaaagataaactattgctctaaaattagtctaaaaatttagaaattacatcctaaaaaatataaaaaaaattactcaaatcaaaaatcaatatataaaccctatataagcatattatccattttaaccctgcaactcatcaaaatctgttacacaaaacaaccaaattaaaaactaatacataaacacaattatctgaaataactaactcaacaagcaatttttgtgagttatgtgaaataataaaactaataattaaacataaaaaccagttttttgaaaaataatatatatatatatatatgtattaccaatcaaagtgtaataatatctatagcactattaattttacatcaaaaagcataccacttacagctatatgaccatatcctagtaatgaattcatcaagacctaaacacatttgtctcctataagcaaataaactataaccatgagaatcacaaactcaaagtatcataattcaaaacatttaaaaatatttatatacgtattattgatatagctatagatctctattttcatttgcttaggtcaactaccaacttgattgcatccgtatactttactcttaacctgatataacatattacacttttgtttaagggagttgaagaaactagataatacatactaagtgaatacttgttccaataaattgtgagtaatagctcaaaattgatgacttttggttaaaataaacaaatattattcttttttctcttctctcttgctgatcaaaaccagctaaacaaaaattattcttgatggcatgacaaaagcacacttaacagaaaaaatatgttatgtttgttcagcttcaactgttcttttttcttttcttttcttttcttttttttttttctttttctctttctacttctcttatctaatcctaaaagaatattaataatacaaacgaaaaagttcatgattagagttttaagggttgtaaagaatttttgtcaaccaagtcagcatcactaacatatctagatacaattacaaaagatatcagcaaaatgggacaccaattagtggagcatctaagataagaacaccatcattttcatcatattacattcacatttatttaaagtactaaacaagtacgggcttactgaaccgtaaaccgagctttctct

SEQ ID NO: 45885 - DNA, 1372 bp, Cannabis sativa
atgtttgttattttttttatatgtattacaaccatgttttatcgggaaatccaactcaggacttctaacacacactcacttatggtcacatgaactagcctcaaatggtttgattattttgaactctattattagcaaattattcacaaatttttgaaaagaaataaaagatatattataactgtataattaatgtagagtcgtagacatctatataaaataattaaattataatttctttaaatacttaaaataaaaattaggtgtagttatacggtctattaaaattttttgattttaaatattgattattttataaaaacataaaaaaaaaaacaacaaaaaaataacatcaaataacaatataacaacataaaaaataatatataaataacaaaaaatcaataataaaataacaagaatataacataaaatacactaaaagatcatattttatgtaaataaaatctaaaaaacagtaaaaatattgaaaactctgtacaagctatatttttgtaatttttttttgtttttgtattttttttttaaattaacccattaaactaattatttttacaacaataaaaatatttatttatttatttattctattggagattgtagaattaattatgataaattataagagtaaagtttataccttatgacttatgaggtaagaattagaaaatgcagacatgaataaccagacattcattaattgtctcttgctgatccaacatcactattcaaatgatagagcaactctattaagacattcatgaattgtctcttgttgatgcaacatctctattcaaataatatagcaactctaataacacattcattaattgtctcttgttgatccaacatctccacttaaatcataaagcaactccaataacgctatgaacaaaaataaaaaattgttagggataaaatagaactatatataaagttttgtcgttaaattgtttttgtcatcaaattttgtaagtgaatagagaagaaaaatcacaattattaattcagataaatcaaagaatttcgaaacaaattatactttcggtagacacacaagaaccaattataagtattatgatagagatggatattctatccaaattcaattagtagtaaaaaattaagtagaatagagaagataaaaatgggtggtagccttttattaatttgtcaggacttgttctctcccacaatagttacaattactattgaattcattcacacctcacagaaatttcttttttttgatttaagcgtttatatattacacaatgcataatttgggactcgaacccaagacctccaacacacacgcaccctcctatagccacttgagctaacctcaagt

SEQ ID NO: 45886 - DNA, 982 bp, Cannabis sativa
acattgattacttccagaaataaaattctattctaaataaaatccataagcaataataataaataattagcaggttttgaggtcattttatctaagaataaagacaaaaaaaaaacttacctccatgatcacttgcgatgaattaggggatagaatcgacgatggcgaagtaattgaaaaaattgaggaagagatttagggaaagcgaaaaccctagagagagagagagagagagagagagaagagggtttggtctggtgaagtgtatgggggtttgggttttgttttgtatagttttcgggggatgagggatgagtttgattgatgttttgtgatgagttgatttgagctaagcagtcagagaagtgagaaggactttggtttggtcctctgatcattacaccgtcgacacgtggcgttctcaagaaatatctttgacaaaagtttatccgccgttaactttgtctcagtctactctttttcattaatcaacggtctatatatgcttcatcctattaccaaaaaatatatataatctaataattaaaaattgtaaaatgattataaagtaaacaatctcaaagacttattaaattttgggtacagagcaaaatggaatggaattggagttgagctagttttgtatttaaaaaataaatatttgtggttatatgttaaaaaatttaaaatttaagaagtttaaaagtgtgattggaatttattaaaaaaaaaaaaattaacaaatggttggtgttatttttatttttatttagtctcctaaatttttacatgtactaaatcatgtctcttgaattttttttggtcgttcaactattgaaattgttatatttaagaatttttgtctaatttcatttaattttactgtttcagttgtttatgtactaaatcataatcctcaaactttaatatctaccaaatcatacctctcaaactttgatatgaactttcatccatgttagaa

SEQ ID NO: 45887 - DNA, 2596 bp, Cannabis sativa
tttttaattgaaaatcaaaattaaaaaaaaaaatcaggtttaatatttttttaaacaatttttttcttaatcagtattttgaattccgcctagatccggacctaaatccctcccaaggccttggcgctgaacccgacttctaactcgaacccgaatctgatcccaaatctagacccgacttaaataaaatcaaaaaatgaaaatgaaaataaactttacagaacatacttttattttctgtttttgaaattgaaaacaaaagaaagtggttacagaacgaacgcttttttgtttttcaaaaataaaatttttaaaaacaaaagttttactttcattttgtgattaaaaaatttgacaacaaaagtgttatcaaacgacatctaaattttttattttaattcttttttatttcaatttcttaaattattttgaggattaagttactatttattgagttattgaaataagttatcatctatttattaaaaaaaaactattggaattttgggaattatctcattgttgtttcattttattgcaattgataaaaagtaggtgatttttttttatattattatggttgttgttgtttttatattttcagcagtaaatatggccaccgcatgtatacatgaacttgaaaataagtaggctcgcatgttaaaaaaattaatgtgttatttaatgtgtcttgaaaaatacttatatgattcagaatttaagtcttaccttaggccgtaaggatgagtcagaaatactgatcataagaatggtaggtgaagcgagacctaaaacatgcacaataacttgctcgagaaatactgaacgtgagatatgactcatcaatgacaaaaggaaaaccaaactgatcgcgaggtagaatgattttgctatcccaaagtttgcacttctgacgtggcaccacatgtggtataatccagccgacccttaaacatgacaaggaacttacagataaaaatgtacctggcaggttccatatggggctaatatccatgaattgtagatggatttccaagcagtatctagtcgggctttaacatgcaggccagagaagggtaccttctaggaatgctttgtgagtaacttcatcgaaaaagacaagtctcgaagagggcctggccgggttgtcaacacgtcggctaggataaatgacgacagaaatgtcgggcaaggctacacaagccttgatttcttcctcaaaaataaactttcacaaatctctttaactgtatcttatagatgttgattcaactgttctacctgagattgtaggagctttaacagatcgtaactgcaccctagaatatagggattttactttatggttactccttttatgggagctaatttgtataaaaccccttccccctataaatagtgaatgaattcatagggaaagggacctaaaatcataatctcgcacttaagagcactttgctaaattctctgtaaacatcttgagagttgtatctagaattcactttgtcttccttagtgatctgcacgatattatctcacaatcaatacaattaaaagggaattaggttattacccatatataaaggggtcgaacctctataaattatggtatttttttctatttatttattattcttaactctttactggtgattaatcaacgtttattagactcaaagttagttggcaattttctctcttttcacctgataatcaccatggtcctgacaagaagaagcgtgtccattgaaccccaggatccaatggctgtggatcttaatgtccgtgttccacccattggtgataattcggccaaccctgcccgggctccttgggccaatccatctgtagggttccgacttgaaggcccagttaatactgggcaagatttggaaaataccagacaaattttggtcaatgttggacaacttgccaaaagtaccacaagggttcctttaacgagagctacctccagataacacgctggagaaaccgagcctgaagttagccaacgtagtgtcaacaagcctcatactgacttggggatgattttgagctagctaggctaagagaggtcgtagggaaagtgaagaatcatacaaacaatataatgattgcatgattagattataaattagtaggacaatttgcatttattattaatattttatgattatatttatggtggatcctttttttttaagaaaatggatattatagttataatttctcaattctgaagattttattaaactccatgtgtattatttatgctaaatgtgaaacatacattttttataattgtagctcgatgacgatagaaaatacgacggatgaccactagagtcacatgggtaaacttagaacatttacctaggggaacaattgtatgcttgattgtggattgacaggattagggggtggtggtgtatgaccaatttacccctaagttattttattagttaagctttaaagaaatggtagttttggcattttatttagtgttaagtggattattccactaacctacagctggtctttgttcattaattagtaagataagattattttatctttatcttttcattgatcacaa

SEQ ID NO: 45888 - DNA, 2737 bp, Cannabis sativa
tccatgcgaagatctttatcttggtggcaaattgagttgccaaaagcttttccaccaaactgaatgtgaatttgatgcagaagtgttcatactttcctgaatatgtatttaaaatttttgaaatattttgaatcgatagaaaagtggccgtttttttcttttatatatttgttttttttaataattgggcaaactcacgtaacactcatcctaaaagattatatatgtgtttatatatatagtcctctcttgttatttctgtggtagattttatttgttttaatttgggcaagcccatgtgactctcactccaagagattgtatatataaatatatatttatatatatatatgtaaattattgtgaatttctcaaaattttgtaagatatattaaataactataacgtaaacgaatatgaaaaaaaaattagtctaaattattttttgaaatgccgaaatagataaaggtgcattagttgatctcttcttctaacgagtgttcttgatatattaacatccttttttttaatgttacttttgaatttgtttttgatattttacaattagttttgaaaaatacgctacatttcacagaagaaagaattaggaaagagaaaatgagtgttcttaatttattgttggggtttttatgaagattcatgaatggaaaactaaaatgaatagattaatgtattgaatgattctatatgagtcaaaaacttgctttggctatggagactttttttttccttaaatctgaatctttagtgtcgtattaaaactctttttctctctcgtcttagtacgtaactctccaaaaatttgagttctgcagtttggtactttgcatcttcattcgatgagagttgtggcttcctaatatcaatatacatattatttgattgataatattattcagttgtaattaaatttgattatctccttctgtcatctattcatttgaaaattattgtttgtgggaaagaaatgtctaaaaattatgttttgatttcgttaatggtttttgatgcaaagaagagcagataaatgaaattgtttgtgggaggagatgtctaatgaacatgttttggtttattttatgatacaaagaacgagagagaccatgcaagaggtgcgtctcttgctggagatgttggaagaattttgagacaagaaagaccaccagagacggggagagttctcaggcaagagagaccatcggaggtgcatctcttgccgaagatgcacactagagacgaaacaacatcataaattcaaaacttacgaggttatgtgctttttgtaaaaaaaaatgttatgttttagaatggggaagaacaggttatgttcagtgtttctcaccccctccaaactcactcacactcaaaagacgtctcatgccctaatattggctccgagacactcccaccgatgggttcttggagcccggtagaagaagctccttttgagggaggagtgttactattacaatttattagtcaattttatgttcgaaattacatgccagaattttttttttattttttcatagctgtattgtttatagttacactatcatccctgtaaatttttgaaaaattcctaatttacaatgctaaaagtagagtttttgatattccagtttaccacgcgcgtctaaaaaacttcaaatgtatttttagcactgtaaattattcgaaaattttcaaaaatttacaagaatgatattataagtataacgaacaccgctataaaaaaattaaaaaaaaaatattctatataaaagtttgattaacaaattataataaaagatagaacactacgactcttattattgaggtgcaaataaaatctcacaaataaagtctgccccctctgctctccatcattgcctaccctaaaacccacctaattatatcatgataattaaagctagcctagcaacaatattataatagttcttcttggtgtttgataaaattaataaaaataaaatagtatagaataaattaattaaaagtgtaaggagatatataagatatacccatgatttgagatcttgtatatcttgtttaagggatccctcttctgtatctgcaaggtacttcatctcttgccaagaaacacccttactattacagtactctgttgtatttatcttctttttctgctttccatccttcattgtatatatttattaatttgtagctatagccaatgttaatgttttctgtgtgtaagggaaggtaataaatcactacatataataaaaatagttggcgttacagacagagtatgtattgaaacgttaaagatatgtactaaaaaaaaaaacaaaagaaacgttaaagataagtgtgaagagtaaatgcatacgacgaaagcccaggaaacaagtaacatgagcatattttaataaagtatagtttttaaaatatccaagtccaactcatgtaaagaattcatgagatatatagatatacatttaatggggtatttatttatttttacttagtgttcatcttattaaatctggactatcttgcttatagtgtattcgatttattttaaatgtaaattttatattttaaatttaattgaactaattactttttaatattaaattatttatatttattaatttttttttttcacataaaggatattggcagctaaaccacctgaattttacggtttgtaacacttaaccacaaaaactaaatttttggcggctaa

SEQ ID NO: 45889 - DNA, 1261 bp, Cannabis sativa
ttacctgagatggagtaatatttggtctgttataaagcttgaaaccccacatgaagagaatgatgagagttccgcaaccaaattggaaagcagtaacagtcgccggaaatggatagactttcagaacctatgcacaaactatacactttaaccttttttaacacttttaagatatatatatatgttttaataagattatcacaaattctaaagataccaaatttggtaaaaaaaatatatgaattactaaaatacggagggataccatgataaatacagtgttcatttttctttaaaccaaaaagtacaaatttgtaacaatataacatatttatacaaatttgtaactaaagtatacaagtttgtaccgtattttaaaattttgtcaataatattttatcaactaaatataacgaactaatacaaggtgttacaaaattgttataaactagtattcctaaatttataatatatatattattttttttactgtaaattatgaattgccctttcctcaaaaactattgaaaggaatgtaatttttccttttaatttttaatattatctttaccaaaaatatatgtatatagctacaaccacatacttaattttcaactatacacttttagtttgaacaatattctcatttttgttaggattaaaattttagatattaattagtaactgaaaattttatttggaaaatagcagagaaaaaatggaagaaaatatttttcacaaatttataaagatatattctaatattttttatatataattataattatttaagttttataaaaatccaaaaatgaaattttcgaaatttactattttttttagttccaaacaaaactttatggttcaaaaagaaaatcaactgtacactttcgaacgaacactattctcaattttcttatagtttcgatagtagctcaaatcatctgaaatttagtaaagaagaataaagaaagaataattagtaatttttatctttgaattttttaacaatactgtattctaatatatacggcttgttaagaatcccatgaacttttacatttacaaaatttagtttattaggttctgtcccattatttcgtttaaatgttaatatgtctttgtaaattagcaattttgctctctaaactttgacaattataaaatcgtacgccctcaaaataaaaatgagaaagatttaatattttttaataaatcttaaaaaaattaatttagattttaaaaaaaattattttgaatg

SEQ ID NO: 45890 - DNA, 1164 bp, Cannabis sativa
tagggttccctaaatgccccaaccagaagaccagttccccaaccggaagtctggttcggtggggttaactggggacccaccggtcgaccggttcctactggtccccctgaatcggtcggccagtttagtgcaggaaacactcaaaacttcactacgacctcaaatcgacccaaaacttcaccataacttccagacatgctatttacaccataaagaacctaaaccaagcaataaaacatctcaacatgtccaaatcaaaaattaccattaaagaccaaagtttgagctctaaagctcaaaccttgtctaaataccaaaccaaaccaccaattagctctaattctgctcaaacaacatcattaatactccgaaaattcaaacgacacagcacaacatttacaacaaccttaaatcccaaaaatatgtatgaaacttagcttagaactttaagaaatcaaaaagagaagatctaaggagtttaccttggattgaaatcactaaaagcttgctaattactctgatttgcagcaaagaaaaacccaattgctaaaggtttcttgagggttcgaacaagagaaagagaaaagatgattttctcttaattttccttttttttttctatttttcttaataatacactaaatgaaaagataaaattaagtcattttatctaatagtatccagctgcgacactaaaaactagccacctaatctccaagtctaaatgactaaaatgcccctactaacatgactaaagggtaaaaaggctttaggggcaaaatggtcaaaaaccataactccgattaatcctaacattctaaatatataactatattgtcccactattactaaaatactaaaatataattttattggccaaacgtcgtgttccaatgttgtcgagcacaaaaaataaaaaacataaattttcatatatagcataaataatacaccccaatttcaaataaatctccatatgttcataaattataattaataatctagttcataattaagccctaattatttgctaattcccatattaaaattaagcggtcttgacaaaagtatttaaaaggcagtaaacttttttgaaaactagaaatattcactactatataagagaataattgtacatactttatccatacactgtaggttttc

SEQ ID NO: 45891 - DNA, 1585 bp, Cannabis sativa
accccttcttctagtgatagctcgccttctagtgattttggtaaatcccttaggtgtatactcttcccctttttaatcgtattttataatgattgtaacgcctcgtcttgtcttgtagacatgggttacgaagacatcctagatcgtaaggggaagaaaaggtcatccaaccctggagtccccactgccgccgaggtggttcctcccaagaagcaaaggaaaaccactactcaaaagaagaagttaccggctgagcctattgatctcgaggtttcggacaacgagatcaaaaagcaagttcctcctccagtcatttttcacgccactgcccctcatcccaaggcgactcccactaccgcttctctgaggcagtccatcgacaccctgtcagtcgcagctggaatagttggttctgagtttgccaaggcatacggggtcacttgttccttccctcagattgggattttctcaatcttaggaatccatgctttcaaacaccttggactatcacctcatggtatgttggccttgttagtataattatactctctttttatacttcttttatactcatctatttgtgattctccaggcttcctttgcttcttttgcctcaaatcgactactttttgagcgggttgaatatttgaagggcgagactcacaaattaatatcccaatgcaaggatgtgtgtgagcaacgacacaacgcccaacacgagattacccccctcaagcaggaagccgagagagcgaatgaggaagcagagacagcaaagaaggaagccgagaaggcaaaagaggaggctgataaagccctcaaaatccaagctgacgaatttgaggagaagcttgctgagaaactttccgataaagaaatggagatcgtagaacgatgcgacaaagttggtttttgcgatgtataccgggcctggctttggaaccctaacatggataccagcttcttggagaaaaaggaagaggagactttagctccatgcgagaagaccaagatggaagaggacgatgacaaggttgaggaagaagaagaaactctgtccaagtctcccagcatgtaggcttggtttttctttattgacaatggttttgcccctagtggcacttgtttgtaaagacatatttgcaaggttggacggccaactttgctttttttttttttttatgcctcacacttttaagtatgaatttcattacgcggatgttttcttgcattttatttacaatataaactatcacatgcataaagtttattaggggtttccattgattgttcttcctttcaacgttaagtagttaatttcctactttacgtgggagcaacttatatgcttattcctcaatctgcgaaccgtcatcaattccatctcacgatcatcgggaatgattccattttaagcacattcaaatatatttttaatgaaccttgtcattttatatatttctttattgcttttgtgagtagttaaaatttctactcacgtgttgggtttaagtattttttcaagacatttgaatgtctcgtttagtactttcccctagcgcgaaccgttagtattcagttttat

SEQ ID NO: 45892 - DNA, 1279 bp, Cannabis sativa
agcaaagaactatccaatcaacccaagttttaataaaaccaataaaatttaatgtaagcccaaataaaagtctaacatcacatctcacatccactactactttgtggaggaacatttggcttgccccattactcgaaagattgaggttatttctttggaaaatggcagttgaatgcttccccattggcgacaaaattggtgtgttctctggaatgaattacaagtgttgtttgtgtgataatgacttggatcctctccttcatttgttctggaagtgtaccacagcaaaagctttatggtttgtaagcaaatggagcattcagacttgtttaattccgattagttccgagtgtgacttggttgattggttcttctctactgattttcttacctcaatggatggtgaggaaaagagagagtttctctctttcgttgccattttttgtgagtttatttggtgggctatgaacaagaaattccataagaatattgtgttgcatatttttttgttgttaaaagaaatttctcaaagggttcttcaagtggtgtcaattagccggatggcttcttttcgagatgcccctgtgctgaacggggctggttgcggccaactcccctctcctgagcataaaaccagaccagttttttacacatcttttgtttctggtttaggtgttggggtcgttgttattttctatgatcagggttggctgaccacactcaaaacagaggtgtttgctgttacttcagctcttgaagttaagactcgtgcaggtatctaggcagttaacctgtttattatatctaaaacaaatggtcaagttcacccaaaaaaaaagtattcaatggatttgcatactgtaccacttccacatggtaattcactaatttagcaatgaactatatacaagtaataagaaacacttcattaatgtgtcgaaacatatatatacatgtacacttatgtctcatatgaaatgatcatatgtgatgatattgtactataatggtaattatttgtttgagagaagaggggccttgtgatcaaataatgattgagaaccatgtgcaattgcttcatctacctcaccacaactctctctttccatcttttcttctttggcctttccccacatcaccccataaaatccactcacaattataattgctcctatcaaactgcaaaaacaacactatcacatcacattagctttagtaatagtaactagtgccattcaattccaaaagtatagcttaattacaggaaaaaattataata

SEQ ID NO: 45893 - DNA, 2671 bp, Cannabis sativa
gtattgacttttattaataggtcgtataaaattatattatctttacaataaacacgcccccgatcttggactctgaaccctgccttgtatatcagatccaaactaggtcctcgaaccttggattcggactcggcccctggcccaaatccagacctcgtctcggcccctgaccctagcactagacccttgaccctagaccatggtccctaaccttggaccctaaaccccaaaacttagaccacgaccctgacccgacctaagaccccagcttcgaatctcaaccccaactctggacctggacccaaactttgacccaaactctgctccaatcccggacctctcggccctagccctgacctcgactctagactccgaccctagaggcctaggcacaagctaggccttgggactccgaaccccaaccttaggccatttaaatgtgtaaaactgttgatgcatatgttgttggtattgtgctatctgacattttgttgatttgtaatgtaatgactttgctcatgttcatttcatctttagtcctagggagatcaatatagtatatcacactcactcactaatttgactatcttttcatctaataacatgtgtgtgatggtcggatagtcctaactcggttgattgtttgatcttggctaatttatagcattcttaatgaattacttcctttcaagaaacatgtggtaaatttgagaattctaataaatttttatgttaaagctaaaaacacatgtttaaatatgaaactattgtgtgaaggtcattttggtaaatgaacctaaaattatgaaagatattattggtatattgtgaaaaaggaatctgtggtaacggtttgttccgtgctcataaccattattatattttttcaaacttaaaattttgatcaatcaaagaatagaaaaatcaagcaacaatttttacacaaacccatctcagagactcagataaagcttcaaactttgtaactttaatggcacaattcactgcccaaggacgcgttaagctgctcttcaatggcggtgatggaggagtctcatttgggttagaacccaatgacccatttcactttaaggttagatcaatccaaccccaaaagcggaagctcaagctttcaggttcaactactcgaatttactcttcttcttcttctttcttaaataaccccacaagtttcagtagtagcgaagcccacttgaatgttggtgatgatgaagttgttgttgatcgtggttatggtggtggtgacgagtatgatggtgatcttgagtttcagagggatgaactagcttgtttcagaggtctagtcttggatatttcttacaggtcatttcttttcttgttttgtaaatgtcccatttgcttatttcatgcaagtttggatttttgtaaagtatgtgagctcttaataggttggttttgaactctgctgaactattttaatgagcatgttggttaaattaatggagaaaaatgagtgtatcttaaaaagaatcaaatttacatcaacttgagtatgatgaaatcatgactctatgtaaagtgctgtaatgtggctaatggtgtaaatttattttcctaaaggtaaacagtgggattagtactcaaaactttgatattgtaatcagcataaacttatgatttttttgagcggcatatgtatccaataattgtaaaattgtaattttacttcaatttcaatactacaaaagactgttattgtcataggatacatatatagtcgaaatcctagatcattggctgtggaggaaaatatatatagtatcagttactttcaaatcatcttcttttaataaattctaaacgaattctgtacttacgaaattgaagggaaattacagttttacaactattggacaattatgctgctaaaaaaatcattggatttatgtcgctcacaaactcaaaactttgattatatagtttccatgttagtataagctgagttttagccttttcttgtttctcctggtgttttcatgttttgaattgttagctaaaggaggataagtgtcttagttttccttaatacaagaatttgtgttagtgttagttgggttgcaatgtaggcgaaatttgctttggttcatcagtgcttgagttatttctttcttgttttcttttcttcctaccacttcagaaggatttcagataaaagaaagtctgcttgctgttttgattgttgttgtcctcctgcatcaggccagtcaatgttgtctgctggaagcgtgcaatttgtttggaatttatggacaaggtgggactgcaaaagctcgaattttcacgttcgatgatcaaatcatagcaacatatatttgctttggtgatgttattggttgctcatctagttactagtttgttctcattcttagttcatctatttgacattgatgactagatttagatccacttgaaatagttattaccattgcttctatgaccttcacttgcctctgtgataggatattccgaacaactcgtttaccagcttgtttattctctttttctctgtctatgagataggtgtagtttatgttgagcattgtgttcctatatgaatcgaatatcgatattaaactcatagcttttgcggtatgataatcttagaggtttaagggaaggcgtttcttgt

SEQ ID NO: 45894 - DNA, 3425 bp, Cannabis sativa
ttttttaaaaacaaaaattttcaaaatacaaactttacttttagttttgtgattaaaaaatgaaaaattaaattattactaaattcccccatagttattaaattatatataaatcactataaaaaatatgcatgttttattcttttttatatacataagtttttttaaaaatatttgccctacttaaataatgtggttcatattaacgttgcaaatatgggttgagttttcaatactgcacgtaatcggtacgaatctaagagacacgagtacgatttggcatgaaaaaatatatgtttaaacatgacatgaaaaatataaacttaggcacgacaccacacgaaaaatatgtgtggacttagacatgacacaactcgacaagcccaaaaacacgacatataagaacgatagattagctcaaaagcataacacattaaaaagcttaataatttgataataatagtgatagataattatttttcaattaaaatgatagtaatgctcaaattataacaattatagttttgtttttttatatgattgtgtgtaattattaaaaagtataaatgtaattaaaactataatatacatatatttcagtatgtagagttaccttatataccattttttaacttttttttgctttttaatttacggtttgtgttgccccagtagtttttatgtaggttgctatgtggatttcaattgtgatttaggttgttccgttggttactatgtgagtttttatgtaaatttccgtaaacatgtaaaaaaaaattgttttgaagtgtgaaaataaaaaaaaaaaatcctttttagcatttggctcatccattgaaataaaaatacaaaaatatggagcccaattttgagcccccgtatcagaaaataggttggtctatttaagaaataaaataggccaactcgaataaagcacggtacgaatttgagcacgacacaaaattatcaaatttgcaggtcatgttgggcctaccctataaaattgttgcacagaatgacaaaccgtatttttttatggcacgacacgacccatattttaaaaagctcaaaatatatgggtctgactagtatgacacacacatgtttataactatagatcatatatataaatatatatactatgttaatattatgtgcaatgcacgtataattaattttattttttaatttttattttcgttatgtatatttttggctatataattagttttttttttattgttattgaataaataatattatttttattaaaatgtatttaatttaagtttaattttttagaagaaaatataacaatatttgaaatttattgttaattataatttaatttaaatatgaatatttttttttttttttatgaataagtatttttgtattcctcaaactgaacatttacaacctattgaagtcattacatttgtatatttatacaataaatatttataatctcataaatcaatctctatctttggtgctagctttacaaggcataaaactaagaatcctatatttacaatcacattgaatcctaaaaatagtttgttcaattatttacaatttttgattccaaaagacatcattcagaacacgtcatatatggtagatcacagctgccatcacaacaaatagcatgttttgtcgattgttgctgaaatttttggctcgagaaatacattgcaatattggttgaagttaaatgctttttacattccaattcactcaatgttttatcctctccaagcatttcctcctataagcacattgaaaaaacaaatcctcaatgttctccttagtattatgaggtacattattatcttttcaagttttttctttttttttttttttttttttaaattttattatttaaaaatatgtgaattgagtaaaaaaaataataatagaaagatacttagatataaacaatgaatttaaatttaaattaaaatgttataaaaatattttatattatataaacacataagaaagataaacaaatatataataaattgaaatttaaattataaaacaacttttggttatatattaaaatctaatataacataaatataaatatgtttacaagagatgtcacgaccaatgtctgcttttataaaaatatcctaaaataaataatatatataaggcaactttctcaacctcttacctatcaaaaccatcaacacttacttttttaagtccattaactaattatatatatataatgactgcaaaattaaaagttttaaaaaataatgttacgaatacgataagaaagaggagcttttatttttgagaataatactttgatatgtgaggttgtgtattcttttgaggaatataattgctttgatcttgtttgttttttttgttcagttggttggaaaatgtaagtttcaatacagatattccaaatcccataaggctacaacggcatctaactttttaatgccttttagtttttacgtaccttccgtagttagggcaaaaaatgatgctcttattgtaatttgtttgtattacaaaaacgtggaaatcacaaagcttataatgaaattacgttgttacccatgctctaataattaacttcgtcttaaatttgttgtgttacaggcttttttacttggatgtattgtatgaaaccttaggtgctagtagtcaaagactcaaaagagagttcatgggttgtttcgattattcattcattattgaaagctacatatataatatatatttatatatttatgtaatatgtatagtttttgctgatatatatatatatatataattgagttgagaatatagtacttttaagtgagactgatgtagcaaaggaagattcgtggaagatggtatcttatcatttgtctgtacttttttctttttcctttctttttttcttttttttttttttttgtatccatgcatactgattcttacacttcttcttcttcttcttcttttttttttttcaatgctgttttatttattattcatgaaattcttaaatatggacatttaggacaaggatccgtcagtgtttttgtttatgttacattttaagttatgaataagttttatcatatttttgttaggtatagcgtgtatcatgtgtgagtgtatatttttatatatatttatatggtgcccttttaatgggtattacctacccatgaatgggtaatattagaaaaaattgactttttatgattaatttttttatttaattaaacgaatttcttatttttacatttgatagactggagttgttccatcagttgaaaaataataataaaaaaaaagctgtcggcaaaaaaatgataaaaaaagttgagtttgacttaaatatttttcatataatagacgtatttttgatatagtgtaaaaataagtattttttttttttt

SEQ ID NO: 45895 - DNA, 3525 bp, Cannabis sativa
agcgctcttttctcttatatattttatatttaattagttgtcgaaaacctcagtcaacagtaatgtatggtaagtggttgaaaattttatgatgagaatcgttccttaataaagttaataaagaactatctcacaacattaaggatcttgatgagaaaaataaatattttgactctcaattgatttcaagaaattctaaaattttttcttcaacgaaggagcttgaaaaattgaaaaagaaatgttaaaattctaaatctaggttctaacatttttaaagaggttcaaaattcaggataaacgagtcatgctaatttgtgttttgttaagtctcaatctaaatcaaattgtaaatttttcaaatctaaatatttggtttttggatgttctaacattactttgcaagcttctaattctacagcaaagtgcaccgctgttacataaaagaagcagattggtaattgacaattctaaaagaaataggaattggttcattcctatatgccatttttgtagaataaaaggtcacattcgatctagatgtattaccatacaaaacatgtttcattctaaatattttagaaataaatatgtttctcaaaaacaaaaattagttgtcaaaaataaatgtgtggttagtccttcttgttttaaatctattacttcttaaatgtggtattttgacaatggttgttccaggcatatgacaggtaaaaaatattatcttgacaatattagaccaatgcaatgtggtgaagttacttttggtaatggtctagctcgaaaagtcatagggatgagaacttttatgtggtgtttggttaagaggaatgaaaatataggaataggaatgtgaatgggaataggaataggaatgtaataaaatttaaaatacataagaaaattgataaaaaaaaaaacattaaattttttctcatgttacattagaatggtctttccttccattttaaagtggaatagtcattccaccaaaatgatggaaaggccattccattggaatgatattctaatactttaaaatatgaccgaataaaggaagaaaatgaaaattatttcatttccattctattccattacattaccttcaaccaaatgccaccttaattttgaaggtctactgaggcttaagagcattatgttggttaaatgactaagagctaatttctttaacattagtcaaattttttgtgagggttacgctgttaattttgatagtactcattgttatgttctcagtaacaataataaaattattttgcaaggatttagatctaatgataattattacactaccactacctatgctacttgtcactctactattaataacacctctatggcataaaaatctgaaacattcatcacaaaaatctgagaaaattatcaaatgcaagaattgttcaagaattaccaaaattggataaagaattcgtgggaaagtgcagaccatgtcagcttggtaagcaaataaaaatttcacacaaaagtgttcctgatataaatacttcagagttcttgaactactcctcatggatctgatgggtccaattcaggttgaaagtttgaatggtaagatatatatttttgtgtgtatacatgcttttatgcttgaaattaaaaattgaaaatgattgtaatattagtgaaatagttcgcattaggagtaatcatgtaaaagaatttaaaaataccgtgtatgttgaatttcataaatctagtgttatttctcatgaatcttttgctcctaaaatttctcaacaaaaaatggagtggttgaggatccccactttttcctgatcatgtttataggttagacaaggctttgtatggtaaacaagcacctcgtgcttggtataagcgtctaactgagtttttgctttctcatgattataaaaaaggaaatattgataaaatacttttcatcaaaaatattaatagtaatgttattgttacttaaatatatgttgatgatattatgtttagatttacttctaactgtaaagtgcaggtttttgtaattaaaatataacaagagtttgcaaagtttgaaatgatattttgcataccaagtaaactcacctattttttgggtctccaaggcacttttgtctctcaaagtaagtatgcaaaatacttggtgaaaaagtttggacttgaaaatgctaaacattctaagactcctatgagcaaaaccttgaaattatccaaacatgaacaaggagtataggtagatcctaatttataccgaagtatgattggcagtttattgtatcttactgctagtcatcctaatatttgttacagtgttggtgtttgtgctcattatcaaggaaatcccctagaatcacatgtttctactttgaaaagaatcatacgttatgtaaatagcactattgattttgagatttggttttcaaaagacattaattctaatctggtttgttttagtgatactgatggggcaggtaatgcagatgataagaagagcaccagtggtggatgtttctatcttggaaactgccatcccaaattttgcataggatgacatgacatcaatctgagtgacacgtgaatattttaaaacctggacgggtggtgccatcctcgatatgtcgtccagagtgagttatcccttggaaatagtttatttgacgattaagctagagcatcaggacggggtaaatggtatcgtccaacaattggaatgtttttagagatactttccttatttattttattaatttaatttatattttaatgggattttcgcacgtgttgttgtaaaatgggaaacattcctatttttgctttattgttttacatttgtttgggaaacctaattaagctaattcttccctatagatagtgaagttatttctctatttagggatccaaaatcaattgttgaagagatctcttatgttttaaaaattataagcttttgagagatatcaagaactccttacttcttttctcacaagtaatacaacaaaaaggagagtaggctattacaacaatcacatgccaaacctctataaatatttgtgttcttattccttaattttatatagcaattaacatttattctaatcattttaattaactcagtgtcgttggctaaaagcgaggccaatattttggtgctttcattgagagcaaaagaacacgatcgttgtttcgattctcttcaaaacacacaaagatggttgtgactacaaggagagaaaatccgactaaaacaactaatcccatagctacagatcctattgtgcagactctagcaaatcaaagagatccagtgaggacggatcccaatccaaccattcctcaacctccaatgggtccctactcaacaggtcagatgacataccgaggatggtaccacccgtccaggtttccaagtgacacgtgttggaggtccaccaactggagggtctcaggcagacattggtgatgataatgaattagaggccctgggttgggtgcaacatcataccaacaccc

SEQ ID NO: 45896 - DNA, 3408 bp, Cannabis sativa
actaaccttggtatcctaattctactgagcgggtttggggaatcattcattatgtgacttttgaacaaaattgttgaatttttaaggtcaacacttgccctggagtctaaatgagtacttttaagtgctctttttgactatctagttgaatcacctttggcctagggttggcacatcttgtgtaataaactatttgaattgtcgtatggtggtattaatgcaatcataaatgaagttgataggttgtacactaatccctagattgaatgtggcttttcccatccattaatcacacgatgatccaacagcttgcatcgattcccttttctataaatagccttctactccacttcattttcattcactcctccaccattcttaacaccttctaatcactgattcattcttccttccttcttgagttcatatccatttggaactccttaacaccttgtcattccaaagtttaccttgtttcaccagcgctacactttcaggtatttcttttcttcacttctcgcctttttttactatatgaatacacattcgatacactcgtaatctagcgcttgcttatgcgtaagttgactagtagcaatgatccacatgtttgtacctattcaacaagcctaaccatgtgtccattcccactcccttttttaaatttttaggttgggcctaggggtgaaccctatatggtgtggccttgggttttatgcactttacagtatatttataatatggtgatgtgccttgtatattgacaagtgggaatcagattcctaatggagacccaggggtcatcctttgttcctgatggggtcattcccatcgagctttcatccgagctgatagggatgttaacgatcccttgttgaggtaccaatgcttgatgttagaatgttcaggctgtctagagcaaatttatgagttctaggagcgcctagccaaacttagggaggaggttaagttcttgaaagggcagaatcaacctttgtttggcgatacagatgcccacctttgttttcttaaataagtacatcaagacatcacggaaaaacttgctcactcagagtgttatattcctcctgaaccctcccctaggcatgtccccatgtctctaaacttgaggtcagttgtctgccagtaaggtgaaaagggtggttcttcatactaccccctacgtcgcacaggattatccatgtggtgacgctttggttgtgtctagatcgagtcgaaagacctcatcccatcgaatgaagaacatgaagtgtgttgcttcttgttctaacttattctgtgacattacagatatatggaccaaccacgttgcacaaacaagcctagcacaccactcccaaatcgcgactgatccatcccttttggcatgtccaatgtggttagtacagttactcagtctaaattcaggaagttggtgcaccagtacactatgacacaagattttaaattcctttaaaaagattgtgctcactgacctcctgaaggcatggtgacctttagtgagtatataccaaaggtaggtgtttcttggccacttcaactgttctacgttgagatcttaaactattttggtgtggatcctctacaacttatgcctaacggttggaacatcgtgacgtgcttctacattgcctttaagaaggcagttagtcgggcgcccacgaccaaagaaatgcaatatgtgtgggttcccaataagagtgagaattttattttatttttgttgttgtgttggttattgttgcttagttttttagttgtcatttatggtgattgtctactgattatcgatgaattatcggtagattctcgataggattttgtattacactttttgttgtcatgtttgcattttatttctattattattgtgttgtttaacttttgttgatgtcattgataagttgtgttttttcttctgttgtattctgtctatttcttaataggttttttattggttctcgatatgttttcgataagattctaatacttgttatgtttttttctttaataacaactgattattacgagagtgttattttctcactcagatgaagaagcatatgttaggacaatcacttataatgatgttgagatagtgattcagataggtgttgatgagaagcatccttaatatgacgcctaggatcctactgttttcgatagattctaaaaaagtatcaaaaacaaattaaaataacaacttcatcgtattagaattttttttgtagttttatagtaataccttaaggtttaataatcagattagcaactctaactagattaattatgtattaatgagagattgtattattatataatttaacatgtgaaattattttggtttattgcattttaaaaccccgttggtgtgttaggggcattttttttaattttgacccaagaaggataaatttgtaattttatgatataatgtatttatggactatattattatatagtatatttattctgtctttctgcaagtattatctgatatgtcgacacaatatatattcacaatcgggtattttgggtcgaatcgggttcgaggcccaaaatatatttttaggatttatttatggaatttatatgataaatgagaaaatttgatttattgtgatacatgtgcgtgtgttgaaatgacatgtttgcccttgattatatgtgtatggttatatttggctgtatgagtattttggttatttgaccacttaagttattatccaacaaaaaaaattggaaaattagaaaccatttttttttctgagtttgaacccctcttagccgacctcctctttctctctttcttacctttttcattttcaaccaattttgtggaggaaaggcttaaagtggagtgagttttgcgtgatttattgcttgaagtttgtggaatttgtggtaaagcttctaatccctttttatttatgttaaattctgatatttgaagctatttgagtttgttcttgatgttctttggttgagtttgcatgtcgatgtgatttttgtgaattgttggtgattttagtgaatttgagctattgaaagtatgtatattgcatctaggatattttaggggattttagggttgagatttgttatttgatttctggtaaaagctttgaagttctgggtttttgccttgaggatttgaatttcaagcttgagcatgtgtgtgtgtgtgcactatgatatttgtgttacacacttgaattttgttgtttgttatattttttttagtattgtgtgatgctcaaatgaacaccaaggttagattgatttgcttttagctaaaagattggattatgcatggttgtgaatatgttggtgtgaatttttggttgattttcgagtgtttgaaaaaaatggcattttaggggttcc

SEQ ID NO: 45897 - DNA, 1469 bp, Cannabis sativa
cctcagcaaaatggtgttactgagtggatgaatggaacactgattgagagggttaggtgcatgctactacgagttggtttagacagaaccttttcgagagaagctctttaaacagcctgctacctaatctaaagatcaccatctttgccaaacaacttcaagaccccacaagagttatgaacaggtaaacccccaaacttagatcacttgaaagtgtttggatgtactacatttgtgcatgttagacaagataagttacagcctaaagcattgagatgcatgtttctaggctaccctgaaggggttaagggatattaagttcgagttgattattatgtagaaagttggcgatgattaatacgtatgatccaactcgaggagaagtgttagttataaattatatttaatagttgtcaattagcttatttctaccttctatttttatagttgataaatgctaaaggacatttaaagatgtctaacagtttaaggagatatcgtgttgttattgatataacttaatattaaatctcacatattttatttaaaaagaataagtttagcttttcattttttttaaataagtagaacactatgtttggattaaatttaattttatattgtattaattataaaaatcacaaatttaaatacaatacaaatcatattattcaatacacaataaatggtatgtgttagctcgtcttgtaatatttattaactcacaccgtattgtgataaggtggttaaagtcggtgtccagatcgaggttagggtcgaggtctaagtttaggtccaaggttggtgctcaaggaccatggtgatgggtcaagggtcttgatcaagatcaaagtctagaggtggtgtttaggtcggggtccacagggcccagggtttgggttggggttcggggccagactttgggttgaggatggcgtccaaggccgaagtcaggtcgacgttggggtttagggtcaagtcaagattcatggtcggtatagaggtcgaggctagtggatcgaggtctggcactggggtccaggttagggacgaggtgagggtcgaggtccggtgccgaagttggtctaaggtcagggacatggtctcgattggggttggagtgtgggtcaaggtctagggcttgggcagtaattaaggttgaggtcagggctaggggcccgtggttgggtcaggatgtggatttagatacccaaatcaaggcccgattcaggtcagggtgtcgaggttcgagttcaggtttaaggtcgaggtctgagtccgtgtctttgtgttttgggtaaaggtatgaattaagagttaggatcgatgtcaaagttagtatcacatatgatatcattaaaaatatatatcatttaattattttttaaattaatacaatataattacgcaacaaacatagtatagtttgatacaacatatttatataagtcaatactaaatatagtatt

SEQ ID NO: 45898 - DNA, 1210 bp, Cannabis sativa
atgtattctatctctgacgcttagattattacatccaaaaacaagatcattctttagtctcccaatcttcagtctcacaactttccctttgaggtcgaaaatggtgtcgagaagagacaattgtggcaagaagagtgtctaagaatttggtaacattagttgatatctagattttcaaaccagatttgtgacctaaagatcgtacaatcaccagactcgaacctagatctttgaaaggtgtttgtcgacagcccgttttgagggcacattacaatcctgtccaaaaataagttttgaataatatttgcatctcttatttattaattattcttctctttagaaataattatcatggtattcgggacagagccctaaaagtttctacaggtggccgtacagtcattatctctacaacatccatatagttcgacattccaatttttggtattgatttcttcgagttttttcttgattcgcatagcagtacttttgggtatcgatttttgcagctcaagtttgaattttcatcaattttgtatttggaaattttttgcaatttttttttctacaatggctactaataaagatgacttccttcaagcgattagtgtgagattggatggaaagaattattcgtattgaaattatgttatgaaaaaaaattgaaaggaaaaaagatgtgcggttatatttctggaacaaagaggaaaccagcagatggtaatgaagatctgttagaaaattaggaagtagacaattaaaaaattctcacttggataaaaaaactctatcgaacaatctattggtacctagttagcaaagtacgagacaacaaaagaagtctgggaccatcttacgagattgtatacatagtctcattttgaaaagttatttcatttggaaactgatattagagctattgaacagaatgatatgagcattcaagagttctattatgtaatgatagatctttgggatcaattggcctcattgaatcaatagagctacgtgcttttacgccttgtattactcgtagagagaaacaaagattggttcaatttttaatggctcttcgtagtgattttgagggacttcgtggttctatattatatcgttctctgcttccttcgattgatttagtagttagtgaattattagcagatgaaatccatctcaagtctcaatcagggaaaggcattctctcaacccc

SEQ ID NO: 45899 - DNA, 2319 bp, Cannabis sativa
  modified_base (560)..(565): a, c, t, g, unknown or other
tattcagctattctattgagcttttagggcccaatttgcagcccaaacaatgttatccacgtgtagaagtgcattgagtatcctacaaagctccacttggccggccagacctttgtagggagcaagtttgctagccacggtacagtctagaggctggctggccattgggccagctagtggtggccgaccagcttctgtgagaaagctggtctgtcacttaatgcccgtttgagtctcggatctctgttttattaggtatgacttggccttcttattggtgagttttactaccacgtggtactaattttttccacgtaagcactgccacgtcaagaggacaaaaatttggataacatttgccccctagtccttgtgcgaatgtttgtacagatagggacttagtagctatgtttgtgttgttgggactgctatagcctttgctaaataaaagttactgcatttttagccttttgaaatactttgccttaactgtctgatctcatttgctgtaaaaaaataattgtttaattgtctttttgatgtgtaggtgaagtaagtgnnnnnngggtcccacatgtactatataagtactttttggggggaaaggccttattcactttccatttttcacattttactttctctcactaaaaattcacattagaagaagctcttccttttctctagagggttgaacccactaagcatcattttcctgagatttttgcactgtttcgacgatcaaagtctcccacattcttcgtcaatggtttcatgtagtgggtaagctttctattcccactatttcacttcatttggttaatcttcccatgaatgcatggacactatttcttgctttgaacatgctttgattcctacgttagattgttgtcctttcggtattttgatccgcatgatagctttagaataaataatgtgtgatttctagaagaaaaagatctgaacctgaccttcattgcaattcttggctctttgagtcacgaagaacccaatgaacacgaagaacacgtttaagttcttgaaaaaacacaagtttagattcgtgaaggtcctagccggccaatgaggtcttgtgcaagacttggccgaccaaagagggctattagagggtctggctggccaaaggggtgtacctaataggctggccagcctatgcctggaacaagggttcctggctggtcactaggctgggtcatggggtctggctggccactaaggcctggaaccctggctgagaaaggccaaggctccaagtggccaacaaatttgcttccctttattgatctctactagggtctcatgacggccttagaggcatatacaactatctccttatgcgtggttccccttgggaactctgtataaggtcttgtagtgagtccattatagttaatagtataactgaagactcactatgtgtcttaataagtgtacttaacatggtactttgtcgataatagaccttgtacattgtgattgacctggaaggtaccatttggtactgttggctagaatgtgtttgtagctttgttaggttgctcacctccccttacctcttctatacaagtcgtactcggtattgaataggggaggtggcggtcgtgctaattccatgtctattttgtaattttgcccaacacgaagtagacttgtcatagagtgtctctgtgtgacccccatgcagtcaaggtggctacaagggatcgaattgggatggtagaaaagggtactcagcctcatattgatgttggcttagagattgactgtggggctgagagtcccgatgttgagtttaatctcgaggaggttgtactggctcagagaaagatatacagaccttgtatcatcctctctaactttccttggggtcattatgataccgatggtaaccacctaaacttcatgagccttcaccacttggcttagttcatgtctcagatcagtcttttgagcctaagattctagatgcgatatcacaaggaaacaggtggatttcccctatatcttctatctcggctggcagttttgagaggacacgagctagtgggctattaggcagtatcctttgcaagttgtctctgcgggattaactagtgcatagactggccctcaattggatggctggtcagagtaccacactgagtaaggagttgtgttacctcttcatccatacttttgagatgttgctacttatttcaggatgtatccaacacaaatcaccccggaaggtatcaagtaccttttggcaatgtttgttctatataaggagctaggctggccacagtccactccttatga

SEQ ID NO: 45900 - DNA, 1030 bp, Cannabis sativa
ttttcttaattaggttttcacaaaaactttttattagaaaggattacgcttagctttttaaaaagctaacttgttataacagtattaaaaataacctaattaaaacataatatatagtataatgatttacatgattccgaaattgtcacgttattctttttttccaataaaagggtttcgtttatataatatagtttaaacacatttggagcgttacataataatgcatatatactatatatcaagtactatagttagtggacaaaattaataaaatacaaaaacaagtgccttttaacattattaattctttaaccctagctagggctagctatacggttggtccttggttggatatatataaaaaaaattcaaagtaaaacacgtttgattttttatattaaactttgaactgtagtacgatgagaaatgttctgatatatatacaaaaggacatgtgtatgactgtatatgtggcattgaaaaacgttggtgtttcaatacgatccacatgaaaaaagattacaatatttacatatatacatatataataataattaaaaatgggaaaatttcgaagcaaagaagataagattttgagccatctttatcaaaaagcaaacaagtagtattttgtaagaagaagaagaagaagaggcctttaaattatgctttagggaccaaataaccaaccatgcattttaattttttatatatatataaaatagtggcagaaaaaaggtaggaaaagtaacatgtttccatttatcgtaaatgggatgtgtcattctccaagtacaaagaaactatatttggttccctattcatccttcttaattatctctttatgatttacaactaattttgtcatttttttcacctacaaaattaaatttatttaaaaatccaccacatatatatatctattatcaaactctacatatatacaagggcttgggcttgattggtttaaaattcaaaaaagttttatgtttttaaaaattttaaagatgagtccacacgaattttt

SEQ ID NO: 45901 - DNA, 1685 bp, Cannabis sativa
tgcggtgtagttgtagtttgaaccgcatattaacaattcaaaactaccaaccgcaccacaccgccatatttaggaaaattcaaaccgcaatcgcgctgtaaaaaatttcaaaccgtattttttttgcggtgcggtgcggacggtttaagaggtaacaaccctaaatataaagtccctataactatcatatgattcctaggatggggtaggaaagagatctaaatgtgatccttttttttttataaataaataaataatttagtgtcaatgtgacaatgcttttataattcaaatcataattatgagactaatcaccaaccaaactagaaaataaattataattattcaaatgcttttcttcttcagatgcttttaatattggaatcataattatcagacttactgaaattattatgagagaaaatcaataagagtgaaaaagaagattaattacctagattcaggtaaagatatccatctccaataatgaggcttatcaccccatataatctcaagctttctacctccaaccataaaacacttcttcccactttctctatcaatccaaaagctctgtctcaaaacaatcacaattaattaattaattaattaattaagggattttttcatttttacactttaaaatagttttttttgtattttttacggaattctaagtaaaaactcctattgcaactagtgctgcaacctaaattgcaacaaaaaattgtatagaaacctgcagccactttagaaacctaaattataaatttaaaaaaaaaaataaaaaaatagtatatgaaataattcccctttaattattgttaattaataatttaattaccagattgcgatcgtggccgatgagaataggattccgagagagatgaaagtagagactcttctttggggtgattgttgtcgtttgacgaaaaacgacagactgagagatgaggttttggtgatcggttgggaggaatttttcccaaacgacatcggaatcggcaattgatttgaagagaggagataccaaggatgatctgcaagcatctcttggagttgttagagatattatcaaagcgatgcactcttgtggtaagtggctaatctccatgatccttttcttgatcttcttcttctttgtttgttattaaggaattttaatgtagtaaaactttcaaatgtaactattactaactttttgtgacacttgtagatgaattagtgacatttgtcccaatgtaaaatataacatgtgaacgtgtcactaaaacctgaaatatcaataaatatttaatttgtttttttttaaaaaaaaaaaatgctatttttatatttgaaaaaaatgaatgagtgacatttggtaaatgtcagtaaaatattgtgggaaaactattaaaatttataaagaattattttcttcttaatttgatatttatattgtactaatactaattattatcataacataattaaattaatattaaagtagataattctttaaacatgaacaatactctatctttatttgttgaccatagagaaaaaggtggaaatctgattgtttatatgtgttgttcaatggatagaaaaatatataaggtggatttatttatttgttttttttaaacataaaactattttgtattgataattatactatatgtaacaagtttataaaatag

SEQ ID NO: 45902 - DNA, 2291 bp, Cannabis sativa
ccaagaggcccacaagggaattcaaccataaggtttcaattaaagtttattttatctttttttattccattttaaattctaaacctaaccctaatacctatcatgtaaatagaaaattatagctcttattttcataaaccaattgatcgactctttgtcagacaaattataaaataaagagcctcttctatttttgaatttcttcttcttcttcttcttctcaataagtcgaagcctatagtgattgagaatacacccacacatgtcaaagtaatacctagcatagtgaaaaaaatattgtgtagttcatgctgtcaactgaaggagaatctaaattcagatcttgatcatactctgcaacagaaaggatcaaggattagagatctgaacgaaatgagtcataatattccgctgccaccaatgtaagtttttctataaacttttatgtatttatttcattgtttcgaaaaattcatatttaaagatgttagattgtagattataatcaaacatacatgttaataaatctagatcctgacaaaacaacttctaataattactatcttatgtccacacacatcttgtattttaaaatatagtgtaattactaccttagtaattacatgacttagtagttaaccaattacagcctgactagtttgtcaaattacatgaaaataagcattcatatgtagttcatatgtagttactaatcagcatccaaacacactatatattttaaatagagtgtaattattattctaataattatattatttagtaattatacaattacttcgaagcacaaattaagagtgtaaatgaaactgttaagttttatgcctatataaaagctagtatttcttatatattattatttatcgataagataaatataaattaatttaattaattaaatttattgtttacatatttattttcataattaacaatgtcataattataatgatgtgatcacagtgaaatgtagttataatatatattcaaataagtagtcctaacatagtcatgcaaaacatagggtctatgccgacttgctaatctataatatcatctacttacacttgtcaagtattatgttcttactagaatattagcaaaatagataagatcatatgtatttgttacgttggactggacggatattactttatatataaataagtaaatatattgttattatcttaatataagtcatatcatatatatatatatattggaccatatatcaattcaatatcaattctaagtggttagtgttctaactaattatattattattcgttcgttaataaacttaccatactaaacgatattctccttagaatttggtctaagggagttaaatattgagtgctcatttctctaattaaaatttatgagaaatatcatttacaatgaatcaaatattttaaggataaaatataatgatgggtgtaattgaacccctcagttgtagttcatctatttgtagttcatctatatgagggttgaatgatcgttatggttataacaatgaataacatgtctatattggttatggagcgttttgtaaatttaagaatacaactccaaacatattagagttatgaagaattaataaaacagtgaattttgtcgcacacttaactattttttcttgcacataaggcaaataattgtttgaattttattttttagctttataaattatttagaatttcttaaaaatttaaaaataaatctaaataattacaacgtacacgatcttaaaaagtaattagattaaaaagctctcctaataatgcaacagatataaagtttaccaaactatcattttaaggaaaatgtactacaattttttcctaaataaatatattaaatttttatttgaaagagtgtttggataaagtatttaagggagtgtaatgtaaaagtttcagataaaaaaaatgatgatatatttaaaaaattgtctggagtgttgagtttaatattatttttcttttgttgtacatggtatattgacttttgctatttttttacaacaatactgccaagcagtattttatactttttttactgtacatttatataagtttcatactgcagtatactgtatttattttttagttttttttggtttgttttagtgttttacgattgtgttccataatttattttttaacatcgattttactgttattgctccatcttgctggaattaatgattgttttctgggtgttctcgtagtgctgtggtggttctatccgtgggtgtggaagatgga

SEQ ID NO: 45903 - DNA, 2200 bp, Cannabis sativa
tatatataaaaatttcccttaaataaatgtctgcagtcaaatagtttagtgcgaaaaaatattgtttttatcaaattgtaacaatacgatgatatagattttaatacaatatagttactttagacttgattttatcatttataacatattttggagtagtattgacaaaaatcgtaaaatttgtaatcagaaattgacaaaaattgtaaaattagtaatcagaaaccagtaaccagttactaaatttttcagcatattcaattattgtacttttttgaacatttgggatatttcgacagctcaagtaacatctaaatcacctaattaattctatgaatgcaatttataattgttaatatcgaagacctttatgcttttcatttaagttgaaacaagagtgagaacactattacaatggccatattactcagttgtgtaaaataccagttacaatgttgaaaacgttaactttgtgaaaatacgctcgctaagtatataaggttttataaactcttagaagtattcctagagcttccttaattgtccatgtgagggaggatgatttttaagacaaattttgaacttttcttaagccttgagtgttcttctacttattcttatctcttcgttcatagagttgtattattattgtaaaaggttgtaatcttttttttttcttcttctcatgtattcatgattctatctttatatataatattgagttttggttgtatttctcctaagtgcaatactgagactattccccaacaatctataagtcattttgataacaatagtctctcatttaagagataatatgtgattagtgcgtgacactgcacatttattgtagaaaaatatcacaataacttaaattttaatatttattttcatgaaattaataaaaatattttttcaatgaaaattttcaattttaatttggtttataatattttgtaggaaaatagggtgtatttacaaaagaaatgaaacaaatggtagcaatggagaggagcccaagtctttagctggtgtagtttcccgtaggcccaggccgagagtttcgtttactaacaataggtaggtccagtatttcatctttgtctatatgcattaaccccataaattgctcctttctttttgtgagcttgaaatgtggcgactatttgactaaagaaatactcaaatttgaaaagcgattttcagtattaatttgcataatctctcaatcacgtgaaacccggtcggaccatttatcattggaaaattatagtaaataatcttaatttataatattattttagtaaatgtttttattttaaaacttataaaaaaataacttttttaattttttttatattttttttaatattagaaacaaattatttaaaaatcatgatatatgtatattaattttgtgtgagatccttagaatgagacttgcagatgaacgtagtacttatcttggtctctcttgtgtcatgagaagtaataaggatgccattttagggttgttaaaagacaaaatgcagaagcgcattcaaagttggaagggtcgtttcttgtccaccgttggacgtgaagttctattaaaaattgtagcacaagctttgccaagttttgctatgtctgtgttcttattgcctttgaaaacatgttcacatctgaaaagccttatgactaagtattggtggagtttgagtggtaggaaaggggtgagttggtttatttggaggaaactatgcaaaaataagaactctagagggatgggttttcagagtttgcgtgagtataatctgtctttgttgggtaagcatggttggcggttactagtgcgaatatataaggctcgatatttttctaactgtacattcttagaagccgagttgggtggcaatccgagctttatatggcgtagtgtctttaagtcacaaacgttgctcaaagatggtgctcgtagtagaataggacctggttcatctactgaggtgcttaacacgccttggcttttgtctgaggataatcagtgtgtggtctcttatcatccggcactgaccaattgtaaagtgtctcaactcatgaagccaggtagtagatagtaggacttgtttgattcccgtgatgttgagctcatcaaacaggtgcctttgagtgttaatcttgcgagtgatagttggttttggaacaaggatccaactgg

SEQ ID NO: 45904 - DNA, 863 bp, Cannabis sativa
ttcctattctttatgctgagtgtgtttatagtgggaggactattcctactaatattgcagaagtggcattttcattaaaatatatttatatattgagattaaaatatataaatgtaaatttacattataatattaatctaggtaacttttataaattgacaagaagaatgtatataggaaatcaaacatgcatcattaattcttttattttacatgattataattgctattattgctagctagacagaataattaaagtgaaaattacatgatttcaatgttttaattttaataagtttgaaaaaaaaaaaaaaaaaaaaacttatttcatggctctttctttagaatttttaataagtttattttcccatattttgtacaaagattggtttgtgtcataattttaagtttattttcacataaattcttaatttttttttacaaaattaccacataaaaatttagaaaaagtatttttcccatattttttattgatgagtgttaaacccataatagttgatttaggctttaggaaaataattcagttttagaataaatgatattttaaaaaaaattaaaaaatatgtaaacttattaaaagatatatttttatttggccttaagtacaagttaccccgccttagcctatataagagtaaatactattttaaacattgtgttttacaaaaattacagaatgaaccttgtgttttgtaaaataatttatactttgtatttttcaacatagtactaaatagtattctgaattaatttttgtcaaaataaaatttaataaacccgatatagagacgttataacaaaactagttacgtttttttacatcatgctagaaattatcttca

SEQ ID NO: 45905 - DNA, 3196 bp, Cannabis sativa
tacatatcttctgacatcaaatcagatcttctcccttgcgtcagaccatggtagtgcacgtatgtgcctctgaagccccttttttgtccaacgatttgtctaggcaacaacttttaaatgtaaaacctttgagcaacacgtgtcctcattcccatgaaatggcttatagcaatcgtacaccacatgatgggaaaacttcctaccaaccaacaatcaaatcttcatgttgtagtatcagcccatgtggcatgttgagtaagaaattctaggtgggtaaagggtatgccattacccacatgtgtgcctataaatacccttacttttcatgtacaaagggtgaacaatttcatacttaccaaacctctgctaaaatttctactcgctttcttcttcttcaagagaaacaacaggaatatagagctagggtttatattgtaaacagttgtaatattcaaacactcgcttgtaaaggtaatgtaacagactcatggactagggataattaagccaaaaccacataaaaattacttgtctattatttattgttttatatctttcttaagctctaacttattggtttctgaaagtctcggtaaatattttggtgctttcattgagagttgaggaaagtttgctagtcgtcgcaccacctcagccatggtgaatacacaaaagaacataagcaagaaaactccattggacattgttatggaggaggcagactccctcgcctctggtctttagctaggggtgtaagaggagaacgtacaaccaatgctgagaactaaagagaggatgtcaagaacgtgtttgacggcatcaatgatgaccagaaccataaagacaatgaagaggaggacgatggtgatggctacatgaaagatgggtattataaagatggttactactatgaccataacccaaagttgctgcaagtaaccaaggaactagaagctactcatacgaagttagcataacagaggaagctcactgagagaatgaaacgaatgatggagcacctctaaaacaagtttgaggacttggcagagtttgacgacgaccatttagtggaagtaatgaccgaagagcatgatcatagacaaacggaggtcgaaacctcaaatgcttacaaggataaaggtaaaggaaaagtagatgagctcccacaaaagtctgctccaaaacctcctcaaaaagacacgaatctagccggtgagcctcgaggacacagaaggccactgatgcttttaagcctggacgctcttctgatcctagaggcaaagccgtgccaaataggaaaagtactagagtacctaagaaaatgggtgagggaaccacctaaaccattctgtcaaccaggacaaaaagatgactgtgggacacttatgaggacagttggtccaccgtagacctctgacggtgattagacgccaattacgagaagtacaaaagttaaaatgcaaggccacattagggtgacctcaagaaccaagtaataaaatgaggggacgtgatcttcccgaaagtaacacaaagaggttggaagagcagatagctgctctaaccaaaatggtcaaaaaatagaacaaagccctcttggattcataagatgaggactcagaaccatgtgtaaggaggattgtggagaccccacttttagaaaacttaaaaatgccccatattgagttgtatgagggaaggaccgatccacgagcacactttgaaaaatacaacaaaatgatgcaagtggcccaagtcagcagcgatgccaagtgtttatgtttttccctaacggtgactaagtatgtgaaagattggtggaaatgactggctccgtgattgattaatagatggaaggacttatagacgaccttctacaaatagtttatcgtcgcacgtgatgaggacatggaagtcggctctcttaccaatgtcaaacaacacaatgaaagcctgaaggcttttattcaaaggataagggaagctgctgcctagactaaggtcaatgatgacatgaaattgatggccttccaatctggattggctgttggctctttgctgtggggagatctgcagagaaagagagtgaaaactttaagtgagtttatggcaaaggctcaagttatcatccaccttgaggatgcctacgtacaagcttttggagttcctccggctccaactccttccacgtctactcctagcttcacatcccaagttttggctccagtcttaactcttcttaaaacttagttttccccaactatctatggagctactaccttcggtcttgttattttaatttttactcacctgacgtggcccttccacgtggcaaaaagtagaagacatattgaagacaggccatcactaatcggctaggttagtaccgtgcatcattccatcctgcaagataccatggctgcataattgacacaaccaggttcatcttgacatcatgccaccagcaaatcctgaccagacctatagctgtccggctagggtggacatacttcatgcactgggcagtctttcaataaggttggtcggccaagcatacaggcatgccccaacacttgtgtttttctaataagccatccaaatcgtcctcagcactcctacaacttggaacagctcaaactacccacaaaaatagggattcttcatcaacaaataacattctttacggattataaattatttatgttgcatttcaaatatacaatgtaacttccctattttaaaggaatattttcctgtttgtgatacgtagcagcttgtaaccctaatactatataaggggtcttaaccttgtatgaaaaaggacctcaagctgaattattcatgcaagtacgctcagaagcactaagcatacagttctctctctttctcatacttctcacctgcaaaatacattctcattataatactgaagatagtcatagctagaaattacaaggtttcaacttgtaatctgcttggtattatctcaagaatgaatacaactaaaaggggagtaggtcattacttgaacaaaagggctgaacctctataaatctgaatgtctttacatttattattgttctacacgtgatattaatagcgtaatccaatcctagtcagactctgagtcggttggctaaatcaacagtcaacacagtccaaagtttttaatttacaaaagtacgcttgtaaaatt

SEQ ID NO: 45906 - DNA, 1721 bp, Cannabis sativa
gagaatctggagagttaataacaacaatattttattcaaaagataagagataatacagggatatcatatataacataaaaagttgtaagataaccaataaaactaaaatggaatatcttttaattggtgaaattaattacatatatatgtttccaaataagttatcagtggtatactatatcgaaataaaatatagagtattaatatactaataaactaaaagaaccttaaaatgaaaaaaatcaagtgacaatataccttttaaaaaaaatattatcgtattaaacacacaaatattagtcgtcaaagcaaaaatgagcgcacattaccatatttgggggattcaaattcgtttaaccaaatttattgtattccgattcagatacacattgcttaatgcaaattaaatttttggataacgctctctgagtctcccttttccaaactcaacctctctataaatttttgggtgtgataaaccaaagtccccacttttagtcctttagtcatcaatatggacaagtactcttggaacaactctggtttgttggtggtcttgatcttgctcttggtaactctgggtaaaaactatctcttctatacgattattattcttaattcttttgcttcttatatataattatatatatgtatgtatgtttagattgtattaagtagtgaattttgcaggttgtaaaattgaagtgagtgaaggcaggagagtaatatcatttagatgcgcagtaaaccaagattgcctaaccatctgcaatggatgcgccaattgccaatgtgtcaacacttggtgccaatgcgttggtgactggccgccaccaacctccacaaactcatcacctccaacaccttaattaatcaattcgtcataatttcaatgaatttcttatttataataatacataattgatgtctatctttaaaagaaaaggaagaaaaaaatcatgtatcgtactaagctaagtacctattatatataaatgcataacatatattgttgtggtttatgataatatactttttctttctctcataacagatttttcttattttctccagaaaaaaaaaaaaataaaagattcaagcaatatgtgtgaactgggaagaatcgcgtaactaggggaagaacaacatatatgtgaagattgaagaacagttaaaatccataacaaaaattcccacacatatattaaagaaagaaaaaaaataaataactacacgaccattcattactattattttgtatctcggtttcatttgtgagatgattagtagatatagaaacgaaaatctgaaacattacagaaggatttttaagtatttttatttataaagatttatataggaaatatgtgatataaatatcatttgcatatggttcaaattttatatgtaacacattcgcatcattaactaattgttttgtggttgaaaacaaaacattgatggcttggttagaaaagcaagctttaggatctgtttgaatagacatttttttataaataattaataagaaaatatggaataatatatctttatatattaaaagtccctatgtaactgtaattcttggtttaacgatttttggtttaacgattcttttttttatttagctttacgattaacttaacatacttttaacgttaaacgttaacaaataaataaatccaataattaaaccaaaaaattaaataatatttacgatt

SEQ ID NO: 45907 - DNA, 2364 bp, Cannabis sativa
  modified_base (285)..(301): a, c, t, g, unknown or other
  modified_base (2323)..(2330): a, c, t, g, unknown or other
aatcactgaaacagtaaaattgaatgaaatttagaataatttacaatatagaaagtagtactcaaccaatctatttcacacgtgcataaaataaaagagttacgtgtataacacactctttcaatcctagttttgatatattaattttttttaaatttcttaaaaaatttcataatatcttaaataattataatatatataattataaaaagagcattgctattaggtactagtagtgcctagcacctttgcgacatgttgcgttacgattagctagcgatactnnnnnnnnnnnnnnnnnttaaattatatgagatccgatacttagtttgacaaatagcaatattgacacatagaaaagtgccagtacctctggtgctctttagcatttctcttataaaaaaaaaagaaaataacagtaggtattgtacaattttcctaaaataacagtaattcaatacaaccattttctcaaaattcatccacaaaccatttccaatccccattcactttttattatttatttatttaattattattttttccacaaacacataattgctttaatcacaaacagcactcgtttacaacgtgtccctacaaaaatcgaattaatttataataaggtcaaaaaagtagagaatatatcgcgagaaattaaaaaaagagatattgataaaataaaggtgtcgcataagagaggacaattatataagaagttacagctggcaaagatagtcgcgctagatccgagctagcgggtcccacttcacgtgactgcatacccccaatcttcaattatatgaagccacgtgtcccatatgtgtggactggggacacgtgtcgaaaatcatcgatcgtctaaataggaccactttgtcctcttttctagaaccgaggtcaggtgagtacccccttagcttggcttggcttggcttgacttgactcacttggctaccttactccttcgagtcgcgacaaattacttttttgtgactgccattccccacaaatccaattctggtcagaacccttcttttatctttttattttaatttcccaaattacccctcatccttcactttcctttttttgtcgtgtagctggtcaagagttttctacgtggcgttctttcaatggttttgatcaagatcccacggttgtggcgaagcggtccttttttttgtactgtgaatttctttactctttttcagtgcattttcttaataattatttataattcaagactatttaataattgttaatttttttttatgtaattttgagtgattttataatacaatattaaagaaatatattgatgtactttttatttatttgaaaatttaaaaagaaaattaatttattttttttataatcgtaaacgttataattatttaagatatttaataaaattttaaataatttaatatgccaaaaacattataattttttgtatgattgtctacataataattatttacgacacgttataatattttaaaaaattcaaaaaaatttaacacgatgaaagtaaagttcaaacagtctattttcatgcgtataaaataaaaatctcgcttgcaataaagaataaactattgtaattctatttttgacatgttaattttttttttaattttttaaaattttgcagaatatcttaaataattacagtatatcttttttaagtacagtaaattttttagaatttttttaaaactttttccataattttaaattactaaaatgtatatgattataaaaaaaatttaactaaaaattatttttaatgctaaaacaaataaaatatataccaaaataattatttaaggaagtgtgttaaaaaattcagtaggactagttagatttgtttttatttactttttctacataattttttgttgacattacttaaattttaaaaatttatgttataaagttttgagtaatgatgatgaaagatactaattgattaagtacatgttattataaattgtttaaaggcttatttatattttcttttgattaaaagtagtgccacttcgattagtgtataaagttatacaaaaatattatttaatttgtaattgatagccgaaaagaaaaacattatttagaaaagaagtacttttgtttcagtaacaaaaagataaagaaaaagacgttagtttgtcgatttcatacttggaaaaaaaattaaaaaattatagttaatttcattactcttacaataaaacttgaaaaataattaaaaaaagattttataagttaatttcatttagggctcgtttggaacgctgtattaggtcgtattgtattnnnnnnnnttatattgaattggattatatattatatttttat

SEQ ID NO: 45908 - DNA, 4071 bp, Cannabis sativa
  modified_base (598)..(598): a, c, t, g, unknown or other
  modified_base (1776)..(1783): a, c, t, g, unknown or other
aatagactgtttgaacactattttttatattgtaaattatttcaaatttatcaaaattttgtaaaatatcttaaatatctataacatataagaatataaaaaattttgaataaaaaattattctgaatctcgaaaataaataaaaagtatattaatatatctcttttaagagactacattaaaaaagtacctcatattatatattgtcatccttggttacaatatatatatatatatatataaatatatatattaatataatattgttaattaattccaagttagccaacttgtcacaattagagcttctaccatgttaatatatacctataaaaatataggaaaaatatattaaatattgtgactatgatagtaatttaatcaatagggagaatttgacttgttcattatataatgtgtctcatattatgtgatgacatataaataaataatatatcaattagaaaattatacagtcaaccctaattaatgaaatttagtcatcatcaatttatcccacttacacaaaaagttatatatgtatatgtgtagttatcttatttaaagtacataaatatatatacatatacatatatanatatatatatatatatgttgtgttcaatgggataaaaaacgggtcaagatttgatttcccaatcgatatatctagagaaataaaaaacctagctatagtatagttgatgaaactttctttcatgtatgaggaaatcaatgagaaaaaagaaaagaaaatcatgtgtagtgtagggatatatatataatataataatgttataaaattattaaccttcaccatatatatttgtgtggcaattatttgtgttatcattaattaatgtaaaaatatatgagttgaacaagtcaaatatttgttagaatttatatgtacttttaggtctcctacgaaatacatgcatgtgtctaaaagtgtttatatttatatataaatgtttctacaatacatactttaaaaaaacaatgtacggctacatttttttatctatttcgatatttaattgaaaaaaaaaaattagtttaatttttttcataatcatgtaaattatagttaattatttaagatatattctacaaaattctaagaaatttgaaatattttacaatataaaaaatagtattcaaatagtttattttacatgcgtataaaataaaagaattacgtgtacaacaagctgttagaactctatttttagtatgttaaatttttctgaaattcacaaaattttactaaatatcttaaataattacaacgtacacgacatgcactataaaaaaattagattaaaaaattcctttagatgttgaaataaatgagagtgcatccagaaggttgtattgtagaattttcatatatattataataactttctctcatcattttagtaataagcttaattaagtgatatatttatatatatttatattttctattttaatttttttttttttttttttccattaatctgagtatgtgagtttgatttaattataaaagtgtactcaaattcatcaaataaaagatctaataataatatatggttttttgtcatggatctgtgtacttgtacatagctaggtcatatggcaaattaatttcccaagttgtaatatgatatatatatacatctataattgttatcttatattatatggatgacatgtatgtggaattttccaaaagtgatgggggattaattatatcaccataaattatttttagtcacaataaaattnnnnnnnnaaagtaaaaaagttgtgattaattattaattactattcctatattgtgactaaaaagtctgtggttaaaggtatcagtcacaaaaggtacgatttattgtgattaaatgtggttttaatcacaatacttattgtgactaaaaaaaaattagtgacaacttgtgtctaaatactatgttttagtcacaagtaatttcatgttgtgactaaaagtcacatttagtcacaaaaaaataatgttatgactaaaaaattgtcactaaaagtagttattttttgtagtgtatatcaattggatatatagatcaagtttgagtttgaaaattaatttattcttcttgttaatttaccatattatatatttatgtgatgtggttaattgcatcatagtgtattataaggaataattaagattttttcctttaaattatcataagtacgaaatcatgttctttaaatttgttgagccgtttaaaatttctcccaaactataactgaaattgttgaatttaaaatttttttgtccaattttaccaacagatcgtctagcgtgaatgaaaaatcaagaggcataattttgtatatgtcaaaatttgggggtgggaaatgagatttagtgcatgagcaatcgtcacgttagaacgacattggccagaagtctataaatccaattttgaatagtttgagaaatttttttaacaacttaaaatatttgggggtataatttagtacatgcatgtcaagtaaataactaaaaaaatttaccaacagatcgtctagcgtaaataaaaaaatcaaggagcataattttgtatatgtcaaagttcggaggaacgagatttagtgcatgaacaattgttgcgttagtaaaataaaacggaattggccagaaatctataaatccaatatctttaatagttggagaaaattttttaacaacttaaaatatttgggagtataatttaatacatgtcaagtaaataattaaaaaacattaactaaaaacaacaaaaaaaaaaataataataaaaatttgtatatacacttcaatattcataaaaaattatattgtaaatgtaaatgtgtatttggaagatatatattgttcggtaaaagattctcaaaacaacaaaaatatataactaaaaataataattaagattttcccaaatacctctaataattatttacacttattcaatattcataaaaaatgatatatagcatataatttgagcttacccacatggctattaattaattatcccttacactattataattaagatagaattagtttccacaaaaatattctaattttagggaaaataaaaataaattaaaaagcatggatatggatatgtgaaagttgaatgagtagtattaataatgttggagaaagttgattcccctaggtcatatgtttcggctcaatccatgtaattatatcaattccagtcttaattaatcccaagacttttaattaatattacagctaattaattaaaataatgccataattaattaaaaataaattattatggcaaataattacaagtttttgtaaaataatcaaatgaaattaggagcatccaatagggtcatttttttttttctttaattaattaattaataaagctatataaatagcaaatagggttgtggctgcttgttgtaaataattaataattaattaattaattaagataatatgaattatgaaatggaatacatttcaaggataataatgacaaaataagaggatggatgcttcttctgatcaatatataccctccaacattcatttcaaacatattaaattaattaattatacatatatattatgaaaaaaagtaatattacacaatttaaaattataaagtagaagaaaaatcgtgttgtctttttgtctacttgtgttattatatattcattgttatatatatttggattaattaatatatattaatgaactaatccaaaaaagtaagaaagagtgtaaattttactcaattaaaccctagaaatgaggttaattaattaattaatgaaattgaattatgagagagaggtaggcagatgtagtaagacttttttgtcctcataataataagcatcacaatcaacaactattcctaactataaatctcactctttcttcttcatttttttttcaaacatttagactcacaacaacaaatattatcaacatatataaacaacaaacaagaaagaagaaagaagaagaagaagaagaagaagaaagatcatatatatatatatatttat

SEQ ID NO: 45909 - DNA, 1312 bp, Cannabis sativa
tttgtgtttgtttaatatttaatttctttatttttaatatttaaaaaaatagttttttttagttattaatataattgcataagccaagtgaagagtttgtgtttgtgtttgtttgatattactttctttaattaaaaaaataataatttaatatatatatatatatatatgtagttttatttttctacgaaattatgctttgattgatatatataattttataaatataaatatatatatatataaagccagtgaagagtttgagtttgtgtttgtttgatattactttctgtcttttctttctttaattaaaaaagaaaaagaaaaaaaaaagttgataatggttttgattctttgataatatatatacaaatgtattgattttttaatttattttttctttcttaaaatagatttaattatttattgttcttatcatctaatctaatctataatatgaccttttgaaaaagtaaaatttgaaagtgattgcacctaaatttttggtccacacacccaccaccaaaaaagaagtttgtaattaattaattaattaaaattatagtaattaagtttaacaataatttaatttcttatttatgatttttaattttttttttcaggtttctttgaaatttgtttacttggcaattggaactggcattgcttcctttcttcgtaagtaacatatttgaatttaatttaataaataagataataatgttacattaattaattaattagttttgatttaattattattaattaattaattaattaattaataatgcagaggtttcatgttggatggtaactggagaaagacaagccactagaattagaggtttgtacttaaagacaatactaagacaagacattgccttttttgataccgaaactaacaccggagaagtcatcggtagaatgtccggggacaccattctcatccaagaggccatgggcgaaaaggtcattttacatttcattacaagcgatgttatcagtggaacctgatacttaattatactaataataatatttctcggtttttgatattaataggtagggaagttcatacaactgacttcgaccttctttggcggttttgttattgcttttatcaaaggatggcttcttacccttgtattgctagcttgtattccggtcattgtcatagccggcggtgtcatggcttcaaccatgtcgaaaatggctagccgaggacagattgcttatgcagaagctggcaatgttgttgaacaaactgttggatctattagaacggtatgttaatcttattactatgattttc

SEQ ID NO: 45910 - DNA, 1652 bp, Cannabis sativa
aatgtgaatatctgatctgaaattaaacttttttttattttcaagtggaagtacaaatgcaaggtttatctatggagaaacaaattaaatattgtacaaagtagctatatatagggttcattggggagctggttgggttgagtattaattaagaaaatcattaatggcatggtgccttaaagtcgggggtgtatctactactagggtaggttgatttttggaagaactccaccttgcattcatgatatcttcccatatctcgggtctattattataaatattactaattataaataactaatataactcttaataaaaaacaaggaaaaaaaaaactaatatgcgaaaaaatatacttataatttttgtttgacaaatgatccattgattgataaaaatagttaagtatattagtcaaacgctactaaatcccgtggtggctaaggtatcaaacttatgatttgaaaaatgtggttaaagcaaatgatattcttaaaaatggggtgtataaagtgattactgatggtaaaaatacgaacatttgaaaggatccgtgcttacagtaaagtagtagacctgttgacagagtttggaaattgggagattgggtaaactttctggccaggggaaggacaattggatttgggctaaggagggtaatggttgcttctctagcaagtcagcctatttagtccaagctttacaacggatcccccgttgtgaggtttgcccctcgctttggaacaagttgtggaataccagaattcttgagcgccacaaagtcatgtgatggagcattttgtctgattcgctcccaatcaggtcagccttgattaaacggtttcctattattgagaacacatacccatagggtacgcagaacacgaatcagttgagcacctttttcttaattgcaatcaggcctttcacctttggcactcatccatggtatctttcctgtctctagtacatatatttgtgtgggggattggattaaatttatttggagccttaaacacaaaagtattaatgcatacaaggtcttcctttatgcatctattgttattgacacaatttggtgaattcagaatgataaggtacataataataagatgagtaatgtgaatcaatgtataactctattcttcactctcatgcagatatcatagatttccttacgccttctttgcctccgacttactgtgttatctggttccctcctcctcaagactagcttaagttgaattgtgacgttaaagtggggatagagcatgtattgtggttgtagctagagaccactttgggtgaggtggtttgggtgaacacggcaaaattaaattttcagaggtgaggttgtcattgtttgttggcattggaagttgcgaaggatataggttgcaaatttatcatggtggaaagcgatactaaggtagtgatgataattttatcaatgtcgtggaccctaggtgggaaattgagaattatttcttattttgtcaaagaatcatttcctcctttgttacctgtttattttgtagtaccttacgaacttgtaattttatggcacataatatggttaagtgtgcttttgtccacattcagtttgagtaattatctatttcggctattcctaagaacatattttggaatga

SEQ ID NO: 45911 - DNA, 2357 bp, Cannabis sativa
taatctataattttactacattttataagtcaagtaatctacaattaatatatttggttgtctaactgctttctctaacctttatatgcaacatatagatacagtcgtccatctactgaggaggcgacaccacttctttccattgacatttcctcagaagggtatcattctctcaacatatatcaccactgttatcagcagtgcatggacaaaccataggggtcacagaaaaaactttgtttgggaggatcatatcttggagtactgcagaggtattcatcaggtatttttttagcaagtttttaaagtttcaactataattacaagtttattatgttcaatatttttaatattgtgagtatgtcaataagttttcaacagtttgtcataaattcgtacacttgctaattatttttatgtttgtttgtttttatgctttgttttatatttatcgatgtgatatcgataggatctcgatattttgtcgataatttatgcatgtttgtgtctgttcttgatatgatatgatatcgataggatgtagataatttttgatgatttgaaaaaaaatcaacttcttaattatcattaacacttattttgtatttgttaattgtttatctgttctccgtaattacagaaccaccaattctatccaagattggtgggtaatgacttcatttgcttcattctgcatctacccacatgaaggcactggatagcagttgaagttgacattaacttgtggaaaatgaatgtgtacgactgtggttctagaatttgtaattagaagaacatgaaagtcatcctcaagacttggcaagatatgttgccatcattgatctatgcaactggagatttcccaaataataatcagatcatggcgctaactatgagcgacatcaaggagcttccgaggatgcatgcagctggagtcacccacgacttagtttcgaaggtaacattaaggtacatagcgataaaaaagtactgtagtaataaaatttgccttacattgtactaacttcatattttatgttgtgtgtagctgtgattgtgacctttattccattgagtacgtggaacatctcatgatgcaacgtctagtagctgatgtcacgcaagaacggataaagatgtttcgtcaacggtggtacattgatttgttttaccagaatctcgattaaacatgaagttatataattatggatactttgtatattttgtcaaattaacaaaattaaaaatacagttatatatttgtatgttgatggtatatcgataatttttcgatatattattgacattaattactcaatattttttacaagtagagtgcattattgacctatcattgacatattatcgacatattttcgacattactgagttaattatgttttggttccacaatatagttcttgtcgacattttcgacatgatgtcgatatgttatcgataatctgttcgattaattggcttgtcgataatttttttccaaaattagagagaacattgtcaatgtcatatcgacaacatgaacgtatcgatatgttgtcgatatttttcaaaaattgaaaaaaaatctctttctcaacatataagtagagtaacaacctgattttaaagcagttttgaataacaaatacacaatacacaacatgttattacaaataataactagactatgccttaaatgcgagctttgcatgttgctctaatatgacctgaaccgccacagaggatacaatttcgaggtacatatccttttttatcaccagacgggaaacgattctcccgtcttattctagccttgcttttccttggacaacctattggtttcttttccacaagtaccccaactttcatattcttgatgtgttctgggagaacccaatcatcctcatcgccagcaaaattgatggtatcatcgtaagtctttctccacgtttcttttaaataataaggtgagcaaagcgtgtacacacttgtattcgtttttaataccgcgacacatgcatgaacgcaagggagtttcaataacgtaaacacgcctcaggtgcatgtcctttcaactaggttcacatcaccacctctttcaccgttaggtcccctaccaacgttaaaaattggctctatttcattggacccacctgaaccttgcatttttatgaatttttgccaagtttttttcaaagagcgtggccaaaggggttgtatatttgtctatatttttgagacaatcggcgaaccaagattgcagtgtgaacctaataaattcaaccaaagtagttattagatatttcgtgaactcttctgtaacactattgaaactttcggcagtgttgctggtcatg

SEQ ID NO: 45912 - DNA, 1087 bp, Cannabis sativa
tctaaaataatatttaccctattttttcttataaatttaaaatgtcaatgaaattttattgctaaatgcttactattatgcacacttgtatacatagagatgtacacactacgaatcttaattggtatataacactaaaatttaactgaagctttaaatttactaaaaaaaatatataaaattaagggagtattgccaaaaaaaaaaatcaaaaaattaaatataaaattaaaacataataaaatttggctgtcaattacccttttttgagttgcaaataaataaaactatattgtttcataaatatataagttaaacaattttaatttattttgtacaattttactaactcaatttacaaatatttcaaaattacaagattaatgtttaaaaaattatttgccacaaattttttcaatatgtaaaaaatgtaacactttaatactttatttcacgttaaaaaatactcaaaattagttaaacataacattcaataaaaaatactcaaaatactaaaacattacactttcactatccaaataacttttaaaaaataataataataatgataaaaagtaatttatattataaaaattatgaaaaatataaaataaaaatcgcataaactaatattaaaataagagatatttaaatattttgtcacatataaaatgacaaagtgttgaatctccatccatttagcttttccaacattgagctccagggttgtaactcctttgtttttctttctagtttttgtgtagttccaaaccaattccatcacctttttctactattacctaagcttcacaagggattttaatggccggcttggcttatcttcatcgacgtttcaaggttctcttccatggagctggcttctttttttggtggcttctcaagccttgatggctttgtaatgtttccttcttaagtttttaatcccattagtgtgtcaaagttctgttctgatgacaaagttcttcactaaatcattgtgatgtactctgatgatgcttacataacatctgtaaagacaaaatatttgtacataacacaagtctctgttaaacataccttagaaagg

SEQ ID NO: 45913 - DNA, 3288 bp, Cannabis sativa
tcaagctaagttaacaattaaattatggatgagtgtgtattaactgctgcctatttgattaacagagttcttgcacctaattagaaaaataaaacaccttatgagcttctctgtcacaaaggtgttaagtatgaacacttaagaacctttggatgtctagcttttgccttaactcactgctcatacgacaaaagttctctactagaacgcacacttgtatctttataggatatcaccaatggataaaagtgtataagctatatgacatcaataaatataaaaaacaattgtttatctctcgaaatgtcatctttcatggaaacatattttcttttcaaaagttaaatattgacattacaaatctagatcctttttctcaattggttttacctcataccaatgtttctaacactcacgttgatgattatcctttagacaaacatgtttctataggtataacttaataggtatagatgacacatcagatgctcctaaagctagcacagatactgatgatgtccctcccatgcatccaacttcacccccttctacactcacactactgctactgcaacaaggaaatccagcagagtcttctcatcgtctaagctatctcaaagactttgaatattactctactatacaagaccactcttctacacctctcaacattcaaaaattcatgtcttacactaatatttctaattcatatggtgctttcattcttgcagccacctctcacaaggaacgaagacacatacaaaagaagtcatacaatttcaagcttagatgcgtgcaatgtagcataatcacatgcccttattaccaataaaacttggtctgttgtgccacttccacccaacaaaagagcaattggatgttgataggtgtacaagattaaaaacaatagtgatggttccatagaatggtacaaagcctgacttattgtgcaaggatatacccaacaagaaggacttgatttcttcaacacctttttccccgttgaaaaaatggttaccttgaaactattacttgccattttttccattaaatattggcacactctctagcttgatattaataatatctttttaaatggagacttcaataaggaagtatatatggccttgccactagggctaactttgccatcttcttattctacagatactaatttggtgtgcaagctgcataagttaatttatggcctcaaacagtcttctcgacaatggtacaagaaactcttgaaggctctcatttctgaaggcttcaagcaatctcagacagattacactatgttcacgaaagcaacatatgatactttcattgctctgcttgtctatgtcgatgacataatcatcaccgaacccatcatcaatattctacatcaattgcaagagtcacttaacaatagattcatgctcaaggcccttggaccccttaaatattttttcaactttgaaattgcaagagcacaagacaacctcttcttgtctcaacgacagtacacactcaaacttctcaaagatacaggttacataggcagtacaccaaccaaaactcctatggatccttgtctcaaacttgacgaagaacaaggataattacttgacaatccatcctcttatcgtcaattaattggccgactactttatttgactcttccaaaacctgatattacttatgttgtcaatagcctctaccaatttatgtccacgccttgaaccactcatcttcaggctctacatcatctccttcgctatctcaaaaggcacccatgacaaagactgttatattattcaaagtcttctttacatttacgaggatttttttgactcagattgggtgtcctgccctgttactcgacgatcaaccacatgtttttgcatctaccttggtgattgtctgatcttttggtgaacgaagaaacaacccaccatctccaaaagcttagcagaggttgagtatcgtgccttagttgccgccactagtgaattgacttgggtacaatatcttcttattaagactgttcacaaagtatctgatccgatccaatctgatccagaaaatgtggatattcacacttgtgcggattagatcggattgacaaatttaaaatctgtacttgtgcggattaaatgttgtttgacctcaaaaagtaaccgatccaatccaatccatacttatttataatttttttaaaaattacaatatatataaaattatattgatgaaaatgactaaccaacatattcaagtatacatataaaatatataagtaggttatgtaaataatgaagtcctttatcatttaaattttaaaatttatatatgtcgtacttagaataaaatacaacgtactactacaagcttacaacaatatatatacatatgatatgagatattatgttatgtataagtatgtttttctcaacaagttttaataaattaaaagatgaaagaataataaaactctttagtgtgtggtaaaaaataataaaacataattatttcagtttagttttttatttacatgttgtcaagttaattgtaagattgaatcagatctaaaatgaaatctacacatagcgcgaattggatattgtttggccataatagtacagactgaatcggttgaacaaccatacttcttacaaatcttcatatacctcaacatgcttctgttttcatctactgcgacaattaatttactatgcacaccgtcaacagctcaatatttcataaatgcacaaaatatatcgagctagattgccatttcatcaaggataaaatcaaaagttcttccattcgtttgatttctgtctctagcactctacaattggccgatacctttaccaagcttcttttaccacctgttctaacttttcatattggcaatatgtgtatttatgatatatacgatcctccatgagggaagggtattaagaatttagtgtttaattgttagttagttagtttgttactgaccattggtcatcgttggttagttaattagcttctctttcttatttgtttaattagtttgttagtatatatttgtaaataaatttttgtaaaacatccaacccgaacaacccacccaaactaaaatgaaataacctgatgaaaaataaaaatcgaaaaataaaaattcaacaaaaaacaaaaatataaaatataacctgctaacctgcccaatctttatattgggctggttgaaaataatatcaactcgcccaatcaacccgaactacctcgaccaatccgattaagatgattttttttctt

SEQ ID NO: 45914 - DNA, 1540 bp, Cannabis sativa
taatagaaaataaaacctattaaagtagtttattagtgagacatcataaggtaaagcttctataaacattaaaaatgagggaaggaaagcaaccatgtgaattggcgttcatggaaacttgaattctccctcaaaagaacacatgagaccataagatactatgcaaagaatataattcactctcacaacacaaaacttgcacagataaatttggataatggataccatacattgggtccaaatggaataagcaatgaccgcttaactttttttatgttggaaaattacttgatgatcaaaagagggtttagacaagcagaatataaaacaaagaatcacatgttccagagttccttaagaatgaataaacttcgcataatactttttatttactagtcagatggaaaaaaagtcgtgcattaaaatcactaatcatatagaatatatttgtcacaagtttcatgattaaaaaaggccaagattaatttgtgggaaccatataaaatgtatagaaataggatctaagttggtggtgagaagtgtgtgattcctctggaaaattttgaaagtttttcttgtaatataaactaaagagaaaatactaggggggataaagaacaatcaagggtaaagggacattttaaaacattccaagatctaaaaaatgtttccaaacccacatagaggaacactgagtctcttgccttttttctattattattctaaattagcccccctgcttaactctacaatatctagagaccagaaaactatagcatctgctgaatctcttgccttataaacatcattacttacactttcgtaggtagtacactgtatccaaaaagagcaaacgttagaagtagcagcagcttggctgcagaatcagcaaaagttcttccagataggaaaaaccagttgaacagcagaacaagagcaagaaaacatgcaaatgatttcttctcatcacgccacaacaatatatctgcaactgtaatgacaaagtttgaggtcattctatgagcaaatttgaaagtataactacaatctttatgggttttaatcctaggataaagaaaaatatgttctctctcattctaagtaaaaactagaaagaaataaaaagagccctctgttgatgctgtgaatgactgaactaaaagcattagatggcactaaataaaacaaataaaacccatgaaaacagaggtcaactatcgtggtgtctgaactcaactgaaagtgatcgctcgcgtcttattaacacggaaatagatgatcactactgggctcagtatgtaacatataaccaaaatcctagcataaacagctagagctatcgggggtatgagcgacaatcaacaatgaactagatgactaaaacattttcacctaaggatgctgctgtactcttaaatgttaagggaaaagagaaggaacaaaactattcataccattgcagaaaaagtgaggcagaaaatgaaaatggctagaacaaaaaggtaaatatgtagtacaacaacttcctacctttcccacc

SEQ ID NO: 45915 - DNA, 2444 bp, Cannabis sativa
  modified_base (882)..(888): a, c, t, g, unknown or other
taaaattgtcataactcactcaatattgatcctaatgacgcaattcaacttgaattttgaagctatttcaatgctctatcaagtaatatatgacacttcaatcgtaatttggaagttatcgactccaaattttatcctcaagtgagttacaaatttaagctacaacttacccagagtgggtctcgctgtcgcgactcgatctccaaaaattgatgattaaatccaaatgttaattttcacagttagaacattatttgcaaacaaaaatagcctcaatttatttttcatattttttgaattattttattcacatttaataggacctccttcacctataaaatgagagctcctgtagtttattttttacattcaaaaaagtagccataagatcagagtatcttctctctaatttctctctctaaaaattagagcatctagacttagccatttttcaataatccatctcgtgagaataaaaactagaagtagacgtagctccattactgtcacgatacagggagtgaactactataaattattgtgtctctctatttatacttaacatatatctcattctcgttaatccagtgagtctctgcccaaatttttgagttaatatacataataaacaaagattgacatgaataaattaaacatatatctattaaaaataccattaaagttacccaaaacaaccaaataactacactaacaaaaatgagaacaatcaataataaaaactaattacatatgaataaaaaattacaagtcaaaaagttacatattaatctgaaaccagttactaactatatagaaaccagttacgaaaccacaatccaaacttaaaataaatttaagtaaaataataataattataataannnnnnnaataataataataattaaaaacataaaaaaatttcgcaatacactcatcttaaaatataccaaaatcatagcacctttacaataatctaaacaaataaaacaaaaataaaaaaccaatttctaaaaaaacaataaaaaaaaaaaaagatattataacatatctcaaatttactaaattagaagaaatctaaaccgcaacaaacaattatgaaccacttagtaaaaatataaaaattatacataataaagaaaaaatagttatccactgaaagagttatccacttaaataagaaaaacagttactggacgaaaaatacctaaataaaaaaaaataaaaaactaaaaatataataacttaacacccaaacaaataaaaatataaaaataaagatagagaagagaaataaagggtaaaaaaatgaagaatacgaaaaattttaaaaaaaaatcttaatcaatataaaataaaaaataaagaataacaaatttttaactggtagaaaattaaaaaatacaaacaaaaaaaaaaatagtttggaccttcaaactgaaaaataattaaattaataaaataaataaaataaagtaaattaaatggacaagatatctaaataaatatttaaaaaataataaactaaaaaatacacaagcataaaatatgaactttaaaatttaaatttgcacaaatatagcatgttaaatcccataaaagggcttgcaaataataaattaccatataaaatacataaactaaaaaatatcatatttatcaaataaagttttaaaatagtgtaaattctactaaaacatatacctaagaacacactaaactcatgaaaatcctaaaaaaaaaaaagaacaaataagatttttatcccatgatctatgacactagcatggttttatccctgaattattagttttttttttttttttgggtaaattatgttttcttgaactatgaaaataattgcaaatttctctcttcagctgcaatttgttacttttgcaaacaatttctttatgtgagactgatctaaaattaatataactaaagaatcaagacaaaaattatttcatcgaaaatactctaacaaaaaataataaaaaataactattttatagagcattcaaattatatttacaagttgattttccaaacactctaattctttttttttttttccattacgcttcattcgtaaacaaccaatcacatctttttgggtaacatgattgatccctcctgatttttttttctggtgtcaatctaaaatctctttagctatagaaatcattgcaaaaatacatatcttcaattgcattttgttcatattttagaatggtttactaatacagcactcagatggtactattgtaaaacacagattatggtctagcgacaaattcttggaatatatacttgtaaaaataaagctaagatctatatatatatcgtcaataaagttaattttgttataaatattattaattacgtggatgtccaaattttttatttattacattttatttattaccattaatgtaatcaacat

SEQ ID NO: 45916 - DNA, 1167 bp, Cannabis sativa
taaccgtacttcagtgtctcatatcgctattggtaaaattaagtatcgagcccacgttatttaatttaattactattatggaatattgcaagtcattttaagaatccaccttgtggtggtggtgccggtgcctaatagcaatgagcattgctaaggtgcctaacatctctgtgacatgatttcttataattagtcagttgtctataatttttattaaattaaaataaatgatactcaatattgaattactcggtgcaaggcagctaggtgccccttgtagcaatcctcgttcattaacaaatgtctcgaacacaaactttcatgacatgaatggaaaagtcagagcaaacacacatttacaaatgtgtgtgagagagcatattaaaaaatcatgtacctgatcttcaagtataattccagcaaaaccagctcttatataagacttgacagtcctctttacattcatggcgtttccgtacccattatcaccatccccaatcacaggaattgacacagcttccgtgataagtctcccctgttctatcatttctccaaaagatataaaacccgtatcgggcaaccccagtctagcagctgatatcgaaaaccctaaagtaaccacaaaactcaattaacggatttaattgaattactggccttgaaaggactgagatttaagtacataccactggtaaagcagaactcaaacccagctctctccaccaacttagcactaagagcatcgaaacaagcggggccttggtaaatccccggcgattcaagaattcgacgaagcgccttggccggagggtcagcgatgtaatctttgtcacctgagtaagcagcaacggtatggaggaccggagaaactcttttaccggcgacggaggtagacttttggcgaatgatcgaagagtcaaacgcgagattggagagggatgaagatggtctatggaacggtggtcgtaatcgagatcgttgccaaactccgatggtgcagccatggcgaaaagattgcattgaagaagaagatggctgaagaatattcattctctttattctctcgaaattactccagtctcaaatctataattttactcatgtttttgtttttgtgtgactaaatttaatttactcgtgttttctttttcagaataataataataa

SEQ ID NO: 45917 - DNA, 4757 bp, Cannabis sativa
aaaaaaaaaaaagaaaaatcaaatgaaaaagtggtaacaatattatgtgagaatatatacagttttttttttaaaaaaaattgttactctttttttttttatctcacttatatatatcacggtttgtttttttcaaaaagaaatattttttttaaatggtgacatggtgtttaagagttctctaattaacattatttgtttttcttttaattcttttatttttttattttttattagtttaataactaataattcttaaatctatatttaaaaaaaatatttaattaatattattgagtatttaaaaaaaaatacaaaagtcacttaaaatctatatcaggtttttttttttcaaaaaagaaaaaaaaatcaaattaaaaaataggaacaatattatgatgacaaatttgttactctttctttatctatcacttatatagatcaccttttattttccttttttttttaatctttttttgaaaaattatcacccaaaaatagatatatagaaaatcatcattttttttaattcaactactaaaatctatatatatcttaatctatttctcttaatttcacaattcaatttactacttaacttttcttaatattagttctctctttcgagtgttcttttcttaattagagtttgtagaatgtgagtttcttaatacgaaaaagaatggagaattaataagtcttgatatgatctctctctttatatatataaagagaaatatgaagcggtaacataacattctaagatctctcccgttaatattatttgttatctttttaattttctcattttttattagtttcataaataataacccccaaatttataattaaaaaggaatatttaatagtattattaagtatttaaaaaaaaaatacaaaaatacctaaaatctatatcatgtttctttttttttttttcaaagagaaaaaaaatcaaatttaaaaatggtaacaatattttttttttttggtaaatcagtgtaattcattacttcaaatatttgattacatcctattagcatcttcaaagagaagatctatatctatgtatgaacataactctgtatcacaatattacatgtttccccctctatttccctttttcctattgctgtacaatctctaaaaactatttattgtcatgtgtagatacatttttaggccaaacataaatgaatctactctttacttcttccttgattctcctaaccacctcagtcactctcgattcctctgattcccaaagcaccaaatttctagttttccaaatctagtatactgtcgaagccgtgacagcaaaccagaagcttttcctaaacctgccagcatttgatctctcaatccatctcaagatcgcatccaggtcaattgtttcaactttccaattcagccaacctttaatctgcagtagacattgtgaagacaaggaataagagaaaataagatggcattttgtctcagaatgtgtactgcaaagaagacaacagtcatctgaaatcacattaattttcttcagccttgctctagttcgaagtcggtcttgcactgtagtccacataacatagctttgtcttgggatattttgcctattccaaactccatgattccaaattactttcctttgagggggacaaaataaattgtagccattagagattgtgtatcgtgaactaataaactgctgcaaactcactttctccttgaattgatctttgacataaactaattttttccaataccagctcgcttgttgtggggcttggtagctccaccaatcctccccttttatatagacaaagtgtatccatttgatccacaaattatcttccttgtttgcaatcgcccaaacatatttcgtcagtgtagccaagtttcattctgctattttttttttgaggccaatgcctcctgctgtcttcggttgacacacattctcccaagcaattaatccaggccctattgccgtgtgatgccctttccagagataggctctacaaatcatttcaatgtctttgatgatcttcttaggtagaatcataatttgactccaataagaatgaatagacatcaagacagagttcacaagcactgctctacctgctaaggacaagttccttgaactccatgatcttattcttgctgtcattttttcagctaacaccatgcattctttaccagaaatacgtttggcacaaataggaatgcctaagtatttaaatggtacctcttttttggaaaaacctgatctatcaatgaccatttgcacctcgctttcttccattccacaacagtaaatggccgatttatcagaattcggttgcaacccggatgtgcaggagaagagtttcaatccttgaagcaaataatgaatgcttttgaagtctccatggaaaaataggataacatcatcggcaaacattaagtgattcatcttaagttccttgcagcgatcatgatagtgaaattctggcttggttccaatccgaatcattattcttgacaagtactccattctaagaacaaaaagtagtggagacatagggtcaccctgtcgaagacctcgtttcccctcaaacaacccatgaagagatccattaaatattaacgagaaccgaggagccagtttaataaattccccaagaaattgaaaagcctgcaaaatctcttccaaaaaatctcattcaagtgtgtcgtaagctttctgtaaatccagcttaatcatacaccctggccgagcagccttccttccattgtgtctaatcagatcctggcatatcataatgttgtgagctatgaaacgacgagagacaaagcccccttagttctgtgcaaccagatcaggaagaagagtcttgagccgagagcacatcaactttgttgcagccttgtaaatgacattacatcacgcaattggcctgaagtctcttactgtgtttggacccttgcttttagggacaagtgttagcacagttgcacccctcaacatcttcccagaatgtagaaatgataactctgcttcagtaacttcatcagcaactatgtcccagttatcctagaagaagaagcttgagtaactgtcaggtcctggagctttaatttctgggatctcaaagaacaccttcttgaattcttccttagtaaactctttcattaagtattctgcctactgctttgtaaccaaaggcccttgttccatgacactgttaattacttgcttcctattctccattttactaccaagcaattggtgataaaatgagacaaaggcttccgtaattttgttctgatcctcttctcttattccttgttgatcttcaattgaaagtatactattttgcttccttcgttctcgaatacttgcatggaagatagtagaattctcatcaccatctttgatccaattgaccttggatttctgctgtaagaaggatgacaaccctttaagcaagaatccatatcttttccttgcaatcatttcttgttcaatgaggtcatgttgaagtgaatctgcctggagtttcttttgaatctcaactaaatcctctttagcttgagtagttgcctcttgaatgttggaaaactctcttctattcagattatttagttcggcctttaacattcgaagcttgtaagtgacctgaaacattttagtgccagtaacataggacttacaaactcttgtaacaatctctaataatcgtggatgagaggaccacattcgaaagtacttaaagggcattttgcctctaagaatttctggataaattgaaacaattacaggagtatggtcaaacaaaccttccaccgtaaagacagcttcagcattagggtattgatcgatccatccacttcttatttgcaagaactcactcgatctatcttagaccatattctttcatttccttgccttttattgctccatgtaaaaaaactacctctgaacttgatatcctccaactgacagccattaacacaactaataaagtcagtagcttcattgtatttcacctttttcccaatccgttcttccttgcttaaaatctcattgaaatcgcctagtatcacccatgcttcatttgttgcaatcctttttaaatctgtccaaaggcctttctcccctccgcatcattgaaagcataaacatatgtaatgaaaaattggcacttaccatctagagttgtaacaaatagatggataagttgactagtacacatatgaatacttacaacgaaacaagaaaaattcaaagcgaccaatattcttcctccatcatgccatgcattattcgatgtaaaacaccgtcctcgaaacatatttacatataaggccccaagcttgtgggccttaaccctcgtctcgagaagaccaactagtccagctttatgagtatgaatcatgctcttaatttgatttttcttgtcttgactattgatccctcggacgttccaactcacgatcttatccatctcccataggaggcactccccctcctcttattttttctatattgccttcatcatatactgctcctgtgagtgtttgttgtgcttgaacatgagaggattctgcaatatccaaaccagtaaagctatctgataaacaacaaaggaattatccacttttgtcccttctgctactggaatacttttgcctttactcccctttctgacttcctgaaagccatctgcatcaggtagtttctccttaactattgcgtcttgcttactctcttttgc

SEQ ID NO: 45918 - DNA, 1158 bp, Cannabis sativa
cagtttgttctaggataatttacttggttacattatctagttaagctattaagctgaatgctttgctatttcaggctggaagtagaactattgatttagagctgacaacattgtcaagtaccaaccatgtggaattgaaccctagtgatgcaggatttcaggacagatatatagttcaagagataattaaagagatggctaagaatagaccaattgacacaaaggggagaaaaggatacaaaggtaatattgagcagttttcttcattgaaaattgagtgtagttttattttcaatatgtcaaatggtcattcatggatgtttttattcaacaaattaagtatgtttttggaccaatccctgtttgtattctttccacttttcaaaagcattttgctggctgtgctaatagagtacatgtttttctcatggttatttgtcttggtactattctattaatcgggcagtaccctcatttttcttattgttctcttttgtttcttctccttgccttgtttctttacctgagataaataataccctaaaagtacttttttacttgacaacattagctgaccatataacatagggtagttgtatacatgtagtagcgagcacatgatatgtacatacacacatttgagtatgtagacaaacttgtgtgttggtttaatacagtcattttgattgatgacgtctcatcttctttgatgacagttttggtgcttaatgaagttgataaactttcaagagaagcacagaattctcttagaagaacaatggagaagtatagtgcctattgtcgactaattttatgctgtaacagctcttcaaaagttagtgaagccatcaggtctcgctgtctgaatgtgagaatcaatgcaccatcagaagaacaggttggataaattttctctttgtcataattactagtttgtactgagctaatttattacatgcatagtggtttatattataaaagacataggactataggagttaactttaatatggtatggagttacgttcacaaacacacacatatatttatatatatgatttggcaagattctagttgacaataagatcttaaaagtatcttgttttgggggattctggtgtgttttcaaagtttaaggtagatattacaaataatttt

SEQ ID NO: 45919 - DNA, 1614 bp, Cannabis sativa
ttgtatatatgaagttgcaaatatgaagtgtaacctagacatgcatgtcaaaaggatcctatttagttggatgggttagatttctaatttgatggattatttctgatctaaaacattcgaatacttattgaattttttttttttttttttagccaaatcttcgatccggtttcaataattttatgttaaattattgattatgttattgtatatatgaagttgcaaatctgaaatgtaacctataccccattaataaaatatataatttaacatgctcaataattaacactaaaatctaacaataatatattataatctatgtatgtatgtatatagatcttacttgcaatattggggccaataagctagagcatcctcatcattggtataaaccatactaacataatctttccactccaaagcaacttctttctccggcacaaagcttgtcccatacttaacatgtggacttggactaaccccttttaaaaacacagccttcttctcagcctcttgttcaaaaaaccgaaacgcagcctttttaagcgattcgagaagctccaacggcactccatgattcaccacttgaaaaaatcccacactctccgccgccctaaagatctcctcggccgcttcctcgcgatcaggaccgtccaatttcgacaggtctatcgggggcggcaatgtgggattatcattgttattattggtcttctctatgcgctccttcggtggttgcacgtaccgttttggtacttttgtcacacctaaatcgactaggcctttcacaccatttccatctctaacaacaaaattgaaaagagatttttcatcgttgaaagttggttccatttttttggcttgattttgtaagaaagatttaataatttattagaaactgtttgatatgatatatgatatgtactgaatttgtataagtatttatatagtagagtaagtgtgattattaagcgtgtaatatcatgcacattattttgattcataagcggcgttgtttgggaggtaccaccaaccaatattattcttaaaacaaatatatagatatacttagttaaaagtatgattttttttacttttacattttaaagtaattttttttatttgtacgaaaattcatatagcaacttaaagagtaatccacataaacaacctatactatgaaaaaaaaaaaattaaaaaatggtatataaaatgattccctatttaaaatatataaaatttatatatgaatattaataaaaataattagagctatgtcaaagttctatcatagcaaagagctatgtgtatgtaccttccaaaggcaagcttcctaagaggcaagcttcatgtatgtcatacggccatttcataccgttgactaacttgtgtatttaaataaaaaaaattattccctaagagtcgtttggtacaaaatttgacttgatgagaataggtttaatattttttgaatattaaagtatagaaatacaaaattaccttgtaatttggttgttcatacaaaactacattactaaattttgatatttttataaaaatattattttgttattaaataatcatcaattttttttttatatatatatatatata

SEQ ID NO: 45920 - DNA, 2880 bp, Cannabis sativa
cctcactcaactaaatttctggcttcgtcactgattgagagtaatgtatatttttttaaattacaccaagtataaatgtatataaacttgcagagtttgtatatatgcgatccattattctcgcaccatatattaacgtataattacaaaaaaatagagggtacataacataattacgatgtataacaatatacacaactttatttctatgatcataatttgcaacatatggtgaaacgcctataatggtataggaaggggtgtactattatcaaattctataccaatcaaaaccttataaatatctcatatatattttaataatattaatacatgccatgttttttaaaagtgggaagagatctactaaaaacaaaatagaagggagggattttgtgttattcttgtaaagtatttcaagttcaagttttatatcatctttgagctaattagagtggctagttatgcattctcctatagtgttttcttgcacgtattagatgtcatgtgtagtatttttcaagtgtcaaattccacatccatggagttggagtttatttataacaaaacatatcgtataaactatttaaataggataattaatagttgatatgccatttttggaagattattaattatagaaataattgaagagagcagataagaagaagaaattagacgcatgtagatctttatttccttgaaaagcgcatatagatctttctagttcacactttttattttatcttttctttttcacgaattgtcatattcgttgaaattaataagagtagtttgagcatccagctatatataatgcaacctttcaaaatttattcgatacttccaaatataatcattcctacaaaaaaaaaaatatcactaattatcattttcgttattatttttttaacaaatttattattttttataattaataaataattatactatttatcgtggcattcaattattgagtctcaatttattagttttcaaattataatataaagtgtttttacaatgcactccaaaagaaaagtatataagtgcattcatatttgttttgacatttagaaaaattttcagttaaattttttatagatgtgtatgttataattatttaaaatattcctcaaaattttgaaaaattcaaaataatttataatataaaaaatagtattcaaatagtttattttacatgcctataaaataagaaaaattgtgtgtgcaaacagactgtttgaatcatattttgtattaaacatttttaaatttctcaaaattttacagtatatcttaaataactataacgtacacgaccataaaaaaataaactaaattttttcttaaatgctgaaatagataggattgcatcaatatactccttttaagatgattcgttgtaaacttttcttaaaattgcatacttgttatagcacagagctctagcaatggggtaatacgaatgaatatatctaaaaaatattcataataatataatatatattatatcaaatattatacatatattttgaagaaaaataaaaagttctattaataaataaattagataatagtctattacatgatgatatattatttaaagagttgaatcaacaatattaatattgtttacaaaaataagaaagaaaacctaataacaccttcaactaaaagaccaaagctagtggtgaagcattaaagaagcgcgaagaatgatcaatgactatcagtcaaagatcttctaataaaaattaggtaatagcaaccatactattaaatttagaataaaaatagataatcaaatgaccaacgtccatgataataacaatcataataaaaaatcaccttataaatcatggggtcaataaaaatttgagaatcccccagatctgaccatggacaaagatagatatgcgaccaatacaaacgtgctttgaaccaattgagatgcccccaacgtctcaaaaataaacatgactaaaatctccttccatgaataaaccctactatcaaaccaatagcaaagtagtgtatcaacactattattaaaaatatgaacaatgcaaaaaggcaaaaaaataaataaaaacattataagaaaatagtcagcacagcctgaaagccaacccaaatccaccagccatcgccaattccataacaaatcccttggacaacccccaccaccaaaaatggtcacccttagcctcacccaaaatcaatctaaagccatctaaaaccgtacatgacactttcaacacccatgtcccagatccgaagccaaaaccctatgaaaaccaatcttgaccaagatccataaatttgaaagaagagataccaaaacctttgccaccgaaaaaaccagtttaggacgatattcaaaaaatcttaacaccccactcccaaagtaaaacccgccatagaatatgagaaaactaaggaaaggaacgaaccacgttatactcaccaacaaatggggactttccaaccagagccacgtccaaggccagagacagttggtgcgccctagttagaaaaaatctataatcagtcgcgcatatcaaatattatatttagttgcacatgttaaaattaattatagattaatcatttatgaacttttaattgttgaatagatttaaattcatataaaattaattttaataataaaaatgacataaaatttatgacaataaataagtaaattattcttagttcttggttcatttactgtatggtgaaaaatggaaggaaagaaaacttaagagagaaaagtaaagataatataaaaatgagtatgtttgctatgggagaaaaatataggcatgcaccactaaaatttatttaggggtattcataaaatacccaatccaattt

SEQ ID NO: 45921 - DNA, 3248 bp, Cannabis sativa
  modified_base (31)..(48): a, c, t, g, unknown or other
  modified_base (2753)..(2772): a, c, t, g, unknown or other
  modified_base (2869)..(2871): a, c, t, g, unknown or other
tatttagggttttaatcaacatacttgtgannnnnnnnnnnnnnnnnntaaaataaattccaacagtagtctcttacaaagaatttctttcgccaatctgattgtttaagggcctggtaactccttgtgcaaaaccatgccgccttgagttggcttagtctcctcttcttttcctttagacaaaggatcctactagaaaaatgttgtgtacctcttggtccctgtagacagaagtatgagagcagactgctggtggatcaggctggccagggcaagaccaagtggccagccacattggagcatcgcttggccatttggaagaggctatggctgaccaaatcattgattttatggtcagccatcttgtggaggtagtggtcgaccgaattgatgattctatggtcggtctgcctgctaaagtcatggttgcacatccttcttaaggttaggtcaatgttgttgcttgatctcttctacactcaatcggccttgccctcagcataattaccatagagcttttgtgcacttttgtcaatagctatacaacttctttcttggaaatgctccttggtggtgttgggataccacttttgtgtgctatgctgtgcaggattggacaccttgcagccatcccctaatccctgctttttggtaaggtttttgtttggaggtatgtagctgtaggcgtgtccatgttgattgtctagcatgtctgttccttttaaaacagatggacttagttctttgaggaactgagcaagtaccaagtttacgttggttgtcaatgcacagttggctagttgagcgagtgcgttggctgttgtgtcgcctttgggggcttgccttttagtatagcctttgagctgtcttaatagctccgataggccatcatcttcttgtattaagttgtatattcacctaggacataacctacgactagttaagagtcacaatgcatgtctaggtggttagctcgcgcttcgtgtgctagcttggggccagcattcagagcttcatgttctgcctcgttgttagaagctttgtaaccaaccttgttacttcatgcctcagttgccccccaggtgccttggggtccatgcttgcatcgggttggtggtcaatgtacatcttgtgttcttgctcttgcttttctcctgaacttgagattcggggagatatgcctctatgattagccatgaagctggtgagagcttggcctttgttggccatgcttggttgataggtggccttatattggccaagtctctatagttcacttgagtagttggcctaatgctccaagtttctgtagaacctgctgcaactattaatcggtgtacaccattatggggtgtgcctagaagtagggccttaactttctagaagccaagagcaagttgtaggtcagcttctccatgagggggtacctacttttggtgtcggttaggcttttgctgatgtagtatacaaggtgttgtacaccatcttcttctcttgtgaggatagtgatcacatgatgttttatgactcctaggtgtatgcctagctcttcattgtctaggggtttagacaacataggtggttgagccaattgtttcttcagctcttggaatgcgttttcacattcctctgtccacttgaatatttattactcttgagaatgttgaagaagggtgcacatttgtctgtagacttggacacaaatttgcgtttggcttcgtacttccttgatggttgtgggtgactccatgtccaaaaaggacttggtacttgtttgggttcgagcttcatgttgtggctggggaggattttgaaattcgtctaggtcctccatatgcccccaacctttttagacttgacaagcatgtcgtccaaacctccatgttgcggccaatacttgaattttgttcacaagcctttgatatgtggtctttgcattcttcagctctgaagggcatgactttgtagcaatacatgcctaagtctgtcattaagcttgtatgctcctggtttggtggatgcatcttctgtttcttggctttggacatggccaagttgtaacaaagacaggcagattgctgatctcctctcgacatcctacctcatgccttgttgggaatttcaggcaaatgtggtagatggatgttatcgccttcaggttgcatatgtctggtcaacctatcatggtgttgaaagccgagggaacgtcgattatgacaaactgcacctttagaattctggtggttagattttctccaacagagaggggtaatttgatatactcgatgggtgcgatgccttggccaaagaggccatgcatcacttaattataggatgccaagttagcgagttggaacctcatcttttcatgtgttgattttgaaaagaatgttgaaggaggctcttttgtccaccatgtatcttgctgcagtcatattcttgatttatgcggtaacgaccaggtggtcgttgttcgggaaactgtctttggtaggatctcctttttgagaaaagattacgggctctccaagctttggttgcttagattctcattcttttcctgccaggaagtcacttttgagctcgtgatggagtaatctgttggattatattttaccaggacctagatttactaacaagtatgtttttaatatcctaaatatgaatctctaaaatgatgaaacttaaacacatataaagtatgagaaaaccttacattggttgcagtataattaaatgactccttccactcnnnnnnnnnnnnnnnnnnnnctttctgtcgcagagtataatcaaaatctgagcccaatactccttcagctgtttggattcttcatagtcttacatactatgattgaggactaacttnnnatgggtgggcatgcactcaatcataaaaaggctcgaattttatgtgaagaacactatagaatttcgaaattagaagagagaaaagaagaagaagtctcaaactctctagttgtttgacaagatgtaaactaggtttagagtcattagttagattaagagatcattcttttcttttaatactaattcacttaaggttaggattgaattatatggtttaaaaaaatgataaaataatagcaaaaataaattatagtgggcggccatgatgtgggcccaacaccagttatatttttgccatttttcttaaccatttatctattattttacaaatgccatattttctaatttcaatcctataaatgccaaaaatatttatt

SEQ ID NO: 45922 - DNA, 2061 bp, Cannabis sativa
ataaaacatgctatataacttatatataaatttgtcagtatatatatttaagaatctgaagcagaatttcttactaaacacaattttcaatctagccagatatacatttaaatattcatctctctaataagaaagaagaaaggaataagtggcactcacttcatggaacaatataaaccgtatgtggtattatattattttttctatatataaggaaaatcgtgacagtagtcacgtcatccgcaaaaaaaaaaaaaaaaaaatatttgccggataatctatgcaatcttaattagtttgagaaggttgaatgtaaaactgtgtaggtacaagactatatagttaaagagagtttaaatagattaattggtaccacttatcactataaaaaattttactttacttagtcacaacaaaatttgtgactaattataaatcatcatgttgtgattaaagggtccgtaactaaaggtactagtcacaaaaattacaatttgttgtgattaaatatattttgtgtcacaatacttgttgtaactaaaagtaaattagtaacaatctgtatttaaaaactatattttagtcacaattaattttttattgtactaagagtcatatatatttagttacaaaaaaatatttgttgtaattaaaaatttatcaataaaagtaattgttttttgtagagtatatcaacaagtctatcttgttttcttgtagcctttcataaaaattctacaattaagcgtgtttgacctaaaataattaaaggatggatggcttataatgtagcacaagttaatatcaattcctacatattaaatgttagtatatatatttaaagctgactctttattagacaaaacaatagatccatttattatttattgtattatataatattatatcaaattgttttattatatatttatataaaattatgtcaaattttgatatatatgatttaagtagttttttaatgttataagttgttagctgtagcgtttttttggtgcattgtttgatgatatagttttattatttaaatttttgtagacagttttattctatgtagttagcttgttttaaccctttatgatttagaaaagcataccctttagataataaattattctacattatagagtaggagtgtacatcgatttattatttggtcggtttacgttacattttatttaacctaatagatcatattataaaaatttaagtacaacccactcaattaagagaaaaaaaagtttcaaacccacctaatgaattggtcggtttagtcaagttaatccgtccaacccgagcgctaatgttttttcttcttttttattttttttattacattcaattatatattttagttattatgataatgagataaatataaagattgaatttaaaattcaaatcatctgtcataaaaaaaatatagtagtttgaattttttattttttataaatatgtatataaattatataatatatagattatatataatagaaacatatatataacttttttaattgggttggtcgggttagatcgggttaattgggcgggttgatattattttcaacccacccaatataagattggacgtgttatatttttgtcgggtttttcagtttgtatttttcgtcgaattatctcagtttagtatgggcgagttgttcgtattaggcagtttacaaaattgatgtagaaccctattatacagtattgtaatgagctattaaaatgcttaacatctttatcacattacattttataattagataataattttttataatttatattaaattaaaataaactaaatatatataatattaaattacactattaataatattgggacacgattttgtctcatgatatactttcacataatgtattccgtggtacgttagataggtctcagggtatgttactattttttaaccctaattacccttagatcaaccccaaccctcatataaagtaattttattatctaacagttgccgtgcatcacagaatgtaaatcgtgtccctaaaaatattatatct

SEQ ID NO: 45923 - DNA, 2086 bp, Cannabis sativa
tgggttgtatatttgtttatttgggcagttgaaagtatttttgtaatattgttactttttttagttaaaactgaaaaaagcccaaaatttattcagtttggtaaaattaccaaatccataaatagagatatatttcacttatcactttaaaattacatatgatctctatctcattctctctacccaaatcttaataatatactctttgcttcttcctcactctcaccacacaataaactcacacacttctcttttcacaattagagatagaaattgggcagttgatcgtgcccccatctccgctacctatttatgcccccatcacgtcccatccccgtctagggtatccattaaggcaaaataaaacataaaaaatttaaaataattgagaaaacttttaaatttatattaaaccaatattgtcacaaatatttattatgcattcataatccataaaagataaaaagacaaatttgcctcaatttttttttttttaaaaaaagacaacataacccaatagaagataaaaaataaatttgtctcaaagtttgaaaaaaaaaaaaaaaagtcataacccaattatattatcataagtctcccaacaaattaaaagtaaacaaagatgaaactaagaatcgagaagaaaatatctttacacttgtaatccacaataatcactagctagttcactaatttaaatgtatgatatataattttgatcagatttataccaaattaaagcagtttataccaaattgaagaggctagatgatttaaaaaataattagattttgattttatagttttagatttaaaccaaaactctaatcaatagcagacaatatcaatgagtaaaaaaaatattatttctgaaatcaatgatgaagagatgatagaaaagtggaaatagaagaactgatcagtggcatggcgtgcgatcattggtcgtactgatctggtggttggaagagtattttatgttggtgttttttgtggacgtggcgtgcgatcattggttcgtagtcgtattgagtgtgtcacattgtagactttccctatatataataatttttattatatatgtatattcatttattctatatacatatatatttgaacaaaatcataaatttgatttcatatatatagaagttttataaaactaaatttcaaaaaattattcattaagaccaattaaagttaaattgacattgagtattgtgggctctgatgtcaacttggtaaggaatttattttttaaagggttgttgtcttatgatttaaatcaaactaacatggtattaatttcttaggaaaaaatttagcccctataagtgatttaaggccaatttccttatgcaacattttgtaccagattatctcaaaggtccttgcagtggtctcaccgtagctaatctcagagaaccaaaacgcattcataccaggatcggaggacttatttcaaacaagattatgatttcctatgagattatgcattacataaaaatgaagagaggtgggaaggaaggttttatgacttgaaattggattttagtaaagcttatagctgtgtcaattaggcgtttcttgaagcaatgatgcataagaagggtttcaatcatcattttgtgcgactggttctacattgtgtctccactgttcagtatacgattcttaatagtggcagggaaatgggcccaattgttccttcaagaggtattcgtcaaggagatcccttatcttcttatatatatatatatattttctccagaaggtctttcttccctagttgaacagtttgaaacttctggccaaatcaaaggctataaagttgttaatggtgctctcgttatctcgcatatgctatttgcatacgatagttacgtgtattgtagggataatgaaagggatgcttgtaatctcctcaatctattgaagacttttgatttggctttagggtaagttattaattttgataagtactcaattttcttcaacactaactcacgtcttgatgctcgaaataggatttgtcaactaatgggtgttcctgaagctgatggctctagtttgtattcggggtacc

SEQ ID NO: 45924 - DNA, 1322 bp, Cannabis sativa
atatatgttatgagctgttaacttaggaaggaaattaggtgatgaacatgtgtacacgtaggtacgtagtacgtaacgtgttatgaaaaaatgactataaagatgaatacatatttcatcatttcatattttgtgttgagaggagaattattaattatagacttgatcaagatgagcaccaacaaagggcaagatcaatcatacccaatgaacggtggagatggaactttcagctacaccaaaaactcctacatacaagttttcctcaatcatttgttttttctttctttttttctcatacatatatatataacaactctataattttgtttttctcttatcgtttgagtctaaaaaattgttttattatcttgtttattttattaggaagctgctgtaaatgctgccaaaactactatccatgaagcaattgaagataagcttgacattaaggaattgttcttttctaataaatcaacaaacaatggtgccatatttcgcatggctgatttgggatgttcagttggaccaaacacattttcttctatgggacaaatacttgaagttgttaaacacaaatacttgaagttctctacttctcccaaaactacactagaatttcaagtattctttaacgatcatgtcaccaatgatttcaacacccttttcgcttctcttcccgtcgataagccctactttgcagttggggttccagggtcatttcatggccgcctgttccccaactcgtctctccaccttgtccattcttcatatgcactcttgtggctctctcaacttccgaaagagttggttgatgagaactctacagcatttaatcgcgggagaattcactacttaaatgcctcaaatgatgtttttaaggcttatggagctcaatttgcgaaggacatggctatgttcttggatgctagagcgaaagagcttgtggttggaggtttaatggtgttgaccatgccttttgccccgaatggtgttactttttctcgagtacttatgtgtgttgtatttcatcttcttggatcttccctcatggatatggcaaaagaggtaagtcacttatttttgtctattgtatgtcgaaaagcgaatgtttgttttctcaacgaaaaggaatattactcacgaaaatgcaacaaaaatgagtcagatatgataatacgattaaaaattcagaagtttaaatttttcttaaatgaatttgggctcctatataacctaattattaaacattattagactcccttaacttgaaaataacactattaacctatgactaaatacatttgtattcattatgttca

SEQ ID NO: 45925 - DNA, 1774 bp, Cannabis sativa
gtgatattacaacctactgctgctacaagttcaatgaccaactcccacattccacattcaaacagttcgacatcggcatcaattaactcctccattagactttcggtggccactcctccagcatatacacatattcactcatctactgtaaattccgcatctccttctcggaattattcaatatccaaaacctctaccactacacctttcattccccaaaataatgcagcaaccaaagactcaaattctgatttggataatagccaggcttcggctagtgacaataggatggcctccttgtttccaaacgacaactagttacctccggcgataatgttcgcaatgttctgaaacgatgtcgtactagaatgtctccattggatgatattgccaactctaatctgcaccagcaatcggatcccacctttgagatgtcttatctttcactgttggctgatggtaatggtgctcctttggcgaaggctgattctcagccttgccaatcaccatgaatgttgtatcctggaatgctcgcggcttgagcaatccgagagcattccgtcaattacgtttgctcatctcgcaacataaacctgatgttatctttattatggaaactaagcttagttaaggttctatttctaaatttcgcaatgcttttaaatttcctaatggtatagaagttcctaggataggtttaagtggtggtttgctttttctttagaaatctaatgtaagtgtaactgttatcaattatggacaaaactttattgattgttatatggcctttgatgatggcccttcttttcattttttgggattttatggttctcctattgtttcttaagggaaattcacatgggaactgttgaccaaactcaaagactcggcacccctattgccatggttactcatgggggactttaatgaaatcatctctcactcgaataaacttggaggtcacttaaagaatgaagctcaaattgattattttaggaatacaattgacatgtgtggattacaagaactggtttttgatggtgaaaggttcacttggcattacaagaacaccaatataacaaatgtgaaggaaagattggactatggctttatcaattcagaatggttaaacactttcaatgttcaaacagttactcatttggatttcttccaatcggatcacagagcccttttggttccaattacatctctgctgtcaaattcaaaccaaaaatttaagtctcgattctgctttgaaaagctttgattatatgaagatgcttgtacataaattattcctaagaattggaatgctgcttcagtctatccaattacacaagttctgtaaaatttgtcagaatgctctcatcaattacaagcttggcacaggcagaaattcggtgatcttccgaaaaaaaaattaaaataagccaacagaaagtagaagctcttcacaactcatccgatgttagtcgctcgcactttgaagaacttaagacaagtgagaacatacttgatgaacttttagctcaagaagaagattactggcatcaacgtgcccgtgtttcttggttaaaatctggtgattcgaacaccaaattcttccatcaacgagccaacagcaggcatcacagcaacataatcacttctcttcaagatgatcaaggtgtactgcaaaaaacacattcagaaattgggcacattattgagagttactttcagaatatctttacaacaacaggcattgattcaaatgctctacaccaggttctac

SEQ ID NO: 45926 - DNA, 3528 bp, Cannabis sativa
gcgggcttttttccttgggtttagtcagtcaccggtagaatttatcaacgctttaatagaatcccaaagcaaggatctgaagcttgtagctggagaaggaagtcgaatatcgaatctctcctactggattggcccattagcaatcttctctttaaccaagcctgaggaatttgggatggtgtctgaagaagttgtctaaagcaaaattttaaattaaagtttaaacacgaacctcatgcctcacgtttctagtaatcctagattcatcaccaattgtcatgattacgcgctctgcttccaagctattatagttacaagacactgcttatttacttaatttaaaaaaaaaaaattgttggtaacctgctatagtaggtcactaaatttccaccttatcagtttttttagtacccattaatggatattacccatttagaaatcatccatatatgaaattgtatttgaattacaattctataattctctaatatatgatcgaagatgaatctgatatggtaactattgtcaagggtgttgttttctactgatcaattggtacttcaaatttaaaagattaagttacatgaaattcatggaataagcagtgactggtaagatttaagttaggtaatgaactgagagatgatacaggtttgggagagagtcatattgaaaggtcgaaattcaaaattgtagacaaaagaaaaagaaaaaaaaaaaaagaggaagaagggaatagaagaaaactgaagagagagagtgaagaaaaataaaaattaataatagcataaaattatatatcggttgccagttttcttttgtttttacccttacttcatggtgcttattttctcaccgttggataataaacagacgtgaatgtttagaacaccatattgaaagatttatttctaaatataacaatgtagaagtagaacacaccatttagtttggaagacccaaatataaccctatataattgtggacagaaattgacaacaagtgatgctcctccatatactttcttttatagaaaacaccaaaagacaggttgaaaatcgttctatttatacaactcctcgtataaaaccaaaccaatattcctcttttcaactcaatcatctatctatagcagatatactatattcatatttcatatatttgaaaaataaagagaaaagaaacactataaaaaatgggtaacaaaaacacaaacacaatggccctttcaattatgtgggtaatactcacaggggcactttcacaaacaggtgaggctgtctcagaatgtgccaaggggtgcatggatttttgcttgaaagagagggctacaactattcctgcatgtgagattgcttgtgagaactattgtggccaagtaaccccaaatcaagactcacacaaaggtcattaaataaataaattaattataatttctagccacttcttttggtattaattgaaccacatgtaatatttaatatgtatgttattatgttgtcctttctaattatattagttgcacatatgtaagataattatgtcaaaattgttatagtaatgtgcttccatattttttcttgttaaacaactattttaaattagataattcaaataagttacatttagtatattgtattctattaaataagtagattattatgtttggattgaattcagtattgtattagttattcaatcacaaattttattacaatataaattgtattattaaatatataataaatattttgtagtttatattgtaatctttatgaactcatgttgtcttgtggtaaaatcgaggttgggtcaagatcagtgttagagttaaagtttaagtttagggtccagggtttagggtggaaatgcagggtaggggtgcgaggcaagggtcagggtcaggatacgtggtagaggatcagactgaagttgaggtcggtatccgggtccaagtccagatgtcaagattcgggttcaagtttaggtctatgttgatgtcttgggttagggaggattaaaagtcatggtcgagttggaggaatgtgggattgagattaatatcacatatgatatgattaaaaatatgtatattattttataaaactaatacaatatctttgcacattaaatatatagtacaatttactatatataatataatacagatacagtacaacgtacaacgtgttaaatgctttctttttttttttttgacatagtgttaaatgctcccttagtgtaaaattaaatatattgtaaacaataaatattcatagcttagttggttgaggtgtatgatatattatacaatgtcatgggtttgaatcctataatactctttttcaatattttttatatacatatttttgagggtcccaaatctaattcgcgttaggcccatatattctctcaagcctgcctctgcctaacacttgatgagttttttgagcctgagattgttgaatctttggttttgctctaggcaacaacacaatgtcatattttcagtttgactaatgttcagttcgagtcggattgtcaaatttggtgctaaagatcaataatcagactactttggaatcatctttggagtttatcaagcaagatattttacatgtgatagttttaagaatgtttgttatattcattgttctagaataattaatgtgctagctccttcgctagctaaatatgctttaacaactatctattatgttgtttggtgacctagttttttaaaatgtatctggcggatgtcatttattaataatatttttagtcattgaactcttttaagtttctttctcattagatggtgttgtctgatgtaaaacaaaaaaaaaaggaaatgtacaccaatgtatgtaatttcacaacaattatttaggaaaattaagttaagagaaaatatgggtgtgaatcgtaccaatattgtcttaatcataccagttaatgtggatgacttgtgaccaatttctttatgtaatattttgtatagggtaaactctaaaattttggataatcgtctcaaagtagggctactttagttgatcttagacaaccaaagtgcatttgttctcatacaacttatgataatatcatgttatcatatgaggttatgcattatccgaagaggaaaagaactagaaaggagtgttgtatggttttgaaacttgattttagcaaagcatatggtaaggagtggactcttgaagttgttctaaagatgggttttgatactagatgggtgcaccttgtgatttagtgcgtctctacagttgaatacatgatcacccatagtggaaaagagatgggacctattattctcactcaaggaatccatcaaggtgattccttgtcctcgtatttgtttttaatctgtgctgagggcttctccttgttatttaagcaatttgaagtttcacatcatattagagacattacagtggctgatggtgcatcaatcatctcacatatgttattcgcgaatgatagttacctgtattgatgggccaatgagagtga

SEQ ID NO: 45927 - DNA, 1103 bp, Cannabis sativa
tttagtttgattagttagataataccatatttagtggcatttactttttatatcatatttatcataaccttaacaagcgctggataaatgttccttggtggatatggggtttgaagggcagtgctttacatggcttaacaaacggcaaggtgtggcacatgtgcaagagcggcttgatcgttatttttgcaaccaggaatggcatagtttgtatccttcttttaaagttattaatggggattatattcactccgatcactgccctgttgtggcttctcttgaaaatgtggttcggctcaagcaacaggataaccagcgacgatttcgatttgaaactcattggctaaaggatgatgaatgccatgatattgttgatcagacgtggttggccccggacgctcctttggatagtcaagatagtattcttgatatttttgggaggtgtgctgataggttgggggcttggaataagtgtaagtttgggtcgcttcctagattggtgagagaaacgcaaaaacagttggatggtcttctcagtgtgactcctccgttggtgcgaatggatgaggtaaaaaggcttgaaactaaacttaatgatctcttgtctcgggaggagtgttattggaagttgaggtcgcgggcggattggttggctctcagtgataggaacactaaatattttcacaataaagcgacggggaggaagaaaaagaatgctattgtggagatgatgactgaggatggccgaaaattgagtcttgaggaagatattgtcagtgaaattgagcggtattttggtacagtgttctcttcggcttctccttctgtacaacaagtggagaatgggattactcatattgaaggccgagtttcttctgaggaatgtgaaatattggtagctccctttacaaatgatgatgtgttgtgtgcggttcgggctattggtgctactaaggccccggggccagatttcatgctattttcttccacaaattctggggtacgattggtcctagagtctctgctgtttgtcttgctattttgaatggacaccaatcggtgaggaagtttaataagtcgaatgtggtgctgattccgaaagt

SEQ ID NO: 45928 - DNA, 1670 bp, Cannabis sativa
cttaacaacgtttctcttaaaccgacaacgcgtcttcgtcactcattgttggttgattccgctttgaatattaagttattattatcagtttttgctctttatttttaggatttcttattcattattttgttgaatgtgatctgatatatcaaaagatcaaatcttttatgcagatttgtatgtgatttacttgcaaactcttctcccattttcccaaaattatctgcagataatgaatattttttttgtttgatatatgcaaccatgccaactaaacaacaattttaattactttattgttatttgctattgttttttttttttggtatgtaatggatttgcggtgggtgagctgggagtatgtatatatataggatcggacatatgctcttattgtgtttgtacctaaaactgtctattgtgtttcaaagcattatattagtgcgactcaacatatgctcctaatctatgtgtgactttatacatatcaggttgttctgctttgtaggattatctttataacttaaccgtttactgtttttattttttcaacagagtacttgcttttaattgatgattgtgttgtaatgtgttcaatttttagtgttatggcatatgtctcaacgattggcaccaaactctagatgttgtgatgattagaaacggagaataattaaattattttttgcagaaatatagtttgtttgtctaaaaaactacagaaaaatcatctgccaataaatttgtatgtagatccaaaacgaacgatgagtcaattcaccgttcaaacagccaagtcgatggaagattaggataaaattttagtatggcattctattttaagactttatttaataattctttttccctattttatgatgccacttttttttaactttcgctacaaatgttttctttaaattttgcgaaacacctatattttcctttaaatttttcagaaacaaataataaatgttaaagtcatatattgttatgacttatcataaattatttttttaaattaaggataactacaatattaatattcaaatattgaaattaacgtactttttatttttaataacaatttacatatcataaatttacagaaataactatattttactaattaaatacacggacacaaatttaacttttataaaattcatataatcattcttttagttacaggaatcgaaataaaaaaaaaaacataaaaaccaacccttaaataaaattaaaatttacgtggctcggcacgcaacttctacatatgaactgaaattaataatatatatgtatgtatatatagatgacagagagagtaaagaatttggtgctatgtaaaggcaatggaaatcagccaattactcaggcattctcattcgctgctccgctgttcacaaattaaatctacacatagaaagagacagagagtaatgaatcgcccgaccacgtcgatttttgctgcctcatcacaacttctataatttattgtatctatagatatgtttacattaagaatatatcgatgtatatattttaatattttttattattatattaacagtagttgatgcattgcatgaataataaaatatcttagattgtttaaaagtatacatatgcattgcatatttgaatacttatcaagtgaaaaacataaaaaa

SEQ ID NO: 45929 - DNA, 1223 bp, Cannabis sativa
tgaatcagttttagcatgaatgtctggcatccaatggagatagaaggtattggtgggcaatatgagcaaaatcaaaatatacccaacaaaaaccatcaccatagttaacagaatagctgactggagcttcttcattccttgggatgaatcagtttctttctccattcttgatcaggatcaaatctgttttctagatgattctgataatttcctttcaatccatgttattttatactacttaatctttaacatgccatttttttgttcttattattataaagaaaaacacttggacaatgaatataagtaaaacaaaaaactagtaaaaccgtcactaaatataatatctggcaaaatttctatgtaactgacatttaaatgaacattttccaaggcaaaaatattaatggtatactaataaatttggaatagcacatgcatatgcgttcttgtgcgatacatccaatatataaagacttgctattgggcaatgattgatgtacaatactactttatatttatgttttcatttaaaataaagtttctcatgaggtttgagattaaattgcaccaaccttaatattggaaatcatggtttactaaaacaatgtaaatgttcattacttgtttatggtcatatatattctttttgacaaaaatatgattaataaaagttctttgttaaaaggacggttatagataataacgttaaataaaacacacaaactttttattattttgactaataattaaaaggcacaaaggagagcgattcaagagtggtgattgattcccttatgtttttaggttaggagattgagaattaattttttttttacctgagactctttaaatattttgatggttgtattgtcattgtcacttgtatttctaaattatataattatgtcgctcataatgtggctaagtaaatttttacccagagataatatggtagcttgtatgtttcttctattctaataaattgattttgaaatgacgataagatctaaatttgggtatcaatgaacgcttattttttttttctttttcttaagtaatgctaagattactttagttttggtaacggtagaatgactcatttcaataaaataaaataagctatagcttttatatatatcgagtaatagttaaaaagatacactattacagaaacagagtacaatctcctcttttcatgagatattaatattaatatatat

SEQ ID NO: 45930 - DNA, 1945 bp, Cannabis sativa
  modified_base (1125)..(1129): a, c, t, g, unknown or other
atattctgtgtcataattttttaatctatatgtgtcatgcgtcatagagatgtgcgtatgatctcaatttacgaactgatagttggacatgtaagtgaggtttctaatgcggatgtcatcattactgtgccttgagttcgtgcgtcccatttaatggcaacctttggtattctcagacaattggatctttgaaattatgtttctttgaagctgatttaagttgttggatcgaagacaggcagatcaccatttgaatatatatataggtgagggttcatgtgtgataatattttgccatttctaatttttactcaaacttttggaaagagaaaacccctaaaaatctagaagttttttggtggatgtctgatcacacggctgaacttcaccatcgtctcctccaactccggccaaagtattttccagacgcaacctcgcttttagagacagatttacccatggtagcttcatcgtcgaacattcaaaagaactccaacaaattgataaggtgtctcaaagctttccaaacgaggcttcatcccgctattcagaatcagaaacccccaatctggcacttatgcctctatcttgtactcgcaatacgaatgttttctgggtaggtaggttctaggtaacatgttgtaggttgtgatgccatgtatttttggggttttttatgggttttactgtgaccatccatcgcctgcattgccatatcgggcaaaaaatttaggttgtttgtctcttagaaataagggtgtacgtcggccgatttggttggtttatgttatattttattcaacccaaggtaaacatcgggttacaaaaattaagtgcaacccgtccaattaagaaaaaagaaattagtaacctgcccattaaaattggtcggtttggtcggattaacccgtctaaactgacaattaatgtttttttttttaccattcaattattatattttagttaattgtgataataagataaatatatatagattgaatttaaagttcaaatcaactaccataaaaaaaatatagtagtttgaactttataattttttaaatatgtatgtaaattatatgataatgtaaatatataataaaacacatatacatatatatatannnnnatatttatatatatatataaaaaccctcttaatcgggttgattgggttagttcgggttgattggacaggtttgtattatttttcacccgtccaatataaaaattgggtgggctatattttcgtcgggttattcggtttgcattattcttcaggttatgtcggtttggtttgggcggattattcggttgggcggtttacaaaaatttatgtacagccttacattgaaacatagaaattaattagggtgattgaacttagaaaatttttccatgccttaggaaaattaacattcttagaatcctatattttccaatctacattgttgttaaacttatgagatccaacagggtcttggatgatgttgtcatgattggttctcttgtgtttaggatccttttggtaccagacaatgcgattttgagcccttctttgttttcttccttgtgttctcaatttcgttgtcctggaactatatgtttcgggacataaggtccggtggggacctctccaagcagttaccggaaggactcttcccgtacccttattatgcaatccttagtttggttactaattgcttgatgtccattttttcttttcagatcttacgatgttggaaagagaatcttcctgtggaagaacatgaagaaagtattggagatgaggcaaggcctcgatagaacatacttgctagtccagagttagtggagggcccccaagaataaggaaatgtttaggaaattaacgacatcctgaaccgatttcataactaccagatgtgctaaagctagaggaaaaatgtggcttcatgaacacccc

SEQ ID NO: 45931 - DNA, 1540 bp, Cannabis sativa
aatgtttaaaattctgtgaaaccgtatttttgttgtttttgtgcatttgtgaaactattgttttacggttgattttatatgttccactgttatttttaattattctatcgtgttgttttacagttgtttttattaaaatatagtatttttataaaaaaaaaaaaaaaaaaaatttgtagctgtaaaattataaatttctactcaaaatttggtacttttgtaaaaattcttcaaaaaattacattaaaaatagggatatttaattatagtagttggatgattattaaaataatttttgtcgcttgaactttaacatatattaaatcatacttcctaaactgttaaggtcgttaaaaattatcttaaactattgagattgttgacataaatttgatagtagatattaatgtttgaggaatttaatttaatgatttttttatcaatttttgtcatgtattttaatttaattatattatatttctattatcattcatatgttttcattctcctatctaaatgctagttctaaaaaacttttttaacaaaaactagttttggttttagtaagagtttattgagaagttaaaaacagatagtaaaagctcaactaaactgtattatatatatatatatatatatatatatcttcacaaaaaattacagaataagtttagaaatattttttttttttgtattcattaataaaagaaatactctcatattaaattttattaaaatatatccacttttatgaataggttgtctagcacgtaatttatattaacctacggagtataacgaaaacatcatcttaaagaatataaaaataaaaataaaaacaaataaaatataattaatatacaataaaatttcctcaataaaatgtatgtaaattgtcacaaaaacaaagcaaacaacctcttattgagctgcaaatatcccttaaactgatttgtaattttgcaatatgtaagttcttcgaagattttcttacccaccaacaccactccatcatgcctggcaatagttcatttttttgtagagaaagtaataaaaaccataactcgtttcaaacagtctttttctctttttaactagactcttgtccttacagagaccagaaaaaactataacaattaccatgtaaacacctaatagagattcaaaacattttgaccatttaagctacactttttagataggtcaaaacttttacagtaactcgaaatcagtccctaacaaacatatcttgaaaccatgtcggtttttcggttaaaatggaaccgccatccatcctaagatgcttagttaagaatgcctgtgtttggatttctttttcttaggtttttctcctccggcctctgctatatatgcctctgcatccacattctcagccaatttttgttttccaaactccttagcttttttctatcgaaataaaaatgaattttttgttagttaaaaaattaaaaaatccccatttggggttttcattgagaaatacattctcattatattattgtgttacctttaaggaagt

SEQ ID NO: 45932 - DNA, 2546 bp, Cannabis sativa
ggaatccgtgggagcttcatactcccaccatttctctttttatatatatatacattaagtatattcaccgaattcacaagttatcttgcttagaagttatagcgcatgcatattttcctataacaactctattaatccattcttgaatattatttctaaacacctacatacttgatcaactctattaatccattcttgaatactcgttaacactgaattgattaaactaataagattagggtggggctaagagggaaactcttagggtaggttcctatggccaatttattgtgtcacccaagtagaatatcaggccatgaagcgaatgatgaaagagtagaaaacacgaaacgagtggtagcaacaaatgatgcaaatttagaatcaaaacctgagcacgtttcaacaacaaatgatgcatctggccagcgtcgttccaggattcaatatgtccccgatggctccggttctaccgattcgaccttttggcactgggtcttcttcacaggctactcctcccactcaagacgatgatgacaatagtagcgaggacactattgttgacttgtagttttattttttagttaacagtttccagtgtaaataatactaatttttataaactaacgatatatttatttagttttaaaattttatttatttttgtaattataatataaattttagttttataatataatttggattatatttatatcttattattttttaaaaaaaaattggttttagttataatttaattttattatatataaatataaaattttttaaaaaacattatactggcaatttacttcaccagcaaaaaaaaataaattgtttttagaaagtttagccgacgaagtaagatatgccgacagaacttttggggggaaaaaaaattggcgcgaaagttttgccagcaacattttgctggcaaaacctcgtcgggcaaccctcagtcaacaagttaatatcggtgattccacttatgtcggccaaaaacattgtcggcataaagaatttttccaatgaagtaaggtgttttgccagcaaaataccttatgtcgaccaagcatccacagtagcatattttctggtgcataagcttgtcggcaaaacaatctcggcgacttatgcctagttttgccagcgagaaaactcaccgacagagggtgtgtttttcttatagtgattgttgttgaatgtagagatacattattcaatagaaatagtagggttaaatgtgtccaggttattgtacggccaatataggcctgaattatgtatgtaatgaccatgatatgataaatggcatgatatgattgtgatgcttatttcataatgtcatggttattctatgagtatgatataagagttatgatctctacatatgatgttatggttttggattagcatgggcgtttatgatatatgtgtagaattatttatttattcttattagttaaactatgatactgaaatagttaatatattaagaatatgatggtattgtatatagttatattgttgtgaatttaagaaatatagtgtattgaatattaatgtgtgatcaaaataaaaataataataataataatatatttttattctccttctcatattttctttatttaatattacttattattcctagttctaaagttctttttttttttttttttgtatggtccataattgtaaagttaacctacaataatttgtccaaaaaagagtatatatttacattaacacaaaattctaaattatttatatattttgcacataaattatttattatatcataaatatattgtattgatgtatggtaattaagaaaaaaaattattagctaatggttgctgcttcattttaccagtgtgagtttaatgcagttgggcctaagattgatttttgaaaatgttgcaactaagcccaaatggtttttttggtaacccattatagcccaatgattttttttttgttttctttcaaattttatggtattaatgaaatttcactatgtgtaattagtatgtgtcataattaatgtttgattaattaaaaatgtaacaaataatcaaaattgtgacaaataagtactattgtgaatatatagttatcaaaaaaaaaaaaaaaattgtaaatataaacacatattatttgttactcctataaggaatcatcaaaattaaaaatgttgatgtaattagttacatatattgattttgttagagatgttgttttaaacagccattagatggtaattataaaccgtttgaaaagggttttgcggcgttttggcgcaaaatgaccaaagcttataagttttctagtacaaaacatcgaagcgacgccttggcttaggccaaggaagatccatgtaaatctcgaatcttctctttaattccacaaatacctaatttaagtttcataacaactaacagaatttgtggaatttgatgaaaatcaaatagacattacaaaaaaatgctacttttagtgataactttttagtcacaatataattttttgtgactaaatgt

SEQ ID NO: 45933 - DNA, 1267 bp, Cannabis sativa
tctccttggttccccctcaccgttcccactctagcttctcgagtagggaacttaaggcatgagttttgaatggaggtaatcgctccaaaatcgaccaaggctgatcgactaaggatggcattgtaggcagtgggacagtctaccataacaaaggtgcagtacttgaaagtgctctgtggggtgtcaggacacagagtgacagggagccttacttttcccattgagacgagtgtcgtcccattaaatcctatgaactgtggatcgctaggcgacaggtccctgtccgtgagccatatggccgtgaaggcttctttgaacaatagatttacggagctcccgttatctaccaatattctagccatagccttattgacgatgggagtttctataacgagagggtcatggtgggggaagcgcagtggttttgcgtcttcttctgtgaaagtgataggttagtccatgagtttgggcctttgtgttgggagttgagtgacctcccacacttcatcgtgttttatggctctagcgtaatgtttcaacttgttcatggtaaatcctccaatatgaggcccaccagagatcatggccactcttccattcggccggggtggtaatccagacacctgctgaggaagcgccactccgagagttacttgcccttcaggggtaccccctgttccatcctgaggcaatgggcctcctgctggaactaggtttaagtgtggtaacatgcttttgatccattcatacaagtgacctagtcggattaggttcttaattttgtcttttaggtttttgcactcgttggtggtgtggccaatgtcgttgtggtacttgcaccttttattgggatctctccgagagttatccctgtacaaggagggaggcttctgataatgtgtattttgttgagtggcgaagtatacatgctcttgagtatctgtaagctccgtgtattgggtgtactggggggtatacccccttcgctgtcggttgtcctcagtccgtgtactaccctttgaggatctcttactctaggagctctgtgcagctcctgccatgctggtggctggtgcagattgggacggagtttggatactcaatcttgagggattgctcatgggcgccccaaagtgcgataatgtgggagctaaagcgaggctttgattgtatcttagggtagtgaaaaattgtatcccactcatttggggagtggcaggagatggagctcccagaagttgagctctaggcacatatcccgataccc

SEQ ID NO: 45934 - DNA, 1550 bp, Cannabis sativa
aggtgtgttagagtaagcacccagggcggtctggtaggggtaattgcgaggttttcgggcataaggctcgcagtttagaaagaaaagtttgcttgtgtttaagagtggtgtagatccactcaaggcggagtaatggacgagcatgataataccgatttcttgatttcatgggggttaagagtaatggttgggttagatgagtcgttcacatgatgtgtagagatgattccatctggtgggatagtatacccttgggatatgacttgaatagcataacctgtgatgctttccaaattttgttctatgaaaatgttgcaacaaatttgcttaagcaactaaggcagaaagattgatacgactaacatagggtaatgaggcggtgatagagtatgtcactaaatttgatcggttaaccaagactgcattagatgaatggccactgagactattagagaggggcaaagtttatttgaatattgaaagataaattgtatgaggagatactcattgaagaaaacgtctggtgttggacctgataagggtgctgaccctagtgactgtaagaaaaaggtctgatgatttatcagctactgaaccgaataagaaatttcaaagtaaccaaggattttaacgtggaggaaaaaaattggcatatttatctaaaatgccgaagtgcaagggatgacggcactttagttcttgttcaggtgtttgctttgacccaggcagaggctgatgttaatttgataagtttaacttgtattgatggtattttgttggtagttttaatttatttcggtgcaatgtatttctatatttcgagaagggtgattggacacctgtataaacttagtgatgtgttaatgagtagttctggtgcctttcagcaaactggagaactggctattttccagcatgtaatttaattacttttcgagttgtaggaaaagggaatggttggttattttagttaagctaaatataaagaattttgatgttattctacagttgaactaatttgcaaggtataatgcaaccatcgattgagaaagaaagatggtaaccctagaatcagaaaatgaggactcattcatgttcttgggcaaggttcaagggtcttgaaatccatcaatcccgacattttgggaagaaggtatgttatgagatggatgtatcaatcttttagcggtatggtgagagatagaagaggaatatcagtggaactagagctcgatcttgtggtccaagagtttctatatctttctagaggagctaccaggattaccactgaagaggaagattgattttgatactggaagtataaacttacacttaaaattctgtattgaacagtaaccagagaattcaagggttgaaagttcagttataggggatgcggggcttaacatttctagaccgagtacctcatttttgagtacactgatgttggtttgtgaagaagaaggatgaaactttatgagtgccaactgaccattaggagtttaataaaataacgatgaagaatgagtatcctttattaaggatagatg

SEQ ID NO: 45935 - DNA, 2006 bp, Cannabis sativa
accaataaaatttaatgtaagcccaaataaaagtctaacaaatataacactcctcttattttatacatgatccaccacatcaatcaatttcaaagagttattattattagaataattaatatttttgtgtctgaattttttatgctactaaattatctcatttatagtatatgtaggactcattaataatattcatcaaaagataaattttacagtaatatagttttctcattatattttatttaattttattgtgaaatgagtaacgcagataatgttaattaataaatggatacaaactaaatgtattataccatttttactttaatgattaaaagactaaaagtaaaaatataaattattatataaatataaaaaaaattctaatttattatttattaacaaaagaaagagttaatagtacctaatttttattcatttaccaactatcatcaactattttattcatttcacaataaaaataaaattaaataaaatattacgttaaaataaaaatttatatttcaagagatattattaatgatcatttactatagaagacacaatttaatagtataaaaagtttaagaagcaaaaattacttattattattattattattatttgttttaatccatgtatattatgaggacatataaatccaatcacattttactatatataataatggtaactttacgtttagttaaaaaccaagtggatcttttttaagaaaaaatcaattgtagttatcttcactctcactatatattttttttttatttatatgtacatatcattattcttattaccattattcctatttttatttttacgggacgagaaagaaaagatataataggacacttaaaaaacttagaataaaaaaagggaacgtgcattccttttttatagttgtctcccatggtgagagccagccttttaaaaatagtggagacaaaataaaaatacaaaatgatatgtttttttcttttctttttttttttaatggtcaccccaactcactctctcttgcttccgtctagtctagttatttgttagataaaattatactaaaaatggtaagaggtagtggtatttattatgtgcggaagtaataaatagcaaaaaaaaaaacaatgaatataattttttattttaatatgactcaagtgtttttcacaatatttcttgaactcactaaagtgtttctcaaaatttagctatacaaatgttctctctctatcagattttctacttaactcgagtgtactatgttgcacaccgaaatggcacccactgaattcatacacattgaattgctatgtattcagttgtaaatgctcttcaaagagctccatatttataaaaaagaaaactcaattccaactatgtaatgatgagagctagatcatctcccaaccatatgtaataaatgagaagtagttccaaccatatgtaataaatgagaggtaattccaactatatatactaaatgagagaacataaatcaaaaactattgcatagctttattgacaaatgtagcaaataattaacaagttcgaaatctcttaatagatgaactatataattgtaacttcaagataatttgagttttatgccaaatccaacattgtctaatattacttatgtcatattatttttagtgtaattaaatattaagtcttacataatttaatataataataatttttatgaaatatatcacaaattattatgcaagaggttactttgttgtggtgctaagtagtagtgtgcctaatagtaatgttatttagtaaatcaaaatatataaaatccaatattaaaatacatcgttaatatacttttagtgctacttgacacaaaaatttaaaaaagaaattattaattctagattatttatgtatatttcttgtgtagaagtaaatgaatgaataattttaattttaatctctagtatacaattttcttctcttctaaaaaattaattgttcgggtcatc

SEQ ID NO: 45936 - DNA, 2910 bp, Cannabis sativa
ctaagattgacccctcccccgacagcaatccagatttttttatttagttatttttctaatccattttgtttaaactactcctaaaggacaaggacagaaaagaatgaaaaatgtgcttgcacgttagagcatatacctattaatgttctgtcgaaattcatggatcctccgattgcgtccacagtccacaaaatctattccacctaacctctgcggtctttctttcactaaattgctcatctacaacttaaacatataacaccgtgaataaggcgtataaaacacaaataattgctccctctattaatgcctatgtatcagtaatttgttcatatacctcgttttctttatacaaacagtatggcgttttttctattgtgccctgattcaaattatcaaagcaatcaaataagcaaatacgatttgcacatccaatcaagatataccaaattaaagttgaaagaaactaacctttatgggcattgaactttctgagcttggccttgtatttcgttggtcttcagatgtaaggcggagctgccaaacaattatgataaatggtgtgacactaatatgcacttttcgctacttcactctatggaaatttatatatatttatatgacagtgttatagttacataccttactaaacaaatgaattggcggctcatcttgaaacctcttatcagttgaaaaattgcacctctgaaaaagggaaagaaatataggtaaaaaagaaaagaaaagagaacaaaacaaaataagattacctagaggctatcattgttacctgtttaatattacgaaagatacaaagttttccatcgcttacaagtttctgcactaggttagtgaagataattaacaataaaatttatcataaaaaaaaaaatcaaagaaaaaacacaatataacaataataatagcacaaatttaactgaaagcactagcaaaactaataattaagaaccttttttgtaggagaggaatcttgggagttatcaactgtttcccttttctcttgccttaagcggtcgacacagttggatctagtaacaaaataaatgtaaaacagtaccactatcaacatcagactactcttgcatgcactctgtaaaatgatatttatcttattgttcatgtcaattcgtgtcatttgccaaggagaactggtttgcactgcataagctactttttttttttttttgtctggggaaaagacatgtactaatttattcagaaatgcattcagcaacatgaagtattgtgaaaaatacattactaggcatctcatctctccaatctttatacagaaagaaataaatattatctttaatggatggcaggttatctatgtccgcgattgtaacatataaattacctttttccctctgtgtttgaactgatccaagggatatttgtatgctgcaacaatgacactgttaggcctaatgaacaaaatattgcagtaatgatccatgcaaaataaaaataaatgaattacattattattgaacgtattttccatagccctctccgatgtcttcagactaaatacctgaaattttaaataaagggaaaaataaatagatacttaaatagaattaagcacttagtaccagagtcactttctttgtgttaacaaacaccgttaattacttgaaactctggtagctgcggttcagtcctcttatgaagggtcaatggagactccagtatctgcaaaagcccaagacagcccataaaaaaaaaaaagaatcgcccactatttctttcgagtttaaatgtctatatgatatttctttccagatacagaaatgttaaatgtcaaaggtagaatttttctttacaccaccaggaatatgtctaggagagatttagcagtgatggagtttgttagcaaaatgtaatcggcagttggtaatcttggtgcttgtatgagcagttgtgtttgtgttggtgctgtttgattaatgagaattctttctttttgacaaaaaaaaaaagagaaaggaaatgttaaataaaaatacgaacttttctgttcaaaggacgagctttaaaggtatgggcatttgattttgttgattctgcattcatcttattcctgaaatcaatgtaaacgcattacgtgaagcatgatgatatcatgaagctgagtttgaaattttaaaaaacaaagtaatctagaaagaagtgaatatacctacgtcgttctgctctatgcgctgtctcaagatcaggctctctaggaatagtagctctaagtttggcatttactgagctagcaagcctatcatcgtgctgtgatgactgggatgacatataaattcaaacttaaattgtaacatataattcacttttgaagttttcgcagtaataattctcagtaaaaaagaaagtgaaaaaaatacataaaatcaaaatgtgggttttcttttacattttttggcttcttgtgtaacaaaagagctttatgctttagctgggcagcctgcattgtcaaattcacacaattgtaataaatcaagtttttcaaatgtgtacattatacatatggtttcaaatcttcagtctcaattccctattaatgtatgacaaaatatcacatctaagaaagcactgattataatttcctattataaattcgaattcgaattctctttaagcataagacaaggatcataatggataaatacccaatgacatgcttaaactgactacaatgccaacttttagtgtaccttgcttaagaaaccaccttccaatttttgtcttttagtagctttctcctctgcaactgaggagttctgtgaactttcctcatcaataatacctaatttcgtttgaagcctaaaagtttatgagtgatattacatgaaaacagagttagacacataactaaaaatt

SEQ ID NO: 45937 - DNA, 1766 bp, Cannabis sativa
caagttaggctgttaagttagttagggaatagttagttaatttctgtcgtgttagtggctagagttctcattgtactgtctatataaataccattttgttactcaataataagttgttgagttgagagagaattgatgtaaagggtctaagattttgtataattctggcccgtcaagagagttatttttgtaggagtaagaatccattactgatgaagaactatatccctataatgtactaactctgagcatcatcatcaatcaataggcaaaatttcaaggtagttttatctaaggagtagatccaagctcactgcttgtgatcattgaaccttgtaatctctgtctttgcttttcatagcattgtcattttagtattttctttattattctctaattctcagtgtttgttatgtttttggagggtgattaattcaccacacataatatatgtaaaaataatgttaaaaagtgatctctatttggactttgataataattgtttatttaacttatatatactataatcaataataataataaaaaaaaaactattctattaattttattttaagggagcagacactcaccctgagctgtatgttggttacccctggaatataatcaaatgaaaacacattaattaaggagaacattcataatattagttttgctactattgttatatatattcttacactttttattttatttattacttttcttaacatttatatgatatttaccttcgaactatatatatataaccactatcaaatcatgttctttttcatttttttttctattaaaaatttaaattaaataaaatgcgtacatgagtttttagtggatgatgtgttattgtcatgccaatatatactacatgtgaaactaatgatcatgggatatataatattaatttttgttgctatatgtagaatgagatttattttagtactcattatccttggctcaatagaattatagcatttcccattcaaataattactatggatattgatatgatatattttttcttttgaattaatatagataagataaattagacatattcttcaaaacataaagcaaaagcaactaattaaaaactgatttaagacttccccaacataatatatatatatatatatatatatataattatcgtacaatttttttatttgattattttattgggaataatcgtataaaattgaaacaatatactttatttgaaatttattcaaaatttatcataaaacgcaaatctgttcaaaaaaattaaaatctagctatagtcggctaccaaattctctcattatataatagacaacatttaagtattttttttattttaaaaaaaaattacccattaatttaaaccaaaaattctatatatagcacattttatatatataaaaaattctcttattaaatataaatttttgattaattggttcgcacgtaaaaattcattattaggataacacaaaaagtcaaagtcaaaatgctttacattgtttcggaagaaaacttaatcagatcgaactcaaaatatatacattatcccaacattttttacgtacgttacttacgtaacaataagcagactttttatttttaagtttcatatataaatatgataagaccactttaatagaacaatcacataaaatccaacattatcaccaaattaaacaaaactatggaaacagagaaattccccttagctccaccccacaacaccatccaaaacgatcatcacg

SEQ ID NO: 45938 - DNA, 1862 bp, Cannabis sativa
gtcaaagaagaatcgcctctaattgttacgctctgtttaccaagctgacattcaatggtttgttccttccaatccgccttggtcattcctagtgtaggcaaccattgtaaactaaggataatgtcggcactccctaatggcaaggccaagaaatcatcccaaatatctactccttggaagtaaatattcaaattctcacaaatgccttcacatttcttcgaatcaccatttcccattgtaacctcataagccttggtctcaactatcgtgatgtgcaaattagtgactaaggacttagaaatgaaattatgagtggcctcggagtcgataagaattaccactttatgctgagttgacccttgagtttcgtggtggaattgctagacaatccagtcatagattggaaagatacctccattgatttgtgcacttcagtggtgtccaactctatggcatcaacatttacatcctttgtttcaatatcaagcccattttcttcaacgcccttaggtaccatgataacttttagctcccttttgttgcatcaatgtcccggtgaccacttgtcatcacagcggaaacacaatcccttttgtcgtttatgttgaatctctgaatcggtgagcttccgcacctcagtggttgaattcgcaaggaaagttctagctaatgtcttttcagctctcgctgataagtcaggttgtgccacacagtttgaagaataatatcgatacttgaaggctctattcttttctttgatgtcttgaacgataatcattgcttcatccacattccgtggtctctgaatttgcaattcaactcataaagaaaatagcaaaccatttcaagaaagtgctcaattgtatggctggatccactgtcttcaagggtgccaataaccttataaatttcttgttgtaatccgaaacagagctctcttgtttgacaattaaaaactgatcgtacagtaacctttcttgagtgtctcggaaatggtgcaacaacaatttcttcaattcctcccagttgtagatatctcgtttgttgctgtcatattgacaccaaagtgaggcgtcgccagaaaatgaaatgaaagccgctttaatcttctcttcttcgtcgtaattatggtaaacaaaaaatctttctgcttgtaatatccacccatcagggttatcaccatcaaacgttggcatttcaacttcttaagtcgattcttatgacgaaaacatgtctcttgttgtccttgatcaagggatcccccatctgaatattgagttcccttgaatcctaccgtaggagatgtcacattagactcatctctcaggccgtctcgtgttccactctgttggggcccaaatggtgctaccaagtccttgtttttcccccgctcttgggttccagcagctccattgacctcttcccttgattcttgaagagttcttgatctttcttgattatccaagagaatcttgaactgttgttgcaaggtttcttgaagccgttgttcaatcttggttaccatctcctccattgagttcttcattcgagagactttagttttcagagcttcaaaatatcctcaaacctagcagtagcgttactcttctccacaggtttctttggcatcatgtccgcagctcaccgcaccaatttgataagatattcttagagaataaaattatttatccaaatctgaacagagttataaaatccctcatacacaacctctttattgatgatgaaataaaagaacaatctagctttcgagatgctagtatctccaattacaaactttcgagagggttgctctatcttaaagtctattctcttatatttccaagctgccccacaaatatatt

SEQ ID NO: 45939 - DNA, 1502 bp, Cannabis sativa
cccgatggggggttcgatgcttgcaagttgggggggtccaatgcggggtccgactagttcgatggggcccgatggggggtccgatgcatatgtgggttgggaaaaaatggggctgagttatgaggggtatttttggattttagataaaagtgtcatatattttttttagtttgaaatgtattggtttaagaataaaatattaaggttttttaagtatagaaaattaaatttccctattaaattgtgtaactatatgattatggtttatatgttaaaccacatatgtggatgtggatagatgacagttacaacaatacggaatcattattttatgagtttgggatttgaatgctataaatgcattctagataatgtgctcaaacatttggatttgaaatctcaagtaacatttcaggtgcaaagacaaatgataaaattggtgtgatgttatttggtacattgccaacaccacaaatcatgttcacaaattacataatttggtgaaaaacaagagttacacacaatacaataatacaataattagttttgttagtagatcgttcaacaaaataaaataaaatattaaaaagattaagttgcattctaaaatcttgaacaaaaaggctaaattcaaaaggcttatgcacaaaaataagtgtattacatgaaatggtactattgatagtgtgttttgcaaaatgttggattaaacacaaagtaaataattttgtgtttatataagaactttttaagtaataagtataataacaaatttttgtgatttattttgagtaataaaattttaaagtcgcagttaattgacctagatttcttaaataaatctataaaaaaaattagttttttattattattatacaatttttctgctaagactacattctccctactcatttttaagagtgttctagatccatatgcaatttttgtaattttcaaattgtaatcgtactacaaaatcttaaaactataaaaatacgatgtaatacaatacaatttaagcgattaaccatcattatcaaatataataatgaaaaaaaaaaatcaatttaataaaattttaacaaaaaaaaatgatcaaaaatgatcttctacacttatatggtgtcagttagacaaaaaaaatcaaattgcattttttatagtgtgagcaatttgtgcaatttgatgaacaaacatactgatttctatatctaggttgtttaggagagttaagaaagttttttgagaatagtaaccatatagagtacaattgtgtaaatattggtgactattaaccattttatattttagggacttcttgtaaaaattcaaaaatgatctcctacacttataccaaacaaatgaaaaaacaatggtgattggtaaaatgtgacaatgatgagatataacaatgcatgaagctataaatattatgtggttgtcactaaatcccacaagacgaacaagtatacaaaatgtgactacaaaaaaaaaaaaaaaaa

SEQ ID NO: 45940 - DNA, 2703 bp, Cannabis sativa
cttttggcaattttaactaagaacatgtataattttctctatttgatgaaattatggtgtaagtagattttagaatgataatataaaaactttgaagagcacttattttttgtaagttgtgatactttgctattataaaatgttatttggggtggtggtaaagcaattcttgatgtgtaaaacaattctcattcatgggtttggtttcttgtgattttatctacaggggtctttactattagtaggcgaggagctctgaaaaatgaaattgacttctaagtttataactgaagcttctagatgtatgagcaagattattgaaacacttaacactttactattagtatttattcatattaagctaatgctggttgaatgaattttatcctaaaatctaatcatttgcaggtaaaggtggaaaataatatagcataattaggctatattaagataaatgaccatagtctctataaaaaaaaatgaccatagtgactcggtgtatgagctggttgtttgtcacccctccaaacaatataatcttaaaatgaatcaataattaatatccaataaaggatttttttgtctgtaagggatgttgaacttatattttctttaagttttatggttaagaagtattattattttcattgtacgtggaaagtctgaattgatattctacatggtgtggctcaacttttctctatgtaatatatatttggtttgtgtgcttctcatgtttatgttgttattccctattttcctcttttctgctacaataggcttgtgctctagctgatccaactttcattcctccagctgttgttcctgggccccgtgaaccttggaagttccctgctaaagtagacctgaagcttaacattgatgcaactattaatattgctggtaatgtttcaggtgtcggagctattaattgttcagagtgaatttggccacatggttgttgctttttcataacctctcacagggtgttataaggctcatgagatggaagccttggttctttttcacagcctccaattgcttcagaattgcagttacctatcaatgaaatagaaacggatgcgcttaaagtttccatggcaatcaatcaaccctcgcctatgttatctacttttacagatattattgtagaagttattggtcttttatcatttttttttatgaaattgttgtttctcatgttcgtagagatgctaataaaattgttcgtggcttagcaaaacatgctttagagttagataaagtctttgtttggttgaaggatgtcccctcccctatattatttgttgttttaaatgaataagtttgatttataataacaagtttaattcttttaaaaaaataacaacatattctcttattaccatagaagaataagaatgttcaattatactattgaccattgttgctcttttatttccttttcatatattatattaaacaattaataaaatgatattatttatttaattaaaaaatatatgatagtttaccataacaattaaaatttattatatacttcaaataaaaaaaaagtataatatactataaaaaaaaataataaaaactaaatatatgtgcatttgcacgtaattttaatctattatatatatatatataatgttgtaaattcgtgtgtgtcgtgctggcccgactcatatttattcgtgcttttcaaaaaatgagtcgtgatgtaccgtgccacagaaaaatataggtcgcgccaatatttttaaagggtaggcccggtatttttcgtatcgtacttggattcgtgtcgtgcttcgctcgtgtcggttcgtattttttaaatagctcaatccatttttatatctgggcttaaattcgtgctttactttttcataatcttattttacaattactattcgtgctttagtttttcataattttattttacaattattaaattatatgtacaaagctttagttatatttatgtaatttttaagcaatattttacagataattatataaaagaattattaacatcattagaatttaaatatttacttataaatacttaaaattttatatcacactcaataaaataaattaatatataatttttatttttatttttataattttaattatataattataatattcagtattatattcatactttattattattaataaattataaaaaacaaattaatatatcgtgttgtattttttttcgggattgtcgtatattgtgtttttcgaattagtctatttgtgtttacgtgtcccgtcttttatactaatgtatagcatcgtaccatgacgtgtttaagagcatctccaccggtaaaattttagaggatgcttagtgaggtggacatattatgtggcaaaatattgagatgctataccatttgagagaaaatgatgtcatccttaaaatttatatggatgctatgttgtagcattgatgttattcatttttttaataaaaaattgaagctaaaaagttattgtagctaaaaaaatagaatatatattaaataataatgtgtaagatcataattatagtatttttaaagtgtgtttaaaaaattaagcgatgcttgtttaggtggatagatgaagtggtaaaatattaagatgctatactattggagggaaaagaatgatattctaggaatatgtgtgaatgctatacattagcatata

SEQ ID NO: 45941 - DNA, 1322 bp, Cannabis sativa
accaaccattttataaagcatgtgattgattgttatggtgctccggaaaaataagacagttggatagatcagtgtatatctattaccactctgaatgtttgtcttaatagagggtaagtcggcaagattaagctctcgtgtggcgtaacccactttctccttatctgtttgtttatttgggctgcagaaattctgtcaagatttgttggaagaaaccttaggaaaatggattattaaagatattagactgtgccgagagggtctaattctgtcacatattctttgcgaacgatctaattttggttggtagggctaacttggaagaggctagaggttactggtagtgtctagaagatttttgctctagtcagatcaataggtcaagaaacttaaaacttcaatcttctttagtaagaacactcccgatggggtgaagagagtgatcaaagaagctctgggaattggagacctagtggggaatactaaatacctgggagctccctgtagtaagatctagacagaaggatgcatactataactttattttggatgatttgatcgctacgctacaggggtggaaagctgggctactcttattaagtatgtgggactatccatgcctagttatgtcatgcaaactaccaaactcccgaacagtcttgttaataagattgatggcatggtccgcaatttctggtggagttttaagaaaagaaaccatgaaattcacctaaaggcttgagataaaccgtgtcttcctaaatcccgtggtggactaggatttcggaaaactaaagaaatgaaccaagcttatctagccaagtgggggtggaagctattaactggtagtcaatccctttgctaccgggttttagaagtgaagtacctaaaagggaaagattccttacttgcaagtacaaagacttaaattcatggttttggaaaaatgtggtaaaagctaaaactattttaaagaaaggtgtttgtagaatgattatggatggaagggatactagaatttggaatgatccttgggttttccatggtttggagttttatcctaagtataatggatctgtagatgctggtggtagcaaagtggctgatcttatgacagaccatggtttcccaagcctttaggtgataaaaatactaattagtttgattggatgtattagatttttggacaccctatccaacatccgatctgatccaatcagatattcaaaaataacaaccaatccaatcacaattggatatccaatgtttgacgatcggttgtaattaaatcggtcagttgtcattgaattggatgatttatg

SEQ ID NO: 45942 - DNA, 2120 bp, Cannabis sativa
tttttttttttttaaatgtattaagatatagcaatgtactatttttttaacactccattcaatcgagatgctctaatagtaattaattattaaattattaaatcttataatagatctattatttgattcaatatgacactttggatactactactaacatattttaacacttctctaaacgtttgtatcaaccactatgccaccaaggcaccaccctaaataggaatattacaaaaatatattttgaaatagtgacataataaaaccaaaaatataaaagctagcaacaatggaatatgatcacacatatacaacatcatagggtaggctctgagatgaaatgggccataagcaaaaaaaaaaattctttttagtccttactataaaaataaatagtatttttaaaaaattattaaaaaaatatgtgtatcttttaaaaaaaatatatttttatttaggccattaaaatgagtgggcctaacccacttatgtacagagccgatcctgaatatcatatcacttatatatagtattaagtctaaactaaattatcaacaaatatataaaaattaatataatagtgtcgacatatcaaatacatatatattgataaagaattaataattaaatattgatttattgcaagcgtgagtttagttacactataaatttaggtgacaacatataaattaattaataggttaaagctttttacataattatgtcttattattaaaaaaaagcatataattaaatatgaatattactaataatacactataattaaatggaatagttaattattgatggagttggtcgccgcataatcatatgctatagaaagatgctataggaactcaactcaagtaacccataattccattctctaatatttctatataaacaccatcaaatcctacctaattcactaattaattacatactgagttatatagttactcatccacaaatcgctatgatcatctcttatttgtagttttggagcgcgatttttctttaaaacccaccaatggaagtttcttgtcgtgccctaatctatcgagatatagtttttattaataatggctagctgacgctgattttagtttctcttttcaacagggcaatttttcaatcctttggcaatgagtttttcaataattaagctaagaataatttaattttaatttggtacttattatttgctatataattatagtagtagtgtttttcattgtataacatgcatccaataatataaatataaaagtcaattttatattgcattttatataatttttatatataaatgtattgattatttattaagatgtttttacaatatattttgatatatatgcatacgaagcatcgagctaggtgaatgttgtaataataattaaaagcaaaaaggtgcaagttttattttttatttttttgaggagaagtcttaatttatttaatttttattctaactcaaattaactaaaaaagtaaatatataataacatgcaagcttataataaatttgaataatatgtataaaatatattttcttaaaaaagaatataaaatattaattatatggagactatatgtatcttgctcatgaaaatatatataagtgaattgttctaattcaaattagctaaaaattaaaattatgcaaaacatataaaatcctgaatttgagtgggccctaaatatgaacttagccacaatatatatatttataggtaaagtacacatatatgcttaagttttttttagtgctaataatatgttcttaactatatgataaagacatgattacctaaagaaaaacaaaagtaaaaggtattaacattatgtttgataagaaaacaaaaaatgtttttttacactacatactgaaatttttaatttttttagtaggtagaatttttttcaaaaatactgtgtactgtgttaaattattattattattccacgattaatttttaattgttctactgttgtctttaattgttatgttttgttgtttcactgttattttataaaaagacagtatttttgtaaaaaataattgtgtggctgtagaattgtaaacttttaccaaaaaaaatctaatatttttataa

SEQ ID NO: 45943 - DNA, 1819 bp, Cannabis sativa
gttttgttgtagcaaaattactttctgctgctgcaaacgcttacagtttttatattttcttatgtacaactgacatttgcaaaaacacggtttttcacacgatatccatcacaattactctattcaactggtttttatactgtcaaaagtaggtatcacttagctacatttcttagggatgcatgacctccattgcaatcactatcgcctgctacatggtggacccatttttggaaactgaaattgtctcgtaaaatcaagatttttgcttggcgtgttgttcataatgctttgtcccttgctgctaatctccatcataagcatattattgaagactttgcttcctctagatgttctcatccttgtgagactttaatccatggcttggagccattttgacttattttcacctcaaattgtctcttcgtagcttttggattctaaaaattcggcggtaataatacttaagttatatttctggaactcaataggtacctaatcgttaaatgttaagccattatatctacgtgtcattttcttattggtatatttgaactatttttttttaaataataaaaatttaatgagttggaccaattaaggattgtctcgtgataatttttttaactaggtacttacagaagttctaaaattataacttaagtattattatcgccaaaaattaaacttaggtatttatttgcaactaaaaattaaatttaggtatttataccgcaaattactcttaaatttataaatcttttaataacaatctcaatccttttttgcaaactcaattatgattacactacaaaacttttttgaaacatatgcaacttaggattaaaagcaatgctaagaacaagcaactctattaaaaaaaaaaaaagaatcatgcaacaatttaatccatacccctaaaggcttcatttgcatcatcaaattaagcaaagttttcaacatacaaaagtgcaagccaaaatatgaaaatacttctaaaataatagagcttggaagttggaaatactagtatggaatggatggacgatgactttgatgatacttctaatttaagtttttaatgtattgcttagaggtacattaattcttaagagtaaaaaaaataatgatttttgaaaaggtgatgtttagtttggtgaaatgtaatgataatagtaatagtgatggaataagaatagtaatggaaattgattaagatgtttggtttgttattggaacgaatattgaaataaatgataaattgacaaaattatcttgtacaatgtaatttaatttttatatttatataaaagagggtattaaaataatcattttagctttcctttatttaatattttgtgatataatcatccttacataatttttttaatgtaataggaattccatttataaataaattatgataaatgtaatcctattacatcatttttaaaagcaaaataaacattgtaatgaataatttgattctattaccattcccattacaacaaaccaaacctgcagtgaaatggaattatttttatctttttttttttcatgataactgagtggaatgaaattgttaatttaattgggaaatttgattttctatactttaaaaaccttaatattttattctcaaaccaatacatttcaaactaaaactctcataactcaaccccattttttcccaacacgcatatgcatcggaccccccccaccgggcccatcggaccccgcatcggacccccatcggctctcttcctctctctcaaaccgaaaaaaaaacccagagtccgatggtcggaccccccatcgg
